United States Patent Application Publication US 2014/0057251 A1 - sequence listing, part 150

SEQ ID NO: 295871 - DNA, 3916 bp, Cannabis indica
caatatagtacaagacaaaacactccaaagacaaaacagaggaaaaaacctcggacaaaacaaaacatgtcaaaagacaaaactcaataagtaggcgaagataaattgatagcttgtaacttaaatttagaaaaaaaaaaaaaaaaaaaaaaaaaaaaactatttctatttttaaaattaaaaacattttttaagttgtgaagcttgttagtttttacaaatatttccatttagcatttctctttggaaaatgaatcaaagaacacccctaactaggccgctggctgataccagacccggggtttcaatgtccaactgctaatttaagctcagtttgagttgaaaaaaaatgcagatatcattcaatttctgtgtctcaaggatctgaacgattctgaatcgttcttcgaactcagacctcatcacgaatcgaaccaaaaatggcgggtcccaaccggcatttgctgcctctcctcctcctttccattgctgctctcttcttctactcctactaccactctacactccacgccttcacccctactcctaaccctcattctacttttccccttcacacctcccacaccccccaccgagacttcactttcatcatcaaggttctcgcctacaaccgcctcgactcgctggcccgctgcctccgctccctcgccgctgcagattatctctccgatcgggtacacctccacgtctatatcgaccacttcgcattcgtcaatggctccgctgatgtggatcgtatgttggaggattcgcatcgaattttggagttcgctgatggattcagttggaaatttggggagaagctcgtccattatcgtacccagaatgctggacttcaagcccagtggctggaggcctggtggcctgagtccgatgacgaattcgccttcgtcgtggaggatgacttagaggtatcgccgctttattacaagtttcttaggagtttgattgtgaattattattatggtgatccagattttcgtccgtacatctatggagcttcactgcagagaccaaggtttgttccaggtaccattttgcttatagttttcttaaaattgaatcgtgaacaagcataaaaactgatagaaccaatgtttgggttatcatagattctgtacacgttgtttgagaggtattgtgtgattaaattgtgtataaaatgttgcaatttacatagcaatgtttgcaagataattcagcttgaatgattgatgttaaataataatgtgttattagtaaaattgtttgtatgcaaaactgattgattatctaatagttggaaagtaatttcatcaatgaatggaattttaatgtctggattacatggaatttgctggtttctcttccaccaaacaataggaatgtctgacatcttcttctagttggtctagaattacctggcattttgaatttcgctatgaatatattgagtttcagttgagctctgaataaacaatttccattataacgaaacttgttgaggatttgtgcttgcttgcaaataattttctcagtcaagtctcatgtaacaatagcaactttcccttttacacggctcatgctgtgctttttcgtagagaattattgcagtcaagaaaatatggtcttgtatgattcctgccttttctattctattataaatgtgtactatatctatatacattacatacatacacacatatatatcatgaacaaattctggctttcaatgtttaatttgtaagtttttgctgattacaggtaaacatggtaacaaaatacaattggataatggaaccagaatttttctctaccaattggtaggcacttggggtcagctcctctttccaaaaccttggaaagagttcaggctgtggtatgacaaacacaaagccaagggcattaagccatttcttgatggaatggtacttcttgttcttctattttcgttaggtttcaattttcttattttttgacaacttttcttcgtttttttgtaaatctttctattatgtgattaagatatggaattcaaatgcaggtaacaaatgggtggtataagaagatgggggagagaatatggactccttggttcattaaattcattcattctcgtggctactataatttttacactaattttttaaatgagagagcgctgagtgtctctcacagagatgcaggtgtcaactatggtaaaactgctggacctgattccaatctgttggatgaaaactctcttgatttcaaccttctggaaatgcagccattgaaaaacctgaagtggtatgatttctgtttcagagaagtacttcctgaaagggttgttaggaattttgatgaactcgggcctgttcttcacacagtgcagaaacagggaactgcagttattgtgagcctatatggagcatcggagatggtcacaaggaacctaatttgcaactttgagaagttaaatatttggaacttcattttcattggccacgagtcagatttcctgcttgaccttgctcgtagaggacatcctgtgatcatcggagaccatttcttgaggagtgtaacaacttttaaaatgccagattcccaagatttccattcagatatgatgacttccatattggtgaaagcctatgtgataatgaagaacatagaattaggatacaattccttgctcattgaggggaacatgcttctacttcaaggttatccttattttgatcaggataatacctacgacttctacagtgggaagatctcaggacttctgttcattagaagctcaacttctgctcgtaatatttgggttgacaaatttatctcagatgttgcaatgatgtcgaagtctatgctgaataaccaagagagcacaagttttgcaggtataatagaaaaattattggaacaaaagagtaaaaagattaagagagttgacgaaacaaacattggagttgatatttcttccaataatgataaagtggttactttagacattgagaaaaaatttgttcactggtctgtcaagatggatttagatttacttaagaaacggcttgaaaattttggtgcatggatggtgggtgatgacttttcgtgcaaggctgttgtgtgtcaccagtcatagcatctgctggcaattactaggaatatttatttgtgttccatagtttccttttcacttttacctgtacaactgccttatattttgcaggcataatctttttttgtctaagtttgagattgatgccataaattttgtttaggctgtaatagttcgatcgagatatagatataaagagttgtatgagaacagaacaacagatagtgaaactgaaatgccaccactatggagtccaacaaattcaagaaagataaattatttgtattttaaagtatatatatctgtggtaaacatatttgtaaaattcattgcttcgttttcaatgcaagtaagtcctggcactataagtatcccattttttattaatgaacttggccaaacaccactctagtggcgcctcatctgcagtttaccaatgacgatatgagggccctataactaagcatgtgaacaaaatgagcattgttattaggcactagtggtgtttagcaccttctcgacatgtcgcgttgcgattagctagcaatactcctaaaagctattataataaattatatgggatctgatacttagttggaccaatagcgatattgacacatagaaaggtgttaggcatcactagtgcccttttgcatttctcaaacaaaatatatacaaaaattcggtagtactccaagtctccaagtctaaacaacaatttacttgcaaagtaaaaataaaataccaaatactaaattaaaaaaaaaaggctaattaggatttttgctccccaaacttttacatgtattaaatcat

SEQ ID NO: 295872 - DNA, 7755 bp, Cannabis indica
gacaaaagtccttaaatttaacaatctcaatagttcgggggaatttttaatagcaaaaaaagttcaggagacacgatttactacatgtcaaaattcagggaataaattactaattagtctttatcaatttgatttactttataaaaatggaacttgatttattatttaacaaaacacaaaaaccaatcaaatattgacgttaagaaaccaataattcttattatatctccggactctcttgcttaaaaatgaaaaagctagaaatctaatactttagtaattaaaagtcaaagagattgtgaagaagtcaactaacgtcggcaagttcccgccaagacgcgccatatgtccacgtggcagtgtaggaccaggaggagaaggagaaggaccacaatcacaccgttatatcttcttctatcaaaattcgttggctttggatttcccttggctccaccttcacccaatccaacccaacacaacatttaattcgatgacataattgaatcaattaattcttgaatttaaaaaacactattctctactgattgaatgaaaccccaataattgtaactaaaatatcctaattttgactaacttatactattccaaattccaatcctaactttctcagtctgactcctctccaatcttcatctgccggaccggtacaatctttaccatgtctggcccgcttgatagattcgccctcccttgtgagttgcatctttcttttcttgatcgatgaagttttagggttctgtttttgtttttttttttaactattgatttgctttaaattcgactgtttttgttagacaattttattacgacttgtattgtaccataattatactccgggctgtgaatttttattcttcccaattatagattttttttttggttgtgataatagtgtagctgttattatctttgttcctctgttatttatttgttaatgtatgtatagattgcatatattctgagtgagaacaaatatttgtttggttaggctttgatgggtattctgggcatgatgaaagaaaggaaaggaaatcagattttgaaatctcggaagatgacaagaggacgagaattgggagccttaaaaagaaagcaattaatgcgtctagtaaatttagacattctcttaagagaaaaagaaggaaaagtgggagtgggagtgggagtgggatccggagaaattctctttccattgaggatgttcgtgatttcgaggagttgcaggctgtggacgcatttcgacaagcactcatcttggaggagttgctacctccaagatatgatgactatcatatgttgttgaggtaccttttttctttttctacagatacaattggaacaattgtgctgctgctttctttgttctcattctccagttgttttcattgcagattcttgaaagcaaggaagtttgatatcgataaagccaaacaaatgtggagcaacatgatccaatggaggaaagactttggaacggacacaattttggaggtaatgttaaccgattgtcttattttgtttaatgtttacaagtctaaatctggatacgctgatgttaaaattctgtttgaattacaaagaaaatgattgcgaattaagtgtttacttgtaactattatcttcaggattttgagtttaatgagcggaacgaagttatgaactactaccctcagggttatcatggtgtggacaaagaaggaagacctgtttacattgaaagattgggaaaagttgatgccaacaagcttatgttagtgactactatggatcgatatgtgagataccatgtccaggagtttgagaagtgtttttccattaagtttccagcatgctctgttgctgctaagagacacattgattcaagtacaacaatattagatgttcaaggcgtagtatgtctgctaactttgaattatttattcatgttctattacctgttcctttggcattagacagtatcctatgtttctcatcccaatttcaaattattctacctttttagggttttaaaaacttaaccaagtcagcacgagagctcatcacgcgcttgcagaaaattgataatgacaactaccctgaggtgacctggtcttcatatttaacattctcatctaatttcttgtgttggtaattttggcaatatttttcagtaatgtttagggtctaaatttaagggcatgccctctaatgtgatggtgcagacactttgccgaatgtttataattaatgctggtcctggttttaagctgctatggagtacagttaaatcatttcttgacccaaaaacaactaccaagattcatgtatgtatgtttcactttcagaaaaaaaaaagattcatgtatgtttcaatacattttgctttccttgtatagttttcaattgcagactcattgtcaatgtcaactgatggttcactggtattggatttccccaggttcttggcaataagtaccagagcaaattgcttgaaattattgatgcaaggtagcattttccttgaatatatactgttagttctatttaacatcggctaactgttgagttttctttttcttttgctatctctgcactctttctagtgagttgcctgattttcttggaggaagctgtaactgtgttgatcaggggggctgcatgaggtctgataagggaccatggaatgatcccagtatattaaaggttttttttcccgtgattttttaatcttttagctattgaaaatttgttatgtgacattgctcaaatgaaatgcttgttttcttgcaggtggtacttagtggtgaagcacagtgttttagacagatagtaacagtttccaacagcgaggggaggttggtttcttgtgataagtcccggatttcaatggtattatctgaaagaccaccttactgtcgataatttgctcatgtaatttttgttaactttgttaactttacatcaattctggccttttctttgtggattcagatacgaagtagtgatacatctgctgcagaatcaggatctgaagtggaagaaatggcttcacccaaattaaataaaagctatttacaaccaaagttgactcctgtctgtgaggaagtaagtgtactgatttagaatgacaatatgcagaccacttctgttggatatatcaataaacttatactcaatcgggtttatgtttgtctaggctagagtcactggtaaggcaagcaacactgggggaatctctgagtatgatgaatatgttcccatggttgataaggctgttattggctgggaaaagcgcaaatcccagcaaattccatctgtttctggcggtgagaatgtttaagtggactttgatttgaaattttcacattttttttccaattatgaactaatttttaacacatgaaattcaatgagaaataaaattgagaggctctggtggcattgtggaaagcaagacatattggcggttctactcctttattaatcatttataattttatctcaaaaacaattaaccaaacaaaactacttaattctgtttaacaaaaccacgaggactgtgaatgagctttgggctatctgaggttatagctcgacatcatagagaataacttatttcttagttatatttaatatgaatctgatgaccaatctgattttttggaatctattgcagggccaccaactgtttcaagtgtagaagaaactacaaagggattctttgctcattactgggctgtgcttctggccatctttgttactctcattactctcatccaatcagttacatgtcgtgttactaataaatttcactactcattttctgtttctggcaacaacgtctctgagatgactgctgaatcagctccagtggagttccagcccccttcaccggctccagggtttccaaaggcagaccttctttcatctgctttgataaagcttggggagctagaagaaaaggtgagtatgctacaagcgaagccatttgaaatgccttgtgagaaagaagagctgctcaatgctgctgtttatcgtgtggatgctttagaagcagagttaattgctacaaaaaaggttattcttccacatctcataaaggattatgcatttcacttaacttagtaatcttttttttcggtaaatacatgatgcatctgcaaaatttcgttgctgtgtcagctgttttgaacattcaagtgttgattacgtatttgctttttatggtgtgttaggctttacatgaagctctaatgaagcaagatgaactacttgaatatatagatggaagagaacaggcaaaacttcgggtaagctgaggataatgcggcattaatttgatttgtaatatatttgagaatgagcctaacaatgtcacatggttttccgcagagaaagagtaggtgctggtaaagagtactggtgtacagcattagaagaaatattttttggtaaatatacttgatggttttctgtacataatatgcttgtatatgtgagatgcctgtatagcgaattgaagaggtgttgtcctcctcttctcctaaataaaggctcctttccttctactttgctttcgcaatggattatgctaataatggcacaaaacttcgtttctgtaatttttctgaatcttcataaaggctatgtaatctttcgtttgggactcagaaatatataatatttatggatatgtattcaagataattctcgtacagggcaaccaaaaacatccctgtgtgtctttgaaaaaaaaatccatgtgtgggggtgtttgttggccaatagtacagtaccgcattattaaattaaggcttaagtgcgtgatgtaggggaatttgagtttctgtgcttcatgtggactcctaaataattctcctaattccaaaaaaaaatcccatttaataccactctatcaaaaatatgctatttgttcactctagttccaaaaatgctttcctcataatttttcccccactctctaacttttcattttctttctatctctcttgttcctatccctctccatcgatcacttctctctttctctcattgttccttctgttaaccttgtgccttcaacgaccccgtgccttcgtgacccatctcagttgaagatcgaaccatgaagacccatgcctctgcctttttgagtgaaaaccccatcttcaaacaaatgaacccagatctctgccattttttgtcatcttttaccagaaactcgatgctctcaatgagggcttgacaataactccagggagggtgggcggggggtgtttaatcagtgttatttttaccaaagacttgatgcccttgacgagggctcaaaaataattcgataagaatttaatgtgtcatttttgctttgaacttgatgcccgaatcgagaacttatcgactttaacctcaactaaacacattccagaaaaatgaaacctcatagagcctatatcgatcttatattgagttatcatggaatctatcgaacatctatcgaacataaagcaaaaaaatgtaaaaaaaaaaaaaaagaagtggggaggggggcaaatttcatagagatttataactaaactcaaaatttatccttaaccttcaatgtgttctctggaggttgcagttgtagttttgcagtggcaaaggtgggggcgagggccggggcgaatggttcgcttcaatatttatgagtctttgggttagattttgggggtcgagtttaggtttcaaggttcgagggatagggagtgggatggttgggtgtggactgtggcgtagtggctacgatggataataaaaatttatacatcatctaaaaatataatattttattttatttctctttcacattatttttgacactcttacttttaaaaacattcaaatgtatagaacttttaaaaaatgctataattatgatctcacacattattatttaatatatattgtaattattagctacaataattttttagtttcaattttttattaaaaaataatgaatagcatcaatgctacaacatagcatccatgcaaatttttagaatgacatcatcttctctccaatggtatagcatctcaatattttgccatataatatgtccacctcaccaagcatctcaaaaattttaccattggagatgctcttaatctgataggttgtgctatcatttggtgtggtggcgtttgaaagagaaagagagatatttgaataggtaagaaaattatgggagggctagtttttgtactagttaaacaataacaaacttttgatagagtggtatgataatgtgggatttttttgaaggctattaaggatttttactcttgaactattttagctaccaaacaggtctcttgaatttttttgtttgttaaaatttcttttaaattattcacaatgctaaaatattaagcttttattaagttttatctcatatgactaacaaaatattgatgtggttgctatgtcatcgtcatatgaacatcacatgtgcaatttaatatttaacaaatttattatcttattaactatcaataaataaagataaattttaatgttaaattttatttttaattgttgataagaaaagatacttggcccttatgttgcaatgacacatcaacacattaatactttgttaacaaaaattttatattttagtattgtgattagtttagaaaaaaagtttaacggacaaaaaaattcaaaaagcacaatttggtagtagtgttcgggaaataaaaatcttaaataatatatatattttttaattagagagcaacatgaagtatagaaattcaaattttccttttcatctatctctttttattataatttttaattataaaacaaaactaatccatttgaattcgaagaactcttgtacacataaccatagaaaacttgtgaaatcatttgcaaaatttaggggaaaatgtgagaataagggaaacaactgcccaagtatcccttagtctcagttttttttttttaagtggagaaccctaaaggaaaatgagttgaacaacagaggcaaacaaaagtaacatgattaaggtacatataaaaagctcaaacacaaatacgatatgtttaattggaatgtcacacgacacaatatgaaaacatgatataacgcaattgtccacatatatggaaaaaaattttaagttatggaaattaattagttttaacatttcaatacaattataatatgatatgattattaaatgtggcatactacgattaaggtaaacacagacataatacgattaaatgcgtcactcaaatccatttagtgtcgtttttaaattgtattatcattttgtaaaccatattgctagccttaagaaaagatatgaagatggagaaggataatatttgataaagtgttaaattttaaaattgtgaaaaggagctcattttaaattttttaatatttaaactaaattgattttaaagctctaacttcttacaaaagaaatgaaaagtaaattaaaaaatgtatggtctaaactggtaatgaaccaaaatatataattcacatggtacaatgcaaattgtattaattgtatctcatttaaaagagctgatggaagctcattttatcctatttagctaaaaagtttaaagaatcttatacagagccttttgtgagtgtgctataatattttataaaataaatgtactctaaaataaaaattttaaaaaaatagggataattgcggcaaaagtccccaaaaacttgaggttga

SEQ ID NO: 295873 - DNA, 3820 bp, Cannabis indica
aaaaaaaaaaaaaaaaaacataagtgcttctcatcctcatcttgaccacaacgtaatagacacgtgtaatcaatatatatttgtctcatacttgctaatataactcttggtacgaagttttcccttcattgataaccaaaaaatgaatctatgtttataggaatgttaaatcttccccaaatgacattacttcactgaactcgatcatcaataggaaaaagagttgcatacctttttttgatgctatattcttctgctgcaaaagagttcaaattaattttagttttgatgatatctttgactgctactacctttctccaatattagctacaatttaatttggtagggttattttctcgaactctctgttgttgtatttgaaatttagtatgagtttttaatatgttagtttagttttgataaataaaaatttatattagaagagtttgaatatctgaagtattaatctataatgaagtaagttttgtgaataaatatattacagttggataggtggaaaatgttgttactaaaactggtttagtattgtgtttatgctttaatttgccggatttaaaatttgggaatgatcaaatttaagttgttatactatcaaaatttcggttgcataacatcttcaattaattttttttttttttgataataacaatatttatggtattaactaggtattgataattcaataatttgtaaaagaaattaattttcttaaaaaaatattattattaattcataattacaaaaaataaattaaatttactctcaccttttttaaagataacctatctcataaaaataaattcatagttggtaaaattaacataattaaccctaacttttaaacagcatgtattctgatcatcaacatttagataatttcattgttcatagtgatgatgaagacactagtgatattgatggtcaagtaacctttaatgatgttgatgattatgatgagttttagactttaaaatattgtaatattttagcccaccattaattatatcaaatacatattttttttgttacttaattaattatgatggtaattacttattttattattaataaatatagcttgtacgtgtagaatgtctagtgcaggtgaaggcaacaataagaaaagggagttcgaggaccgtacagtgggaaaaatgtggaaacaacacttgtttagtagcccgcgggggcaatattgtcattccgatggcatttgagtggggcaccagtagatgactatgggaacaagtttcgctacatggtcaaactttttgttcgcaataacattcacatgaataagttcacttgagagtctattgacaaagcaaacactaagaatatttgggacagactagcaataacattcaatgtttattgtaatacttcaaacaaaattagtatacaaataaaaatacatatgactttaatgtttattttttttgcaaaccaaatttgagttcctgcaagacaattggaaatttgtggactacattttttactagatgtcaaaaggactatgcaactagagatcggagccgaaaaaggcgtggcacaagaatgttgctaaaaataggagaagtgaagacaaataggaaggcggtgtcaccggaggtgtgggtagatgtgatcacttactggaaagacccaaaataagatgtacaaatttattaactaatatatttattgcgtatttagttgaaaataaatttattttaaattacaggcaagagctgaatagaacacaaaaaattagaggaagatgaagattctaggtggagggagaaccaagatcattatggagcacatcgttggatagaaatattgttataaatattattgcctgaaatcaataagttttgaacaatatattactatttttttaatatgctaatcctgagacgggggaattttccagtgccatggagacctttgagaagtttcaccacaagaataacacttggtgtaatgaatacacgcaataattgcatgtaagtaatttatctttaaccatatcgttctatatttaatttctatttaattttaacaatttattaatatttttttgtaggcccaaatgatttgagagatgcgaaactcaactacacagagtgatcaccctcgctaggacgatgtagaactcacccaatctcctgcaaacctgcctgttatgacataggtgcttagtgagctgtcacaccacctgagaggcattggccatttgcctagacttaagacaagggccagaaaggcaactccgagggcaggtccctcctccagaaaacccactattaatatcaaggaatatgaggtgtgaagcgaaaggtggaagcgcaagatgcacaaaataattataagccacaaatgatgtagactcagaatcagtacctgactacattctaggaggaatttaggtatattttcgacttcattccttgcttcaacatgcctgtgatggccccgattccaccaatacatcttcctagcgttggatcttcatcacaagtcgtccctcccaaccaggataatgatgataacaaagattttattagtttgtagtgtgattattattttagtattttcagtgtaaactttagtattttctataaactatgacaatcactttttaattatttacttaaatttagtgtaattataatatgcgctcaggattattttattgtattattttgaattattatttataaaattttagttttaatttaaacttaaattatgtttatattttatttgattaaaccaatttaatattttcaaaaaaaatattttatcagtgcattatatagtgttgacaaaacattgaaaataattaaaacaaatacaaaataaaaaagctttgtcgttgcaattaaatgcgttgacaaaactttcccacgaatgaggaaatacacgagaaagttatgccagtgaataaatgtcgagggccctcatttcaccggtgacttaaatcacctgtgaaaaccacctttgccgacaaaataccacaactcgccgacaaaacacccttcccttacaaataattgccagaaactttgctggtggatttactcgacaataaaagtttgtcggcactattagtagacttttgcccgcacgaaagttcgccagcaaaaatcctttttcttgtagtggaacaatgagaccaagaatcaagaatggaatagacaaagattggttttgatactattttagctaaagagtgcgaaaaatagagaaagaaagagaaagagtaatctctgtgtattgattgaatgaataaagaaaatacaaagtatgagcattatataacttactatacaagcattacacaaaatggtaactaattaccagtaattaacaactttcctaacttccttaaccaactctttaacaccttaacaactaacttaactaaatctgataactatactaataatttttttttttaatattttgtagatggaagaggtacttaatcagcttcttaggcaatagctcttgtgttgtttgtatgattaatgggatcgagatattcgacttcaagccaaaggtttattttccaattctttctctttggtgttagctttgaataacaactttgtgtatcttaatgagcaaggtgtcactacaaaaaatacccttttagtcacaataaaacctgtgactaaaagtaaaatagttgtgactaaatataaagcatcattcttatgttgtgactaaaaggtctgtggctaaaggtatttttagtcacaaaaattacaatttgtttgatcaaatatatttttagtcacaatacttgttg

SEQ ID NO: 295874 - DNA, 2173 bp, Cannabis indica
ttcttaactcaacttatcaattgaaaaaggaagataaaaaattgggttattacattaggaagtaaaataaaagaaatagttgatgattataataattcttatttttattattgttatttctttaaattttaatcattgtcttgatttctttactttttctccaataatttttattcatcaaataaaactaaagaattaattgattgacaattgataatcaattattgtgggaacgatactttatttattattatattccttgttttcgattatgtatacttatttaccgaataagtttttggcatcgttgccatggattgaaaattatcagtatcagtttaattaattttatttctaatttgattatttttttttattttgctaatatttttattgtatggctttgtcttgcaatgtacataagaaaatatgttacatcaagattaccttgtgaattttttccaacaacacaatgaaccattatgttttgcttgggggagatttaaggagctcggaaagagatgttatcccaatttctcaagtggatattttacttagttcttttataatggacttgttgatgaaacaaaaagctgggcggattatggatcagatgtaactagagcctttattaaggagaagccatgatgataaaacaaatctgctgaatgacatgacatattttgattacgaatagcactaggattcatccctcagggttggagtcacggatacccttcttattgcccaaattcaccccaaccaattaaggaagaagagtataagccatcgcttgtagaagaaagtaaccacttggagaacatagtaagatctccatgtgataatctaatggtgcatgatttggtgtattataatgacaataactcaaataacgaatgttatgagagttgtttgaacaatgaagaagtgtcattagttgaaaacgtagaagagattgagcctaaaattgaacagaaagaattctttgaagtggctagaaatttgggtacattggatgcttcctcaaaaaatgatgatctcaatttagtgaatgtagaagcatctatcctcaatgatgaagctattgaaaactaactcacaatagatgttgtggatatggtcatgtggaaaatgaacaaccaattgagaggctatttgagaaaagtgagaaaggtgtcattgatggctgaagaattacttgtagttgctgatatatatatattcaatggaatcaaataattaggtagaggagcccatgctaatcagtatattattactgtggagggctggtccctattttttcgaacctttgctggactcatctacttaaactcatgttgcatctgctgatcaacttgtcgcatcttcaagatgtcaacttaagtctaagacttaactcgacagttggcaatagaatctattaattctgctacaactgactacaactcatctactctctttctcaccctatatattaagactctaaacccgatcaactttgagttaagacattaattgtacatcgagattgttagagagaagtttagagagagaacttgtagagatgaaagaaataaatctgtaatgggagcttgagtgaagaagatcatttatgatctgagtgtgtaagactatttatatagtgaattcaactcaaggcactgccttagccttggagtaggactagtcacattgactcgaatttgaaccaagtaaaactagttgtgttttaatctttcttgcatttattcattttgatcaccaagtgttgcattgtaatctgttttatagtttgtgtttttggattaatttgttattggtttagtgtgtattgcaggccgtgaattctaaacgagcattgttattaggtatcggtggtgtctagtatttttagatatgtcgctttgagattgattagtaatactctccaaaaattattatattaaactatatgagactcaatactaagttagactaatagcaatattaacacataacaaaaagtactaaataccactaatactttttaacatttctcattctaaccattactaaagactagatcaccattaattattaacactaagcaagtttactattgactactgactaagcaagtttttctttaattaaaactgttgattaaaatccacttataaccagtccttttaca

SEQ ID NO: 295875 - DNA, 5333 bp, Cannabis indica
atatactgtaaatagctcccagtttttttaatcctttttactgaaaatttacaactaattggttgatcccaggatacagctaacatttatttgtatgtgcaattttaatgatgaaacttagttttggtttgataggaattttgtggatcagtggatgatcagcttcaagggttgacggtgagttccattattggtttgactgttatatgtctattaattatactgctctctatccatgtgcactcgataagaatcatttttgtatcaagtaagcttaaaaatgttttgctatagtttttctttagatgctctgtcactttcataagtttttttcagttgctacttgcctctcacatgggaggtgtttgtgcatgaagctgttctacttctaatgtgctttaaaattgtgtggggcactattgaaatgtttaatgctttttatctgcctttttccaataggctaataattgttttctttgatgctttattagaatttgcatgaatctgcaaaaatggatgttgataagatcatgctcactgatgctccacttctgttccctcctggacaggtatattgtgttctccgaaattttctccttaagattctctttcttttctcattgtaataacaacgtagagctagaattatcgtttgtagaaatctgtaaacgttttcaggatctacataactttggtcagtttcacccgtccataattcccccttttttttcaactttttttatgactttgagtttgaagtacccaaaaaatcctaaatggtgcaactgattaacatacaatgtaatttagtctacataactttggtcattttcacccgtccataattctccctatttctttaactttttttttatgaactttgagtttgaagtacccaaaaaatcataaatggtgcaactgattaacatacaatataatttagtctataatgttggagggttcaggagatggctaaaagcaagttagattacagacatcaaaaaccgtcttaaattgatttgaaattaggaagttgtttgcattaactagagagcgccaaggctcagaaatagttattagagttatataagactcaatccttgatgaacttgacattgtaagaccatgaccaacgtcatgtgaatttctgagtttcctttgatgattaattgctttctttccatttgtcattgatttgtccacttttcacatggcgcagctggcattggctgctttgcgtagttcaaatggggtgcataaaattatagactttgagaggtttggaccctgccttacatttttctttgtaatctcttatggaaggttggtgccgaactaccttccatttatgaagttaaaaagcatatgaattgaaggatggagcagggaaataaattcaaatgttgtttgggctattattaaaaagattgtttttctttctaatttgcagatatctaacgagaattcttagccgtcagaacactgaacacactagttcagagctcattgaatctctaaatgcaatagactcttgggtattactactttggcagaaactttagatttctatgtttgctgcactgaagcatatctacactagagtatgctattgctagttacagaatagtttcaatctttcttgttggttgtgtgcatatataggtaaggaaatacaagtttccttcagaaaaggatctgaagcacatcaatcgtaaactgaagtcttgttggggtctcagctcgcacgatgagtactgtctacacataatgtttatgctacgtatttttcttttgccactaatcctactaatagaagcttctttcttcgcagtagcaagaaacgtgagaagaaatcaaagcataagttgaagaagaattcaaatgagcaaaccttaccttctcttaacgaatagtacgttgtgcttcttatgcattgggatagcattcataatttggtgtgtcaaagaaaaacattttggttatcttttgacatttttaatctgattacaggtaaactagcgcgtttgatcctcacctgtaagtggtttctctgacccctgaaaatattttcaagaaagaaaatattatatgaatgaaggaagtgagattctgtgcattttctcatttgttttctctcaccttaatgttttttctctctcttcacatatatgttctcttattcacattttatgccatatctaacttaacatgagaaatttagtggagttttgacaatcattcattcagttatagatttactataatatcttgtttgtgctatttttaatcactaattccatagtttcggcagttgaaccagtatggtctaattcgttatattactatcgaaacaatttgtcgtttggttcaaactatgttgttttggttgtggaattcaattcatttttaaccttttcaaactagtgctgctcaaagttaagatttgttaagaaaattaagatgttgtccatgtcttatatataatgatgacagtggtaccttctggataaaatgttttcagtataatccttgaaatttcaaaatacatacataaacatcctttaaaaaaaaaaattgactaaaacttatgatcattttgtgttgatttagactaaaatttgtaatcaaacaaatcaatattagtccatccaaaaaataataaaataatagccaggacaattttaaaaatgcctaagattaaaaaccaaatcttacaatatggaatttgaaaagcaacattttctttactcgaagtctttgttttcttaggaccttgtttgactttataacttaaagttgtttcagtttttaaaaacacaaataaccttgaaaaacttataggggacgtttggctaaatttgtaaaaacattttaaaaaataagaaaatagattagatcaggaaagaaatagatcatcttagagggcaaacaggggactcaatgcccaggttgacattttgtcaacctaggccatttccaacaatagttaagtagaagtcttcaaggcatattctccattttcaccaacaataaaaatttggtgcttttgggaaacaaacgaagtcatatgagagccaaaacttggacccaatgcccaggttggcctaagcgctaggcctagcgtccatgttgacattttttcaacatgggccatttctaattagttttttcgagaagtcttttgggcatattcagttttcaaacgggcatattatatgagatacgagtgtttctgggaatcaaacagaaccatttggtcgcccaggttgacattttttgtcaacttgggccatttctactcatttttccaaaagtgttctggacatctttttttgtttttaaaaaataatgaagatacaagtgatctcagagagcaaacaagatcttttggaggtcaaaacagggacacatccgcccaagttgacatgggcaatgggtcttgcgcccaggttgacatgcaacctggtttagatgttttcgctcctcaaacacaaattctgctctgagcattcttcttattttggtaaaatgccttagaagtatcaaaacgagccccagatagctacctgagaagcacccaacccctaagttgacgtatggcttgatgcgttgggttctgcttatcagattccaattccgtctcaagcatctgactattttttttattgtaaacgagagctacgacttgtgatcagtaaaatgttcactttgatattttaccattttaacaaggtggaatattagcaaaatcaggaagtttcgagcctactcgatttcaccaaaaagtgacatctccgaaaactggtgaacaacttcaccaaaactaagaaattggcaaagtgatgtcaacatatcacataggcataaaaaaatacaagtgtaaaatgttttttcacttacttaacatccaggttgtcaacctgggcgctgggtgctgaacaacctttagtgaaacaaccacaactccttaaatatttatctgattgaagcgattcgttttaaatctctttcaaagctctttcaagttatgtctcacatccacataacaattttgaagattttgagtctaaaatctatgtccaagaaaagtgcattgttttttttttttcagattacttgaaaacgatccaacgggtaagattcaagttctaaaaattggcgattttcatcaagagtcaattttagccattacattatcatcaatggcaaagatcagcccaaagtgattttttcatatttgtaatattttattattattttaataggacatcattccctataaaatgagagatccctagttcatttttcacaatcttctaagtcctcataatgttagagcatctctacctactttctttctctagaaattagagttcttgtcttagtcaattttctcgtgagaaataaaaactcaaaatagacatagttctattaacgtcgcgatatgaggagtgaactactatgaatttcttgtgactctctatttatttactaatacttatttcttctctcgccaatctagcgagtgagtgtcggctagatttttacgtcaacaatatgatcttaatttgcttttgcttgtacttccttacaagatcataccttctctctatgaatatagaatttttaaatatgtattattttatttttataattaatttatttatttatcttataattctatatcatattttctttaatatgttatccactaagtactttttttagagaatagatactaatagattttcccatggtgcattctgatccctttgtcacagcttctaattggcctgttgttggtgtggagatgagtcttcaagttgatgcttctattgttgataactttactggtcttggtttggttcagcgaagtgttgaggattcgaaggcggtcgttgggatgcactgctgctttgttggtagtgttttggaagtagaattcttggccattaaacacgctcttttgctagcttgtgaagaggggatacactctgtatttgtggaattgaattcgtccttagcagtttaggctcttgtttctagagagctttcctttgtttggggctcttacctaatttttaaagaatatcttactgtgattcataagtttgtttttgtgttctttaaatttattccttgcgtgtataactttgttactgatcgcatgttgggttttgtgccccaaataaaacccatttcaatataatcatatttactaattaataaagatcagaaatcattttatgttgcatggttcacatgatttatttcattattatatttaatgtataaattctattaagtccagaatatatgtatttgttcatgat

SEQ ID NO: 295876 - DNA, 3808 bp, Cannabis indica
tttcttcttcctccattgataaattctcaaatgcttttgccaaagcataaagacaagatttatttactgcatccgttcctttattttttattcgcattttttcccaagccttttgtccatctcattattcgcaatgaccttcaattgatttgtgagcactgcattgaacagagcatgcatggcctttgaattaaaattggccctattcatctcatttagagtccacaagctcataggttttggtttggtgacaccattatccatcaccattgggcatgtccaaccatcttcaatggccatccaaactctttcattcacttccctcaagaatgcccccattttggtttttcagtataggtaattggcaccttccagcattgggggtcgagatgtggaccttccttctctgaacatctcgattcatgcacgaataaggaaaaacaaaacaaagattaaaagtagtattctcccagagacgtgtttggagagagggttagttccaactgggtgttacaaaaaggaaacaaaatgcagaaaaattaagaattgcaaaaacaataaattttagtacaacacagcttgtaagaaccctaaggattaatatttctaaatataaaatgtccgctctgataccaattgtataccccaagttttcaataacctatctttttctattaaggttgattttatcttaatttaaacatgaaagttaagatctaaaatataacaatcaacacacaaaacaagcttcatctgtactggaaactgatcactcgagccgactagtgcttgagctccccgaaccagggtaataactttcactatatcaaaaaatatttgtacagtaaccaatctaaattacaatagaaaaacaaaccaatctttaaagtagtgaacttttaccctaaataaccaaatcccttggttatgaatgcaagattcctatgcttcttgtttgttgaaatctcttcaacgaagctctagatttgaacaccatcaaatctgcaatgccaagtcttagctgaaatcccttcaactctcactacttgacttcaggacttgctctgaaacttcaacccacaacaatagagtttcttgctagtacttacaatgaaacacatagacgaaacatgaaagaaaaaaacgaagccctaatctccgatcataaaggttagtcaaaatagtaacaataaaaggtatttatacccagctaaataaataaactcgaagtagacagctgggcaattaaatacccaaaatatcttactaatgtggactatcactaacagtataaactccagacgtaacaccacgaactccaaatgcaactggacctaatttgtcactacaaaaattattggttcttacaatatataaatctatttgtattgggcgggttgaaatattttcaatccacctaatatattgattgggaggtttgatttttcgtttaggttattcaggttgcatttttcgtcagtatatttggtttgatttgggtgatttcttcgaattagacaattttaaaaaattaactaacaataaaatattttaggatttcaccttgagttacatgaaaacatgtcacttggtacagtgaaaataaaatcataaattacttacaaagtaaataattgattctgaacttaaacacaattaattatttaatcgacgattcctactgtataaataagcattatgagagttaaaattcttgatcacaatttttaattctctcttacttttcaaaaaatcactaatgaaaaccactaaatattcttgtatgagtttcaaggcttttgtattgcgtacaccattgtagaaaaagcttcaaacaacttaaaaaaaaaatgcttggaataaaaattttagacaacgataactcaattgtggtaagtcttggtgttctaaactaaaaaaaatactatgattgttgagttttttcttttttgataatgaaatggctgtaagtttgttgtgaatatactataccacacttttttgggttgatcattttgctgatgtggatgccacgaatgaatgatggcatccacgtaggcttctcactttaatttttcctttcctccattcattttgatgtagagtttgtatggttgtgaagcttagccaaatttcctactttcccactttctatgattcttgttattttatctcgagttttaaattcaaagtagtagaacattgtatgtgtgatttataaagaagtggatattgtattactattacctaattattataagaatatgtataaaagggatatacgagaatggatccatcactaacaaataaattaatttaaaagttttcatggtataatttaattcaataaaggtaggataaagtaatcaatgctaattgattatccacctctaatacaaaatcttttagaatgtgatggaaacaattagggtttgagagaaataactcatatattttttatatatagttattaaaattattagaatttaaatatttacttataaatatttaaatatttatatcacaatatataaataaaattaatatatagtttagttttataatttttaataattttaattatagaattataatattcagaagtgttatatttaagtttctattattattcttactattaaattatatgattttttattgtgtcgtgctgtacttttcaaatttgtcgagtgtcataccttttagactagtttatttttttcgtattctattgtggttaaacacatattatcatatcctattgtactaatttgtatttgtcaaaaaaaaaaattgtactaatttgtaatatcatattgtgtcgaactcaagtctatattttctcatgtctaattatgcttatgtctcttaaactcgtatcgacttcatcccatgtcaaaaagttcgggctaaatgattcagttggcaaagtggctcaaaaagctcagaaaacagtaacacggccactagggagcttggagtggtgcacatatgaaacactatttgctgaagcttattagctttaggttgttgaacttggtcctagttgggcctaatatgaatcataaagtttgaagcccaatgtgaaataaaaatgaggacctggggtcttgaaagatgatagagatagggaatggttgccaattattgaagagagaaaaagttgggcttgagccaattttattggatttgtcaccttctttcaattttactaatttgtgcaccaaattaaaaaataaacacaaaattggattaagttaaataatatttacactgaaactcataaaaacaaaaaagttaattccataatatgcgactagaccttgtcttggtcgcatcctcccacaagtttgaatcatgcgaggctagctctacgagagctctataattgacacgtcatcattttccatcgaaaattgggtccatgtgtcaatttcttacgagactataactcctattttaaggagaaaattgcactataataaggcctaattcgagaaaaatgacaacttccagtaactaaagattttggatcgaaaaactctaacaaaccatattgagaaccctaataatactagtttttaatattcactaattttttatgttaagtcgtcattaaataaaaatggagcccgtcattaacaaaagctttaaaaaatttggttcccaaaatatttttctgaaaaaaagagataaataccattttggaccttgtgttttgcaaaagttaccaattagactctctattttgttaaatgacaatatggaccctgtattttttgaaattgtacaaataggaccctaaact

SEQ ID NO: 295877 - DNA, 4779 bp, Cannabis indica
taaataatgtgatgattatgtcaggacccaatttgaatgggttgtttggaaggcagtctggaacaactgctggatattcttactcagctgctaacaagaacatggctgtgacttgggaggaaaagactttgtatgattacttgctaaatcccaagaaggtaatgacttgttctttcttcttccaaccaacctcatactttgtttgtttattctattctcgaatgattatcaatattgatccctggactacccttgttctccagtacattcctggaactaagatggtgtttcctggactgaagaaaccacaggatcgtgctgaccttattgcatatttgaaggaatctactgcttgatattttcatccattgcctattccattttgtagttcaacaattattcacacatagcggttcggaagcaattttttttcctttgatttactaataaaactcgagacttttaagggctgtaatgcttctttctcgtggattttttttttctttttcctatggattctctaggaagaggaagaagttgctgtaatcggcacattaaacattcattttgcttacaactttatgaatattgtggaacaccattttacttatgggtggattgatcttttcatcttgatgtcaatgctgttacaggtttgtatcctgtttatttttatctacacaagattctgaatagcaacaatgcaattaccgggctgaaaattgtgttttttttttcttttgataactgaaatctttcattgaaagaaacccagaggaaggaataaacaaaacaaacaagggtagttcatggtagcagcaaagggtgtcgacgatggtaacttcgagttctctaaagaaataactcatattttatagagacggaaaaatagtgtagcttgtcgaaaatatttattggttgattttgaagtattgatgatgatttatggttaaaatgactctagaagataattgtcaatttttggagtttgaattgtgtctattggatcgtcttctcaatgcgcgctattttttttcatagtgcggtttgatattttgaatttaattcaatccgtataatataatgaatacaaataaataacacacaataacacaaaacataaaataaactaaccggttatatttatcatttagttaaaaatttgagattaaaaaacatacacaaaaatcagttaaatcaaaaattagttccttaaattaaataaatcaaaaatcagttcatgaaataactaaattaataatagagttctcgaattaattaaataaaaaactagtttctaaaataataattcaataatcgttttcttaaataactaaaccaaaaatcaattgagaaacaacacaaataaaatataccacgatctttgcaacctactagcaaacacatggtttgggccaatctttaaatatgttagcaggaaaaaaaaataatattaagaaaatattaaatactggttaaaattaataataataaaaaaagttatatacaaataagaaggaatcaattcaaaaaatactgagatataaattaaaatagaaccgtttttaacaaaatgagtaaaaaaacaaacacacaataattctaattaaaaataagagggaatcagttctaaaaatactgagacataaattaaacagattcgattccacaacaaaatgagtaaaatcgtacagcacacaataactcaaaaatcaattataattaaaaaaaatatatattataaatcataccatatcataaaaactaatacatttcttaaaaaatcctttcaaaataagacttttgtctttagttcaattttcaaatatgttggctagaaaatataaaacataaaaactttcacttttttaatgtgttgaatctttggccaatcttcttactccaaccaacatatcttcaatctctaaaacatcattgtaataatgatatagaagtcacattatatgaaatgtcttcttaaattaaaactaatcatatgacataaaaccaaaactcacattctaagttctaacataattttcaaagaagtgaaaaacaagaaaggagaaacatatcaattatgacaaatgctaaaaaatactattagtatttactacattatttcgtatcaatacttttaaaatatattactaattaattataaaacactacctataaataacataaaaccctctataccccataacaatactctatcaattagtcttcttatcaacattggtgatgagttgacccatttgaaatctccaaaacatgaaataagccaaacccaacccaagtaacacaaatatccaaacactatcttctctattctccttctctgacatcacttcctctattccgaaactacccctaccccaatttcccataaaagcctccaacacatgtccatataccacatataccctcccatcattcccaacagtcaaagaagtgggaaacctatcttcatcaagggtagtttcgtcatataccactccttcaccccaactgtcttggcttttcaacatccaaacctttttaggcgagttcaccaaaacgacaccgtcttttcgaatagtcattccatcagccaaaggcatatcttcatttaaaattaccaaattacccttaccgctatcctcattgactttgaacattttccccgtattgctctgaaccaccaaaaggtaacctttgcttgagtaaacgatgccgtttaagccgcagaaactgaacggagattctcgatcgacgggataagatttgaagatcggcgattttgagaaaattgaagcttctcctcggtcgttaactttccatatatagttaccgattgagtttgttacgtaagcgttgcctttgaaatcaaccgcgacggcgttcgcagtcgggcgttttagatcaccttcgtcgttgggaagaagagagaggaaaactcggcggcgcgtgcgaaggtcgtaggcggctagagcgtcgaattgaggaagcggttcgacggcgtggatggcggctagaaggcgattgttgacggtgtcgatggtgaggccaagtatggtgacgttttccggtaaatcgggatcgtgaattagggtttcgacaacgccggcgtcggagacggaaactagggctcggtcacgtgcggagccgaggatgaagtgttgggcggatgggtcccacgtgattccttctgggtagagatttggggatcggaaattgattatgtggggctttcgggcttggatttgggttgggccttggcccaataacattaggaggaaaatgagggcggagaatgacattgatcgagtcatgatggtattaatcattggtttgattgagttgctttggttcgactttggattatatagacttgttttcttgttaaggaattcactataagttttcttgtcaaacatttattagaaaatttgaataaaataaggtttagttctctttctcctaattgtaataggattaggaagacaatgtaactttcaaatttaaaaagatattatctttattaaaaatttaattggtaacaagaggataacaaataaataataaatcagataagtaaccaaaaaaaccaaatccacaaaccccatttctaccccttataaaaatgttcatgataatttaattagtattgctttgtttaaatgagtctcgaaattcaatgtctatccttactaaaaagtgtagtcttccctactaaccatattatttcaatgaataaataattttttttttctccttcgttaacataagcaatgtggaaaaccacttaaagcatcaaaatttaaaacttgaagagcatcaaatcaaactaaactctttatagaaacttgaaagcataagagatgttagcttatggttagagaaataggagtgagtagtgagtgagtgaggcttttgcgtgtgtaagagagtaaactcaccaattaccatacatcttcggttttctgctaaagctaccaaatgaaagcttaggaaaacaagtaatgtaagcaactaacaggttttatcccacatcgactaaggagttagaaaagcagatgctaccagctgtaaaagacaagcttgtcgaatactgaaacatatttttcacagtcttctctaaaattaagtgaagtatttgttcttttttaaatatgagttgtcactttctgtaaatatggtactaatataaatatttttaatttatttttttaaaagaacatatatatatatttattttaattttttcaaagcaattaataaaaataaaaataaaaataaatatattatttttaatcatacaattttattaataacaataaattaaaataatagcatgcaatttaattaaaacatttataatcaatcttcttattttcaaattgtttaataaaaaaaaaaaactaaaaataaaattagatgaaaaagattgcaccatcatagttaatcttataagaaacgtatatttagtttcatctactgctatgcagcaatagagactgttcattcaatctcgtagcttaagcattatgcacgactaagttgaaccaatgccttatgtaaaatagagaaaaacaaagctataaattttaatcgagaaactctaattattttaaggggacttctatttgcaccccataaaattataaatacaccctattattaaaaaaacataaatttaaataatttttaaaaattactcttaatatttttttaaaattttttcctcacattattttatgttaattttaatacatattttgatttcattttcataat

SEQ ID NO: 295878 - DNA, 3114 bp, Cannabis indica
atatacaaatatatgactttacatctaaaagaagataactaaattttggatccattgtgtttgatttaatatagtctttttatttggtgtatgcagaatggtagatattgccttggagattcgaactataaaagtataacagatgactactttgatcctgagcaattcctctcaacatcagacttatcaactgagcacaaagttcttgaccttaagaacaggattgaggcatctgtaatcatctggaagagaaagatgcaccataaagatcatggaaagtctagttggagttcaggtgtgagccttgaaaaaagagaaatatttgaagagagagcagaaaccatcttactcatactcaagcaaaggtttcctggaatctcacaatctacacttgacataagcaaaatccaatacaataaggtaagaacaatatctgccgcaactgatgtatctgccataccacaggaccatgaaaactcattttcttctttaacttgtacacaggatgttggatacgctatcctcgagagctattcgagggtaatagaaagtttagcttcaacagtgatgtccaggattgaagatgttctctatgctgattctgttgctcaaaatccatcatcagcaaattctaatggcaggctttcgatgtcttcttcaccgatttcactaactcaaatgtcccaaacctctgaggatgaggcagagaagttaagctcatcagatacaccaacttcaatgacactatcagatttcatgggctggagtttatctcaaggagaagctgatggtggtaagaagaatgattcaaagggaaataaggacaccttattgaaacaagcaaacgatcataagctagtgaacaaacctgctaatatcaacacaaagaagctgtcttacttagagaagcttgaaaactttagtttgagaagtccaacggctcgccattaaactacagttgaaaatgaaatggaacaaagaagataatgaaacagagaaagagaggaacatatagacgatagaaaattatagagagatagcttggaagcttgtcttttgtaaatatcgagattcctgtaggatagcttccttcctaccaataaggggaaccttggctctttgaagtgtttactttgacacttgaaagagatgtattttgaattgtgtacgagaagacatacatacatacatacattatgttcctcaagtcagatacttaaagtctgttcttgattaatctttgtactcttttataagttttttgcttagaatcgcactcacttgatttcgaaattttcttactcatttctcttccaattaagaaaaacaagtaaaaaacggctgattcagttggcaatccaattcccataatgtggatctgaattacagcaaatgtttctttccaaatcataatttacaaaacacacttcctaccatcttaaaggttatttacacacaaaccacaaatgcataatcattctcaaccgctagaaaaccacaaccagaaactacctatacaagtagatttgattccttaaaattttcatgcagttcttttggcccggcgaatgagtgaccagatgtcacttccatgtagagatcttttgataatgcgcgaattcttccttgtctcctgcaacacaggtaagcatgaagaaagtgaaatgggatacaaagagaaagaataatgaattaaaagctgaaaacatgaaaacttgccaatgatcttagaggtttaaaaagtactaaaaatacacagtaacgctttgaatatgcctacctggaaatgaaaagcaggatttggaactttagaaagaatggagaagccatcacgaacaggaaacactgtaaaccatgaatgaaaatggagtacgtgttataccaagaattgcctaaaattaaaagttagcttttaagtaacatatagttgaggagaaaataagttacataaagctgagttggttttcccgttagagagagatggttttcgagaatgtgtaaatgcgaaaatgggagtgtttttctctctttcaaccattcttttttcagtgacatttgtggagactgaatttctgcacacaatttattattatgttattagtctaacatatgtataataaacactttttcaaagccatgtaaagatgaaaaatattaccttaaatcttcatctgatttcacagcttcttcatttgctataaaagaaaagcatatcataagcataatttattaattatgaacaagccaataaagtataagtataaatatttgtatggaagaaaatattacgtgaagataagtaacgcaattgatgtcttggtataatttctcgcaattgaagagtggagagagcgaggctgtgaacaaattgttgagaaagtagaaatctctgcttgagagagttgattcgaatctcagcttctgagaattcattaggttttggaaatgaggccatttatatttatattttcagagacacatccaaaatgatcaactaacgtaaccacagccctgcatacgtattcctttgtgttctccaaaactctgttcaaaaccaccacttttaaaaccacaaaaaaaaaaaaatcatcttaaaactgtattttacaaaaattacccattaaattttctatttaaatttataattttttaaaatgatacaacatagtactctaactctatttattatcaaaataatagttatgtgactttacatttttatcatctattctgaataataaactattcttgcttaaaaactgaattcagtttggttatgttaaaaaaaattgataaaattgaactcaaggtactattttatactaatttaaaaactacaaattcaatttgttagaaagtctgtaatttttgcaaaacataaaatctaaaataatatttacctaaaaaaaactactcacctctaaaacgacaatatcctttaaaatggaaaagaaacccagacacgacaatacatttattaaagaattgcaagttgcactgttttaaacgacaatgccctaaaaagttcatgaacgcacgacatcttaaaaaccaccgtgaaagcaaaactacagtaaagtttaataataaaaacgacgactgatttagaatacc

SEQ ID NO: 295879 - DNA, 8814 bp, Cannabis indica
aaaaccaacctaactatttaactatttaatttattcatcatacattaattatatgaattagtaaaataactttagacaaagaaaatatacagtgcaacgacaacgtttagggttcatcatgagctagctaagctaacgctggtcacgtgcaagtccactattgtaggaatatttaattctaggcaccacggtacagcgaagaatccttccttttttcgtttttttttttttctgaaaaatccaaattttagtctacagcattttctagtttctttctgtcataccaaatttaatttaagtaggaaaacctaaaaccctagaatttttttcgaatctttaatttcaatcgttttgagtaatcaatatcattgttgggcaattaagtttagctgactcgaatcctacctccctctctccgctacttgagaaaaattagataccgattttgaatatctgatttcgttgattgattattgtaactttccaagtatgaaagaaggaaaatccctaaaattgaacggccaattgaatcaccagaacggtcacttgtctccgttcaaattcgccaaattgttcgatccagaagcttcatgggacaaggtaatcttattttcttgtattcttcgccgtttcttacacttaagattacttttttatttttttgttaccggttaagtgcgctgaaaagaattttatgggtaaataggatatgattactgtggcattggatagctactgattaatcaattgatcatatatatatttaatttgctataacagttaacagtgagcacaaactttggacccaattcattagttcacctgttaattacgtttatccattgattcaatacaatttcgtgcaggatcaactgggtgatgtcttgcattggatccgacaagtcgtggccctagtttgtgggttgctatggggagccatacctttggttggtggtatatggtttatgatgtaagttttcgctttagcactgtctatttctgttgtgcaaattacgttatacgtatagatctctgccttcttcctttgatattttgaaggcctaggtttaagcttatacctgttccgtgcattatgctagatattttgattccagaggaaaggcccagattaaaacttattgttaagcctctttcgcactgagaattctacctgttaatgcagctattttatgttagaatacctaatgggaaaacatctactggatttatttagaggtttctgaaattgcattgccttgtttatcgtgctcaactatgtacggatatgtttgtcatatggatttacttacataggctatgattgatcagaaggattttggtgttttatagggagtgacatattgggtttttttcgttcctttagatataaagctatgtcaactagtggagaccttctctggttactgtttttccacctttgttgttcccatattaatgaaattctaggagggtgattactatatttgtaaaaaaaaagaagtttttcaagagaagaatttctccttttttatattctttctgaacattgtgattaagcttttgatgttattagttgagaatttaaacttcgttcattttgggatgtggacgtaaagctttgactacctatgtttagtgagtcattggaaaaggaatgctctgagttgacctgcggtttggtaaaaatgtttgtggtggactggaggttacagctccctttcttcttaatgctgtactcatttaggctaagacaggcattgaaatgtttaaacttctttataggcagaactggtgaatatattatttcggaaagaaaacaaaagaactggtgaatatattatttcggaaagaaaacaaaagaactggtgattatataaatagatctaaagaaggtttgatgtccatttcgaaaagagaacgtttgatgtcttgctaagaaacatgacttttggatattacttgtctttaaattctttttattttttgtgtagtatatccgttggtttttttgatagaatgtttacaattgctattgttattcttttttacttaatcttcattaaactcaatccactgtctctctttgttatttctggatttggctgaccatatgtatatattatatatatatataccatatatatatacatattaaaatcagtaattttgttaacctatgggatctgattgccacttacacagttttctagcgctgtcatctggaataatatacggttattatgcaatgatactaaaggttgatgaagaagatttcggtggtcatggagctctccttcaagaagggttgtttgcttccgtaactctctttctggtacttatctttatctttatttattatcgtaattattgttattattatttatcatttccctttaaaatatgttttttatacatcaaagtagggcaaaacaagaaaaatgtggaacttattcaattattattttcagcttgcatgggttctggtctacagcttgggccacttctgatagggctatctattcatcatcatctatatccgttgaggcaaaaattacaacttagaaggctggaagtgctattccgtagcttaacaaacaatgagaaagttaattaattagagtctttattagttgttctttgctttatgagtgtgcatcatgtggaaaactcgcagagcaggagtgtgctgtcctctggtttgtggtaaataggtgatccaacaattttcttcataaactttggtgcatcgtagcaaaatcatagcctctctacaattgagtatcaaaattttgattctgtaaccttaaataagagtgcctatgaggacatgcccttacaatcttcttttgttattgtgagttttcttttattcaaattttttaagaaacagtcattcagcaggaaaaagttgattctgaactcagattgtcatgtgaaatttacaatatagtctgttgtctttgttttaaacagtcaatcgtgatgaccatagcttataggtcaattaggttatgttctaaattcaaatctttctttcttctttacatttcataatggatctcataatgataaatttaggcgttggttgccaaaaattacatacagattgctgttatcttttaggttaataaaatgaaaatataaaacagttaaacggtctacggatgggaaaatgaaaaaaaaagggaaagaatgaggagccactgtacataaagctcaaatattacagccatcttcgtcgatttcttcgagaaactagatagatgcgaccataaacccatttcctacccaatctacaatcggatttctgcacaaaaataacaagagcacaattatgcattagaaaaacatgtcacactgatgtgataatgacttaagactaaaaaccaccaaatatatattttttattaagaggcagttgcgtctcagccagattttaaccccaatctctacacagtacacacaacacaccacccaacaagttggctgatatgaaatgaacttggcagcccagtgaacattagagattgtcaaaccacatgaaaaggattcaaaaaacataaattggattaacttgaattttctattgttcgaaaaaggattaattacctcaaccttggtgcgaaactctaataggctttcacatacatgacaatctgctctatgtggggtgtcattagatttatctgatttcacaaatgcaaaaacctgcaggacggtggcactgaaatcagtgaaaatgaagaaagaagcagacagaggaaagatttaaggagagcctattagactagttaatatcttatgattgagcaattggctaacctcctctccacaatttgggcatgcccccttcaatgctaccaagtcatttctccacaggccttgaagaacttttactgtaaacatatgcacataagttaactgggatttgaaaaatgattcatattcctcaagcagatgtctaacttaccagaagctgaggcaactggatagccaataagagaaccgaataccaggaataaaacaccatttactgtggcaagaaactctaatgcaggcacatggttaatgtgaggcattcctgaattatatgcaccttgataagcaagtccaatgttgtagattatgggcacaacgcaagctgaactgccaatagcaagaaagagtacccatatgctggctaatgtgaaaacctgtgataaatctacctgccctacatccatgtcactcaatattcaagtccagaaaataaaaagaaagaaaagaaaataaaaacaccattacttccaacactcaagtgtcctattcgatgacataaatccaaaaacaatgccgtgaagtcataagctttactatatgaaagacaatttgttacgtgccaaactatacaatcatatttttaacttccagaaacaatacagatgacagtgtttacatccaaagatacgaaagatattagaaggaatttgggttggtagttagtgcaactgcaaaactaattacaacatcagataaaaggattctaaaatgaagtaatcacctcagcatctgcatacgttgattgtcgtctaagactacaccgagggtatttcacaacgcttttagaaccataccaccgaagcttcaactattcgaaaattaaataaaataaaaataaaaatcacgtaagaaacaaataccaaaaagacgaaacaaacaaatgagtgtgttaaggcaaacctctactctatcaaacatgtcgtccactatcaaaggctttccgctgtaataagaatcccttgcctgtaaacacccaatactcagaaaaaagttaaattgcttccaagaccccataattcagaaaaacgaaaggaaacccaataaggattttatgcatacttgacgataaagggcttccaaagtttctttactggcggtctcgataggaccaacgaagatacaagaagggccttggacaaggtcatcacgagtggcggtggggaagttatgaccgttagcggatatccgaaccgaaaacggggctccaggtctggagctccgggaaagctccagaaatgaagatgaagaggaggaggaggaagaaccgatcgcgtgaggtgcaaaggaagaagggcttgtgccacaggccatacagcgtggtggagatggaggcattgaaaagcagagccagaagatgataagcggttcagattaaataaaaaagaaaagtgttctttcatttattttttactcttttggcaaaatatcaaacaggagattttgaaccacgcaattttggcaaaatccagggccttaattgaaatgtgggttggaattttgtcgaattgtcgtaattgccctcgaagctctcgttgtttttttggctgcggaagtataatttctggcacccctgagatactattccatttcctaggctgcttcgcttggctctgctttttgaagccattcattggaaaaaacattaaagataaaaaaatgcgtctgccgggagtcgaacccgggtctattgcttggaaggcaattatcctaaccgttggactacagacgcttgatgttgtatttgatattattgtactcattattaaattcttcaatttattacgtattgtattgaatcataatgggattgtttcatttgcatgaacttactagttactgtgccctattcttaagcgtgtgaccacaaattattattagctttattaacttcattttagaagctaactattcacaaataccatgatttagctcactaaaaaataaatagcccattgccaaacacttgattttgattgattactagtagtgtgggtataatttctaatggaatgttcaaaattgtaaattactacaaataaaatcaacaactaaaggaataattaaacattgactatagtgtttttgaggggagactactagtttagctagcttcttacaacaacaactacaaaaatattccctaataagttttcttataaagtctataccaattaaaatttgactatgtcttttcaaagtaacgatcccattcatgatcttcaactgtcccaaaaaagttgtatttccatgacacttcttctgcataatccaaactagaatccttaccctcctccatttctctttttattctactcactctttccacaactcctttgactgagatatcaaaagcatcatcaagatttttcaatttcgaaccagcatataccacttttggtatcaatcttacaacttcttctctcatttctgcaactttctgtttcggtatttgaagcagagtcttctcaatgctcaccttcctctttttgacatcaatatcaggtataaacacagaatagtttgtaaaacttttaggcaaatgccacaaatattgaatgtaagccgaacccggatgaaaaaagacaggaatacaccctgccaagattgaatcgaaagccgatcttcgagtactcgaatccccaggaggctgcaagcaaaaaacagagctttgaaacattttcataacgaattctggcttttgacacttgtttgatccatcacggcattctaacagcttgcatttcttcctagaagccctgcattgctcaatgacctcaccgcgaatggagtctctaatattaggcctttggccaccggcaaaggagaacaagaaaggccttctttgccttctcattctgttctgccattgaaacacttcaacttctttcaaagggtgaaagtaagtcggatagggtatggcaaagtcattgttatgccaaggacttgattcgattgtcaaaaccgtcatgttttttgactcgggtaagaagagaaacttgtttccccaatcgaattcctcatcacttagcctcctgaaatcccatgttatccttcccgcgacgaggaaatgatccctgcccgacatttttcgccactcgggcttctgtcttagccatttgacaagcccgagtgagtctgaatctctcatggatatgttgtaaccccaaagataccgcgcaacatcaagaccagcatagtaaggcacgaagaaagccgaagccaacgacgtgtcgtttgtcaagcattcgtattgcttcatcctattatggaatatgacctctaatgagaactggttcgtcgtatgccaacctctgttcgaatacactttcccgggatttgaaagaggaggaccaaaaccagagtttgatgtgaactcacacatattagtccaattactaagcgaagcacagtttttcaacaaatcttggttgaactttcttggtagattatgaatgtagacatatcggcctgcacatgaatctgaatcttcattggattctcgctctcgcgttgtgtcgtttatgggtttggtatctaactctatgttttctttgctatgaaccttactagccgatggcgcgagacgattatcaggctccaaaatatgatcaataccttttaacccattattgacaatgtgaaaatcactactgggtttgtccccattttctgttctgataagaatattgttaatatcctctgtttgtgtaccgaacaaggtatcgttttcataaaatggtataggctcaatcatattttcaaatttgaatgtgatggaacccttagtggttgttgaattataattacaaaagcaaagcaataaataccagaaaagaaaagaggccaagacgacgaaccagaatcggcatttgacaatgatggacatcgtaattttatctccaaaaaccttcatggatgataactcttttctgggtcgtagagtttctggtcaatctccaaccagggaagagatttgttgctttcagattatagagatttaagaaattgaaaaaggcatcgcttgagaggtaaacgaagagctgctttgaaatttgggtggttgtttaaggcagcgttcaagttttttcctctttttttcttcttaattattattattataaaaaaggaatgtaactttattttgttttattttatttttagtacaattgatacatttttgaacattctaaatatacattgccgtgtataggtgtaggcatatttgataggagaattaattggttgtgtcattggtaatggagatatttggaggccttatagttacgtgcaccaattagaatcttcgtctacgaaaataaatatccctttgtcttattgttattagacggctgaaacaggatttggaccttttaattattttagtggaaaaggtaaagatgaaagtacatgcataggaatttattggctaaaataggaagtaaatcactttcaacttttgtttgtttttatggaatttcagactgttgttcgacttatccgatgagtctatctttttggcttcttccaatcataaaatgcagctagccggctcgatctcaagaaaatatttaaaagcaatcaaatatagtagaactagggttgttttcggttgcaaatgcggtttttctaatttcttaaagtgcaatcgcactgtaagattttaaaattgtaaaaaccctaccgcaaaaatacagtgcggtgcagtgcagtttgagtggttcacactatgattattatcgagcattataataaaaatttaaaaatcaatgtataaaattttaacaataaaaaaaaaaaaaaaaaaaaaaaatacttattaaagttttaacatcataacatatatactaatcatcaagtcataatatggaattgtctctaaaaaaataatgcagtgtatacatatatttattcttatataaaaaataaaataaaaattgtaaaaattggtaattttataatatatattatggtgcggtttgaatcacaattattaaa

SEQ ID NO: 295880 - DNA, 2993 bp, Cannabis indica
ttatttttgaaaaaatttcgatcagtgggcagaacttgccaggctgtaagttggtggtgacaggttgtaaaatgtgctatatataatttggtacacttccaaaatagccctaattagtaatgatatatttacatttaatgggactgatgtctttttcactaattttctcactagggagtttcctcattgtaacttaagcagtaagaataatggactgtttaattgtggccgttggatctaatattagtagtaagaatggagggtcatgatatatctaataaaatagtagtaatgtatagggggtgggttaaagcagttttgccaaaattaggaaaaaattcactatacatggttttttggccacgtaggcatgaataattaagaggatatgatgggtgtagtatagttaaatatttataggggtcaataatagataaaatcatagaaagaaatgttaggcaacttaggttgtagtctatagtctaatactatagtatacagtaatactatactatgtactatatatactaccaactaccaagtctaccatatcaaatggttttgccaattattatataacaatggtggtggtagtagtcccctccttatgttgaaattttagcttaacaaataagtttacattattaaactgcaccattttgagaagtattgggatgtgaaaggtgaatgcatatccaaataaaaaaggaaaaagtattatgtgtttttggattgaccttgctttttaagttttgtcttaagaagtaataatgcatgtttacccaaattgtgaatagtgtgcacaagtaaaattcactaaaatagagatttgtccttatttatttcacatatgatttgtgactactatctccaattctcataataacaattattaagttatatacaatgaaaaggaaataagttcacaactaacatttaaaaaaataattaaataattaaacactattaattcttaacgtagaaaagggtacccgtatcaaccgaaaaaatagaaataagcgtaacaataaatatcagttaagaaatatcatatatttatttggtttgagattagactacacatgcttttaaagaaaaaaaattgaatatagagagatagaagctagaatattaataaaatataaaaatatcaaatatccaattccaatagccagtagtagtggtgaaattgagaaaaaagtaaagagagtggcaatgagtgtaataaagtgagaaatatgaggggtatttttgagaatataaattaaaaaacgtggcaaagcggaggaggaggaagaataggcgtggcgcttcgctgcaaggcacgtggagagagaagaagaagagtcatctcatttctcagctcataaaactcaacaatcccgacaagtgctgacgtaagctgatctggctctgctgccctgaacccctcaccataacacactccatttttctcggcaaaccatttttattatttttattttttgtctctgtattttcatttcacttgcttccaaatgtaaatatatattattacaacacaaaataacaaaatctccactcaatgtttctggctttttcttcttttttttttaacaatgtttttcttatatgacttatgtaatgaatgatcattgtatttagacataattttctgattcgatcgtcagtccaaagtttaaacaattataatttttattatttttaagagatttcttaaaaaaggtgactaatttatataaatatgaagtacgatgtgtactacttattaatatctttctttattttgaaacttcgtagatccttttgtaaagaaaatgtattttattgatatataatttaattagtgttttcattattttaactaaatgtattaaaaattaattagataaaatttcttccaacataatttaatccatggtcgtatgattttacgtgttataaaagtatattaatgtgtaactttcattacaaactttggctgccgttttgttctgtaaaaaaaaaattaataaatgcatgttgttttacagtacagaataatgtacgttacattacgaattattattaattttattttaattaatatccctctatatatgtttccttcttacaaacatattgtttgccaaagaagaaaaaaatgattaaaaaaatattcaaaggtcggtcaattctattagaccagatgggattgcagttgaaatttgcattgtttagtgtttaattagctaatcaattatttgcaaattgttgaaaaaaaaataccaataataatcaacattgtcttcgtatttgtgacacaactcagataccaaataaacaagactttctttaattccttaatttgtgtgtttttatatataatacaaatgcttttcgaatattattagtacttactgtttttcttttctaaaatataaaaacatagtaaagaatagatgttaagttaaaaaattcccattttaccagtttctcttcattatcatttaaaatttaaaatattgtactcaaattttatttacttttttttctttatttattttacctattacattatacatttggtttggtacgttgtattaagtcgtattttattatattgtattaaattatatatcatattttcatataatattatgttaagctttaatttatactaaaatattatatgtttatgtgctcatacaaatcaatactacatatagttttatataaaaatattacataaaacataattaatactatatatacaatacaatacggtgtaatatgacgtaccaacattacaaaaaactgctacttttagtaacaactttttagtcacaacatattttttttgtgactaaatgtgacttttagtcacaacaaaatattacttgtcactaaaacatagtattttttggaaacaaagattgcaactttcattaaagcaaatcagctaataaaatagcttccaaaccagcagggacagaccccctactggaaatacg

SEQ ID NO: 295881 - DNA, 1797 bp, Cannabis indica
gctgcttcattcgacccctctgctgcaagaacaacatctgccacagattcagctgtaattccctttgttaattgctttgattcacttactttagctacctctttctgcttttcaaccttcctacactccgccataaaaatatgttcaaacctgccacaatgtttgcattttaccggtagccactcatattcaatttcatgctctaacaattgcccatattcattaacaaaccaaaaggaacgctccggcttatctgtaatgtccatttcaacaaggacacgagcaaattgaacacgagtttggtccttcgtatacttgtcaaccattattggaatccccacagtacttataagagcgctcaagatttttttgccccaatattgaagtccaagtttaggtagcctaatccaaagaggcaccgatttcaccattctaatcacattccaatccgtcgaccacggtctaacaatgaccggtttcctatctaattggatcataccattctcgagcacctcatctcgtgttgcttcatcactaaatttcaccatagttagaccctttgtcattctagcaacttgaacaatccttaagtgcccccaaattcttcggatgaatccttccaagactaatgctggaacattggcacctaacaccatacaaataatagaggatttccagctttcctcttctattttcacttcctccaagtctatatgagcaatcttcctacgttctctaaccactagttcagtaaatgaaagtttagcatcagagtttagcaccttacctcctgagaattgctgccaatgatgttgcgaagccaactgcagatttttgacctcctctgcccagcttctccttaccgatttgagggattcaacttcttccctaacgtttcccgtgctcgcatcttggtgagagtgaaccacaaattgatccagttgttcgctcgatccagctaggctttccctctcctggtgtaaatacttctccgaccccccaacgtcgagcgccaccttcgttcccggcgtacgaccaggttttttcctcttcgccatggacagagagaaaacgaggtcagaggcgttttatttcgtattttattttgttagttttaattttatatttattttctaattaatttttggtatttttaagtgtatttattagcaaaagtttagagctaaattgaagaaaatgtgaagaagtggagccaaatttcaaatttcaaaagtaataatcaaaattcggctcaggcaaagcccactcgcatggatcagcaagctcctcatcacagccgtccgcgcatcatcttgtggcccaggcgcacgagtgagtcttaccgacagacaggagcgcgtgaggatctgttccgcctgtccttcctgccaacttccagccgcgtggaccccacatgtcccccatgccagcatcctcaagcgtgccacatggcaccccctgcttcagtcgccactgtcagaagctccacacactcgccacttgtcagctcctcattccaagccgcctttttgaagccatttgttgcttccaagtgtccccaacacatagaaaatgagattaaaataccaatttcgaaaatacactaccatttgcatttatttggctcatttttccatctcacactattttctcacccaataaattgcacatttctaatttacctttttacccttctcatatcctaccaacctcatttatgcaagaaatttctagaaaatgttaaaataattaattaattaattattttaattatttaattcactcactttggctata

SEQ ID NO: 295882 - DNA, 8833 bp, Cannabis indica
tgtgtatgtgttaaagattgatgtgtcttttttagtttgtaagccaacctaagtaaagttttactgctctattttcagaaaaactttttatgctatatttgacttctaatcatggggcaaacatgacaatgaagtttcatactttgctgcttgttttggactggaaaatattcttttataaattacatttaaaataaaaatcctttgttttctctttgtatcattggattatttgggttcataatgagaaatcaagttcttataatacaatttggtctattgtaaatttttctaattaattttagttctccatctaaaattttgagaaaggtcatttgtgagtgaggatgtttgcctatcacttttaatataatggaataaaaaaagacattttatatgttttttttcttcttcttatttttttcaatttttggagaggtttaaatttatgtgtttggaactaaaacagtctcctttcatgtcttctttctcttccacttgcgaaatagaaaaagaaagtgccataaaaaaaacataaaaataaaaaaaaagtgggtagaagtaacataatgtgaaataggttttcccaccaaaacttgtggttggatttagagttcctgaatgaggaaatatctgtttggatccacatttccagaacaaaaagtttaatttctttccatatatattatatttgaaatagaattctttaatgaaagaaactaatacaaaggaaataacatgtcttgctcagtagcttgacaagcacaagagaaagaaaaccccaatatctgcataccactagttagtgtataattgtaatgttttagtgtatcctatgaatctaatctaatttgtataataactaaaaaaaaaaaactcacagatacataaacatatttttgtcttggtgaaatttataatttacatacttatgacattaataattgttttgtttaaagaaaagtgccaaaatcgataatcagtggattccatctcagttaagaaccgcatacaaataaaggaacaataataacatatttaatgactaataataattgaggaacaatacagagaaagaaatataaacaaattattacaaatctcaattatttctttaaggcaaaaattaaactcaggaggttgttttggtcattttcattttttttaaaacttgcgagcaagacaaaatagaataaaaaagaatatagattttttttttttggttatttacatttttttattataattttttttaactaatctctaactctaattttatatattataatacttcgtaaatgtatctatctgtatttattacagctacaatattacttatgtaaatttttaaaaaattctatataatttacaataacaaaaataaaattgctaaataatattttaacgtgtattgaaaaaacttcatatttatattgggattggaccttggcacgataaattatttgaaaattttcaaaataatattgtaactataactaatggtgggatgaaattctttctaatatatgatttaatgattaatatatatattatgatgttaaaattttaattagatttttttttgtattattaaaactttaattgattgatttttaaaatttcattataatatttgataataatgatagtgtaaatcgctcaaaccacatcgcactataccgtatttttacagttttaaaatctcatagtgcgattgtagtttgaggaattacaaaaaccgtatatgcgatttgatttgaagaaaagctataacttgcactaaccacactgcgagtctacgaacactcccaattctaatatgatcagcattgctattagacaccagtagtgtttaatatttctagacatgtcgcgttgcgattagttagcgatatactccctaaaaattattatatttaactatatgagacccgatacttagttggattctaatatatattttgggacacaaaaattaatattttttgttttgaggtaaaatttagatttgagaagtgagagagggagagtggccgaattttggttgaaaaagaagaagagcgcgagttttccctcccttttcaaaacccctttcgtttcttccctctcttatttttccattcattcattcattcaatcacaaaattctcagtttcaaaatcctaaccttattcatggatcttcaacctcctaaccctaaccctaaccctatccctttcttttcctaccgatcccagccctcctctcctcaatcggaccaagccatgcctcatcaagatttcaacaacctaggtcttctttcgattctcaattggcagcaattgacgatctttctttggcttccgattcccctctccaaaccctactttcttctcctccacctcatcagccccaaccgatttctgttgtggatagcaagggttcgtgtttgaatggcggcgataacttatcttatgctaggtttgaagataaagaagatcacggagatggaaattccccggcttcgccttcttattgtgttgatccgaaccggcattggtcctcatttgacgacaattcattttatcttcataagccgaaaccctccatggtggtaagagcttttcttttttctctttattagttttttcattttgtactgaaaataaaattcttattcaattgtgttcatcttcttgttttgtgcagggtgcaggactggtcaatttgggtaacacgtgctttgttaatgcagttctgcaatgctttacgcatactgtgccactgataaaggggcttcgttcttgtaaacatgaattgctctgtagaagtaagatttgaattcaatgaattttatatttcttcgatttcttttatcaatttacatatcttatttggatactggattttatcaggtgggtatagagagttctgtgttgcttgttctatgtacgatcacattcaactttctatagattcttcgggaggctgtatatctccgtggaagtttgttgataatttgaactgtatcctttgttttaagtataagaactaatgacacactgttttttgccatttttttttctcataaatattgtctttgcattcgaaaagcaaagtatatctgctttcttggatttgaaaagaaaagtatatttgctttcttggatttgaaaagaaaagtatatttgctttcttggatatgcatgatcaaagaaattggagttcatatcttggtgaccttgacttataatcaattagacttctctgcttctttcatgagatataaccaggaagatgcccatgagtttttgcagtgcttcttagataaacttgagatgtgctttttgactcccaaaacaggggaaataagtttgaatcctcccgttgataaccttgtgcagaaggtttttggtggccgtcttataagtagagtatgttgcctccttcagttttttttttgattaagaatatattgtgaatttattcttttaatatataaatgtcaatttactcactgtttttcttatgatgactggttttcagcttcagtgctgcaactgtggtcactgttcaaacaattttgaacctctgattgatttgagtctggagatcgaaaatgtggatagccttcctagtgctctggagtcctttactagtgaagaaaagattggagattcagatagtaagttcacttgtgaacattgcaaggaagaggttgcagtggtgaaacagcttttgttagatcaggtcccatcagttgctgtgttccatttgaaaagatttaagaatgatgggtcttatgttgagaagattgataaacatgtgaatttccctttggagttggacttgcagtcctacaccactggtgcaagtagtgatgatgtgagtattcttactttatattggattatttgtgatgctagttatgatttgttagtgatttaacataattggtacatcacagcatcaattatactttacaaccacatttttttatcaaataatcttatcatttaattgttcatagataatgtacatcactaatttgctttgacaccgatgctattcatatgagacagtattgatgtttttcttatcacttttttgcaataggatgagttgatgtatgatctttatggaatcgttgtccatgttgggttatcatctatgtttggccattacttcagctttgttcggtctgctcctgacacttggcacaggttggatgactcaaaggtaatatttgcaggctatacaatcattttgtttacattacctttattatcatcatggagtagtttagcatttttgcagcaaaacaaataccgggatgatttgtaaaccatttatttacctgctcaatatatacatattttgaattacatgagctttcaattaactgattttgacatgctatgttgtctgatattttgatcatttacaatggcattggttattctacctgttttgctttcttagtttaactggttaaaatgtgattaggacttttgatatatttcttacgataatataatgtacatgcatgtaggttactagggtcgaagaagaatttgttctatctcaggatgcatacattcttttctacgcaaggcgtggtaccccctggttttcaagtttaatagatgcagaaatgaattgcttggacccggccattttatctacatcacctcagtcggttctagatgctgctgagaataattgtccacttccaaattcagcgtatatctatgatgcttcggttgcacttgatgctgttagtctcctcccaaatctatcttttgttgatgaaacttgcgttgctaagcctattggaaaaaatgattctcagggtgttgaatccagtgaagtaaaagttaatgaacctattagagaaaatgattgtgagggagctgggatcagtgaagttaaagctagtgatgtgaattgtaatgctacaactattagagaaaatggttgccaaggagttgaatctggtgaggtaaaaactagtggacatgaaattttccatcctcttacaccgccaagatcaccaagtccagaattgtttgctcttaagactccaggtaacaaaatacataaattgtgattttattcgcttgtgatgtgaattgtttttgaaggaaactaacttaatgaggtttgtggtgcgtttagtatctttaggatcaggttttcaaattccccgtggccatctgaaatctgaggagcgaactactttacgtaaaagattgtcaaacaaggtgcctgatgattcaaagactaaggaggcaataagattcatttcgaagagcatgcctagctcgagggccggcaaacttatggaagccatgtataggcctcaaagtgctgcaggtgcttcaaggaagaagaaacgattggattcaccgtgtaaaagggctggctcttctaatgttcgacataaatcaagccatggatcggtagtccatccggtggctgcagttctacgttgactgtttctgaggattttcttagagatgggttatatttttggccttaaatgttgtttaccaaagtgtgttttgttcatatagtaaggcttcgaatctttaaaatagaaactaagacggtttgtgttgtcttttattcaattgcaacgacgtacgtggttggtggtgtaacctagtttgtagaatccgacaaccattttatagaccaataatatttcacaagtgtaaagtactttgattgtggtatagtactgtactatctttgttttaaaatcattttttcttggatacaccaactaaaattggacgcttcaatgctggaaacttacagaagaaggttgtggtgtttatatatatattttaaaatttagaaaaaatctttagcacatctcctaaaagagtgtttcacccaattttccatttattttgaagggttttttggtttattttcttttgcataaatgttataagacacgcgtgcaatataatagtgtgactttatttttggactattcaagttttttttgaaattttagtaacaaaaaaaaaaaattagaagactttcttagatgatgaaacagaaaaatggacatttgtaggtaggcgatatatgtttgtatatgcaattaaaaatcatacggaaagatatgaacaatgtatgctgtaatgatgctttttatatcctattgttggtggtacaatgcttcattttaatacagtattctagctaaggaatttgcaatacaattttgatctttgccaggcaattttgaaaacagaattatgtactaatatccaacaatactttattgagatactatgtaaaattgattctcaattgcaaaaatcaaaaggtgcggtgatcccttagcaattctctctaattaaataagatctagagataagtgttgaatcttttgaaagatatttgaattatagatattcataggtgggaatcctcataattgtcgaaaaacaatgcttcgtttgtgtaaatgtacttattagtacaagaaagtagccttgaattgatcgtttgaaattcttaaatttgcatttatctatttagacaaggctactacgaatgtataagaggcaagttaagtccatctagcaaattcccttttggcaaaatatttgatttttgtacaaatagtaggttggttaattaaaatgatggttttttctagattgggaggcaataagcagcagaggcagagtcacaaacatttgagaaaaccttttataataaggaacataagtacttctgatcttaggtttcatgatatggttgatccaaacggatcaaacccaagtaaaaatattgtgattgtgatggatggcttggctgaatttacaactgaggttcttcaatgggttcttcacaacatagtgatcaattgttctggatgtgtcatcactcttcttggagttatgccttggcttaatattccatgtaattagcatattatattaattatttattatttattatgataaccccatttataacctcacaaatgttttcatgtttgtttaatttgttagtgtctacaaagacatggttggatatttggtctgtggatttagaagaacttgccaaagagagaagtgaaaatatcaagaacgatttcaagtatctaaagttgaaggctgttctcgatctttgccgtagttatggggttagtatccgatattaaattatactaatagtaacacctagtgttttagcatttctcgtaataatatatatgcaggtggtgctgcaaaagaaagtcgtgatgggatatccatcgcgacatctggtcatcgagcaaatcataagccttgatgccacatgggtcgtatttgataggtataaaagttataataattgtgtgagattcgatacttaattatattatataacgaaataatgttataatttatttggttacacatataattatgatacaggcatcaaaagaagacagagttttatggggaaaaagttggatgcaagatgattgtgatgaacgaaaggggtgaggcagacatgattattgataacaaattagtagaaagtgctaccaattttacaagggctgctggagaattgtctactaatactgagctccacatttcaaaccaacaatgtgatgatgacaatgaaataattttacatgtttaatatatcaggactttttccaatgatctatatattattgtcttatttcatctattactcatgatctatttctccttttcttaataagttaatattgtctgttttcggcctcataattttatttttgggcacttttttaaaatgcctcgtactaatagagatattgtttatccttatatatattttacatttttagccaacatgaaaatttagttgcacactcaataactattgtaatttgtaatggcatcatcatgatgatatatcaaatattgcgtttttttttctaataatatttgctgccagctgttaggtaatggttgttttttttaactatgtgaaaatgtggttgtatttttaatcatgtaaaaattacaatgataatttttgactgaggcatatgcacatattcaaatgcaagattaatttttgtatcttgttcatacatctaagaagatttataaatagagctctatctatttcatttgcttatcccatcacaaccatcacaagctattccaagagtgaagatgaggctcttgagagaaagatagagaaaaaaatctcttagtgagaaaatctaagagagaaaaaaaagttcctacaaaattgtgagaaatattttgtagagagatagtgagattatcatattagtgagtgtgagtgttttgagtgtatttatcaagtatttgtcaaaacttgaaagtgtaatattgtgtactcattattatcgagtttggaatgatcaaaaaccccatagccacgacttcctctaaaaaaacgacagattgttttcttagtacagtggcaaaaggcagaaaatggtcatagctcgagttttaaaaatctttttaaccccaaatcttttctaacactttaaaaatgacaaaacaaaaatgctcaaacagaaaaataaaaaaatattgaaaattgacaatttacagtaagcttttcgaaaagggtaatttacgggcaaactccctatacttttaagtttgttgcgatttaaccctcatactgaaaaaattagggctaaactctccaaacttgacaatcgtttagatcagcactccttctgttaatttttggttgttaagtgctaaatagacctactactgtgtacacaagtatacacgtagcgaaattttattaggccacctaatattaataatttaaaatatttaaaaatttaaaa

SEQ ID NO: 295883 - DNA, 2405 bp, Cannabis indica
aaaaaaaaataatacaaaaatacaatttaagggaattttaaatatttttccaatttataagttttttttcttccaaaaaatatgaatattttttcatgttgttttttatttgtatatatatatatattttatgttgttttataggttaccataaaattaaaacaaaataaaaaatgtaaaaaattatttatttattgtaaaaatatgaaaaaaaattatttgacagttaaattttgccaatattttgtataaatttttcttttaatacttaaactcttcttagttatcttcgtttgattggactattagttagaattatattggattggagggattattttagtattggtgtaagactaaatggagtataatttttttaataaatgtatataaaaaatttaacttttttgttaataataaagccaaatatttttaagaaattttataaaattttacaaattatattttaagttttctgaatgagtggacctaaaaaagactacaagagtagtatgagaagcttctgtctcgtatgagtaaagaagtattaataaagattgttgttcaatcttgtgtgagtaaaccactaaggctagcttagtggtgagacagggataggaaaaaaaggagagatcatgggttcgaacccaaaacttttaagctattaagctattaaaatgattgtaataccatcacgttacacccaaaaagctgttgttcaatctctcccaagttatgttatgagcatttttttgttccctttagaagtgagtcgagaccttgagaagactatgtctaggttttggtggcgttcttcttccactcaacagaaagaaattcattagatgagtggggatcgtatgacttatcatgaaaatcaaggagatatgggctttcataatctacgagagtttaatctttccttgcttgggaagcaggagtgttgaatactcattagtgggtcgttttttttttaaagctaggtatttctccaatggttcgtttcttgctgtagagcttcgtgataatcctaattttgtttggaggagtatttggaagattgaatttcttgttacatctaggccttgtcttcagattggtgatgggtcgcatgcctctattttggaggctccttggttgccatgaggtggagtcgtatgttgtttctcgtcatctagggctggctggtaaggtggtgcggagcttatttcaagttaatgttaagcgatgggatgaggatgtgattcatgatttgtttgatgagcgagataggcagtttattttgagtatttctttaagtgatgaggtcatgaatgattgttttcattggagtaagagaggcttaaggtttctatatgctgaagagtgtgtataagttgctacaatgtttaaaggggcgaagtgatgatccaaattctggattttggcgcaatttgtggcaactaaaaattcctcccaaggtgaaggattttatatagcgtgcttgtacttgtgtcttccgacaatgtattgacttagtttaaagcatgtcccagtacaaaggcattgtcctttttgtcgtttgcttctcaatgtttggcttgtgatactattggtattggtttgaatgatgttggggattactattctagttggttccaacagttgggtgctagggtgggtaaggagaagcaaagcgaggtagcggagatttgttggggtatttggcgagctcaaaataattttgtttggaataagaaaactctagtgtgaataatgtagttacgtttgcaaaattgtatcttgaacaatggaagaatactcatacaaatgatgattacaccattgtcgagtggtgtggcacaagatagtgctaaagtttgggtaaagccttatgagattcagatcaaggtaaatgttgatgttgcattattcgctgttgctcatcagtttggatatggattgatagctcgcaatcatttgggccctcttatttaatctcatactgtttgttgttgtgactaatgtgaggtttagggttgtttagtggtagtagaggctattcacactctctttttggtttagttgttaatgattgtatacatttgattaattatatgagcgaggtctctttattgtttatgtatcgttttgctaatagagtgattcatagttttactagagcaatctattaatttccaaattgaattttcaatgagtactctagtagacgatttgtcttgttaataaaattttatttccatttaaaaaaattaatgattttaaagtttaaaattcatattataaaataaaataaaaatatgaattttaacccaaattctaagaccttgttaaggcttgggattggacaaaatagtcctaagccttgtttggtacttttttatatttatatttagatgggattg

SEQ ID NO: 295884 - DNA, 4239 bp, Cannabis indica
aaaaaggagaggaatccaaacctggatatgccatgacccttgtcaatcacatagctctctcttgattctcctgccagctcctttttcctcttctcaccttcaaaaggcgtgaataaaaaactcttcatatacatgatatgtatatcgtagagattagaaacatcgatatggatgccaattcacactaacagttaaaaaaagcataattcgtataagcatatgccaaggcttccatggtttatgccatatatattcagaccgaagttttagtgtatataaggctttgtcataagctgcattcattaaaacatgaagaggttggagaatgaggacagagcttgatcttctataagtaaatcagttatagggcttctctttcttggcacgtatttgaggctttgacttagcatttaatgatacttgccaaaggagagctgccctacgactgtttgagcttaattcacatcaattgtcttggaaaaaacttgttaccttcctttgtgttttcagtaagtcatattttaccaaatttcaatcctcattttcggtagaatagtgatgacaaccataattattttattgcgttctcgcatatgatatggtgccttctccactgagagttgaaaccttttctgtcatccctccctaataacataagcgagtaaaattctaaaacgaaagaaaaaaggaatagaaaaaaaaaaaattaatagtactcccttatttagcaattttttgtttttctattgaggattattatttagcaattgatcaatgtgcaataaggaagcattttcattcaatactgtaaacaacagggtgcagtgaattttagacaagagggtttgacaagttggaacaagcaaatcatgactttttaagttatgataattgcaaaggtataatatctaaatttagctgaaaggtgcaaacaactttctatgttaaataattttaataaacttgtctagggtccaatatatatgtttaaaaattccattcaaactggtcgcgtaccaacaccttaacatagtgaaccgaattcccaaaccttcccaaagggaatgaaaaatatgttccactaaatgatcacaacaacagcaaatatgggagacacacacacctataccccgcttagagaggatcccgtaaacaaacaaccatttgtggtagactttccaccaaaaacttttcaccacaagagggataagaaaatccccgaacaacctcctcccctgcgcaacatgagacgaagatcactaaaataagagagaattggtaaacactgagtttctcaaataccaaacaacttgttcacttatcactccaaaaacaatatattatcaattatattcctgctttgctagggtttggaaatttttttttctttttcaccactacaattttggtctttagaggtaattttttggggcttacagtattaattttacaataattagttacagacgctgttctaggtgacgacgtatgaggaaaaatatttgacatagggaccttataacatcagttgttatgaaataatttttgtaacataatagctataattgaacattcccaaataattttatcataattctagcgaaatttcagtcacataacaactataattaaatattttcaaaaaaatttaaagctattaataataataataacaaataattcaaaacaatataaaagaagagatgatgacttaaataatttctaatcattatagtatacgcaatcgaaacaagtaagataatgataaatagactatcatttacatgaggattgattattaattataaattaattaattcttttttttttttttgaaaatgaaaaagttcattcaacaccaaggaaaaaacggggcaacagggggttcaccctcccctttaaaatgtttagcgtcctagctagatctcctagcactcttggctaaatcgtcaacaaaagataatgtaaattaatctataagtagaaaaagacattaagaaatctaaaatcagaagggatagacccctgattcttcagtccggagggctcgaagagttatttaaggcattaactactgcctgagcattagaaaagatggtgatatcctgccaacctttgtcttttgcccagagaatagccagcaaaattgcctgaatttcagcttccataggagaaattgcatccttcttgcacattttcgcttcccattttgcttcagttctgctgatggaaaggacagctaacccagccacattctgagttcaagaggcatctgtgatcatgtaagtctcagcgaagaccaaatttgatggcagaggatcttggatattcctctattcaagacctgtcatatcctgaaatatagaggagaacttattgaacttgttatggacacagacaagtatctcattactatccatcatttttcttttcgtccgattcaggcttctcgcataccaaatctcgttgaagatacaggcaaccacttttaaagcttcaactctgctgctttcagaatccttaaacaaaattctccaaacagttgatcatatcagtacctgggatctgtgttgaaagacagggtaacaggcacgagaatcatatggcccacaccagagggcactccttaaaaatatgaacaccagattcctcttctgcatcagagaggaaacaatccttgtctatcaagaagtgcagtttgttttttgtagggatgcattcgctgatcacacgccaaagcataatcgcctaacgaggatgaatactcgggttccaaatccatctctagattttacgattgtcattgaatcgatgctcctggtccagatagtaggaaaattttacagagaacctcacattgccattgcagttccagacgatacaatcttaagaagaaggtggaagtctgggaatttccaatattcttcttcccaattcttctccaaaaacattagtgaccaaattctcatctcactcgttacccaaagagatatctgcaactttgtttaaaccaggaaaatgaagagaagtaatggacataaggtctttgaactcaccaatctgtatccatggcatccatggttggttccacaggttcactgaactaccaaaagagattaaccagcaggatctcttcgccacaatatattctgagtttccataattcttttccaaagtacagagtcaccatttttctgttgaactgtcttgaaattcaggttcctacagtacttgtgaagcaaacaattcacccaggggttctcttcttgctgagacagactatacgcaagttttgataataacgcacggttcatgtcttcaaatcttctgaaccccagacctcctaattgtttttgttgacaaataatatcccaagatttgagagttaggaacctttccttgtccacattaattacccagccacaaaaattttctagccagagcaactagagatcggtagacagagaaggggattttatttgttgacattgcataaactggcatggctgctactactgaattcccagagttgttctaccagcaaaggataagagcttcattttctacccctccagtttttgtttcatcctttctcttaaattctcataggcttcttttttccttcttttgaaaataaaagggttaccaagatatttctcctccccagacgactgctgaacatggagaagcttcagaataaagtttctcctttgatgattcaagttgttggagaagatcacactcgatttagtcgtgctgcatttttggccatatcgtctctcgtaagtagaaagaatctctaaaatgatagatgcttccttttcattagcccttaagaataaaataatatcatccgcggacatgagatgggatatgggaggggctgccctcacaatctggatcccatggatatcgccattactttcaacctttacgattaattttgacagcacttcttgacaaaggaggaaaagaaaggggggataatggatccccttgcctaaaccctcttcccggataatttttttttcttaggactgccattaagtagaatcgagtatgaaactgaagtgacacaagcctagagtagtttacaactactgtaacaccctaaataattaggcaagctacccaagttacttacgaaaccctaatcccctaaatgggattataactaatcaaaaaggcacagaatttaaacttttttcataaataaaatgaaaataaaactagtaataa

SEQ ID NO: 295885 - DNA, 2919 bp, Cannabis indica
gcatccaatttgcataaattgtacaacaggacagcccaaagacaattcaaaatgttacaagatttcaaatcaagttagttagacaatatagcactcagtgagaagcataataaaatggaaaagaaaatgatgattaataagaaatgaaagtaaacctgacaaagagcatgtgactacttatgtatgtactagctattacagggtaaacaaaactattcacattgtatagacataaatacaaagaggagatccgagctagagaagcacaaacctcatcaacatttgatcccttgggatgcgcacatgatcaaatctcaataccccattatccatactattgtatgctccactaccaaatttcattccaatatcaccaacagttatgcctggaagaggcaaatgatcttccaaacttctaagttggacaatgaaacctacaaaatggaagcattaaacaattaatatcaagtaaagcattcctcctgcaataagattcaactaattaactcagttcttaccatgcactccatggtcctgaccatcagtaataagacgtgcataaacaacagcatgtgtagatattttgcccaatcctccaggccaccactacacatcacaatcaagggagaaagaaaatataaagtttgagttcatcatagtttttcaatttttgttcttacaaaacgaatattataaagtttattatgagtcttattactcaccttgcttgaagtaagtgttggactattgataatgaactcatccgcttggggatcaaaagtggcagtagtttcaagtccttgaacattagaaccgtgaccaagttcagtctgagcataacaaccaattatttgcatcttatatgccaaaggtaaccatttagcctgctgctcgtcagtgccttgtccttgaatagcaggtacaaacattccctgaattttattcatatgttacttcatgtaaaaagctttatgagaaaatttatttaatgaaataatgtttttaattattattatattatgaggtatttacagtgatacttgagtagcggggtaatggcttatttaattagtacccagaaagataataagatggtgtgcatgtttacacgttgggattttttctaagtgagaatgtcgatagctctatataaagagctgagcttgaggctgtacgaaactaggtgtgaaaaagttcgtcccatctttcttcagtgtttcttttatctatcaaagctaaagcctaggcatcaatctttcatcaattcaagcaaaaaaaaataatatataaaaaaacagtctttttcacattgaattcatgtaactaaacaagaatcgacttgaacgagagatgcatatcacctcctcaaatatgaacaatttttatgatagaggaaaacctacccaatgaagatcagtataagcaggctcgtccacgaaaaacctcaacttttttgcctcttcctctgtaacacaattacatttaaaaaaaaatggtcattactataacatgatagagcatctttttcgactaaaggcactttttttgtttaaaaacaacatgattaagacataccagtgagtcgaagctcaataatccgcttccatgcatgagccgctttcctcaatgtatttttgaacaagtctttcctagctaacatggttctattatccttccgaaagacctatcgagaatacaaaacaacaaccaattattaaaaagaaaaacaaatctggcctattcctttccccctcgaacaacagggtttaccgactacattcccccgaacaaaacaaaagttaaaaaaaaaaagttttagacccaaaaatatacaggaaggaagagtaacaaatatcgtatatcatcgatgaaccaattagaacaggtacgaaaatttaaaataaaaaataataataatagtaaatcaaacgaaaaatcaccggatcagaagcgacgaggcgagcaatccgatcggagacttcgaattcatggcgagaaccagcccagacgatctttaattcatcaacatcaaactgagccttgctcctctcatgcgccagatgatctacgccctccattcccaacaattcacagaaacaaaacccccaaatacgaaacgaaattcagaagcgaaatcgaaagaaggctgaaccgacaatggctgagtgggagagaggaagaagaaagggatgaacgaagaaagctgatttcacagtggtcgatatttatagcagcaaagaagtcaaaaacagattttttttttttctggaaagtcagaacaggaaaagattggatataatattatatattattattatattatttatatttttattattgattgccatccgtgttccgcttcccaataactttgttctaacgcttttttttttttctaattataatatcaatttctcacgtggaaaatttgttaccatatcatatcattttggtttttctttgttttctccgttttaaaaaaacaaaaaaaaaaaaacgttttttttaattcggatgagatttgagtttgactatgactagttggaattcaagtctgttttggtatcttcttcggttgtaattcttcgttttacgtatgattccacttttctttatttttggacataattgctttttttattaagtattagataattgaatatctaatctacccacgtagataattgaataatatattaaaaaattatactataaaaagtaaatagcaacataataataaaaggatttgaaattttgagtttgtaagggacataaattcaataattttgagttttgacgaaaatatataatatcagttacttttaaatttttttaataaattcaaaacgaaatctttattaaaaaaaagggtaaatatcattttggaccctgtgttttgcaaaagttacagattggacc

SEQ ID NO: 295886 - DNA, 2877 bp, Cannabis indica
aacaagaagaagaggaagaggagggagcttctctgcaaactcaccctcttcttatccaattcgtaaggttttctctttctgggtttctctctcttgtttgtttttgtttacttttgtttttggaaatttgttttgttcgggtttggttttgctctttctgggctgctatagtagttttccaatttcggttagtgaaaatggtgtagaaggttttttatgagacgggcattctaagatgggatctctttctttgtttcgctttgtttgaggtaaattttattactttgtggtctagatttgctggtgattgtattaaaatttggatttttagtctggttatgtggttgaatttgtcctaattttatttgcttctgtttttaaaagttttggtatacgttttctagtatgaactcagagatctgatttgcttttttttctttcttggggctagattggtttcgtgttgttttcttttcagttataattttgattggctttgttgatttaaacggggtttgttaattttggttatgaagttaggtttttgatctttttgcgttgttgcatgcagttttgaattcggattgaattcaggtggatcagggtattggctttgtgtgtgctgaacataaattaactcggtttagaacataaattagcatttgaacccttttgcatgtgaataatcgggagacgtatcttttgtttattagtttttgtccttaaccaacgaagggttttttattttgtttattttctttctttgtcatcagttgtcgaagcagagaattttaatatgttggagggtccatcatatcttgtttcaagagaattgcccagctcgtgcgagcaggaaagcaagtggatttacaatactttccggttgattgaactctcaagtaataagcgcaaactagaagatggagaagataacacattgaggaagttaagtaaggtatcagtagctcttaaagaagaggaagcatgtaaagatggtagtgattttgaccatgccctaaaggaccaatttgatggccagtatcaagctggggatccttcggatgttcataattttttggatgcccaaactgacctatcaaatggacagaatcaagctggggaatactctgatattaaagcttttcctaatcccccaactgaccaatcaagtgacaagcatctagtaggggatcattctggtattattggcgtgtctgacggacaaaatgaccaaccaggtgaccagcatcaggcacaagatcactctggcgttcatgatatttcccacgctctgattgaccaatcaaatgaccagctagctagggatgacgccgatatttttgattttacagatgcccaaattgaccaatcaaatgatcatcaccagggaggagaacactctgatcttagctcacttattcatcaacttggtagggacatttcaatcaactgtcttctacgatgtcccaggtctgagtatggctcaattgcttctttgaataggagtttccgttctatcattcgtggtggagagctctacaagctgaggaagcaaatgggtatagtggaacattgggtttacttctcctgtgccctccttgaatgggaagcttacgatccaaatcacaaccgctggatgcatttgcctaggatgacttcaaatgaatgcttcatgtgttcagataaggaatcgttggctgttggtacagaactacttgtttttgggaaggaaataacttcccatgttatttatagatatagtattttgacaaatacatggtcatcaggcatgaaaatgaatacgcctaggtgcttatttggttctgctagtctaggggaaattgccattttggctggtggttgtgatccacgtggcaatatattgagctctgcggagctttataattcagaaacaggaacttggaggactcttccatgcatgaataaaccaagaaaaatgtgctctggggtgtttatggacaggaagttttatgttattggtggaataggaactgggaatccaaggtctcttacatgtggggaagtatttgatcttgaaactgagacttggactgaaatacctgacatgttcccttcacggaatggagaggatgggattattggggcccctgctgcagcagaggcacctcctcttgtcgcagttgtaaagaatacattgtatgctgctgattacgctgaaaaggaggtaagaagatatgacaagaagaggaacgagtggataactattgggagattgcctgagcgagcagtctcaatgcatggatggggtttggcatttagagcttgtggagatcgattgatcgttattgggggaccaagggtccaagccggagggataattgagcttaatgcttgggttcccaatgaagacccacctcaatggaacctgcttgccagtaagcaatctggaagctttgtgtataactgcacagtgatgggatgttgaggtgtccaattttgtgatgttatccgtgtgctatgtggagtcctgtctgagtggaattgacaatcttcgcttttcaaggagatggggttccagctcatgggtaatctctgccctcctcttattggaaaatttcaggtttaatttagccatagaaacatttacaaaagggggcctggaggtttaatttcctctcttcattttttttcacctttgttgtgttgcatctttcttttctagttaccatgagggcttttcaaaggttgggtattatgtagaacatgcataggtgaataactcatgtactgctaaatgtttaggttgtgttgactattttcataagttctattgaaacattgcagaattgtgtaatggtctatattctataacctcttatgtgcattagcatattg

SEQ ID NO: 295887 - DNA, 3850 bp, Cannabis indica
agtatttaattgcaaaaagtgtctcccagcataattttctctaaaaatatggttttggaatcggattcatacctagtgctgctgtgtgcatgatcacctaaaccatcatatcatcaagtagggtaggtcggatgtacaaagcatcaaaatagcatatattgaaaactgaaggacctaatccaattttatcattttcattcttttctttttcaataggctatcaataccattaatattattgtacgtagtttgatactaaagttttggaatccaactttcgttggattttcttaatctttgtaatggttacaagaccaaaaataattttagtttcttatattagggttcttctagtagtacactggtgtaaactgaggaggctgaaaataaattttggggaaagaatttatttagggccaagttaatatatactaaaaaaataaaagaactgggagggctgcaacccttatgtttatatgtggcttcatgaaatttgaacacttttctatccaatatgatatctagcttaaccattacactaaaattaatattatgtaatataattttttattacaaatatatatcgtaacaaattaaaatgtatatagatttttttctcatttttttcttcaaaagaacgactaccttaccttatttcaatgtgggtctgcccttgctcatggacctaaatggctgaccccatcaaatttgaaaagaataaagaaatttaattttctatgtttaatgtgtattacgatgatttaaaaaaatctcacataatactctttgttgtgttatttgataatataatatgtataaattaaaatgtgataaatatattattacgagaataatatatatcaagtgtatggtaaacaaattatgtaatatatgatttatttaacctacacattgtaacttagagaggagttacaatatattatcacttgtaactcttctttggttgatcacaatttaagtgtaataaaaaaagttattacacaaatgagatgttggaatttaaatttatctttatatggatgttaggattggattaatattcatttatatgagagaaatgagttggaaaaagtttggttttagtttggtcaaaatgggagttacaaaactcaaaacaaggtgttgttgaaattacaccaggtgacatatcgcctagattcaagcatcattaatagttttattgtgtataattagtgattagttaaggtattattgtctgtattgtcaataccgttagttggtttattattggcctttagcttttgttgattcaattagtttagttagagttagtttgtctaactctagtcgtgttctttcttgattcttgattagtttgctaactctgtttagcccaaatctgttagtatatatattgatcttgtatcatttttggtcaatgggttaatttcattttctataatgaaaccttgttcttctcttgattcattttgcaatatggtatcagagtgggaagctttccctcaagatcatgctcttcttttcctttcttgttgtgtctttttctctgacaaaggcggtgttctctatcgttcttctccttttcctggtttttttggtttcctcgaagtcttcttctctagctcagttcaacactgtcaaatgatgatcagtatgtccattctaaagttcaatccacaaatccacaagttccttccgctcaagacaaccagaatcttcaagcaatcaatccaatagatccttttgaagatccagctaatccatattaccttcatcttggtgtcttggagtagagcaatgcagctttcaatctcagtcaagaataagcttaggttcctcgacaattctatccctaaaccttcacctactgattatattctatacaaggcttgggttaaaaataacaatattgtcatttcttggattctgaattctatttctaaagaaattttttctagtattctttatgatgacagtgctgcagaaatttggaccgatcttaaggtgagatttcaccaaagaaatggccctcacatatacaatctgagaaaatatttgatgaatctaaagcaggaagctcaaaccgtgagaatgtatttcactaaactgaaaatggttttggaagaattgtccaattatagaccttcatcacttcatgtacctacaatggatgttcttgtggtggaatcaactccaagaacatcatcacatgaagtatataatttcttttctcatgggactctcaaaccattacactcaggttcgaagcaacattttgatgggtcctctaccttaaatcaatagattttttcaccttgtgtcttaagataaacatcataaggaagcattgctagaggaactaattcgaacaaattacattctggacagattttatattgaccactgtgttccttattaaccgaaatcctaccccaaatttagcaaacaataccctatgaaattttatttggaactactcctgattacacacatttaagaaactttagttgccttgcttttgcctccactctcactgtacatagaacaaagttttctcctcgagcaaacacatgtgtcttcataggatatccacaaggcataaaaggatacaaaatctatgatctcaataccaaacagttccttatttctagaaatgttgttttccatgaacataaatatcctttccataaactaaatattaacaacactggtattgatccttttgctaacatggtgttcccctcatctcatgtctctctcacacacgtaattgattttaactcacatataccatgcactatcaatgttgacaataccatgcaggtccatatttccaatgatattttagtagattacatatcagaatccacttctccacctaattgagaagcctctattgctagacctatagagcaaactgatgctcctattacaacaaatgatgctacaacaaataatgatgatgatacaataaataatgatgattcgcaagtcacattaagaagaattggaagaattcataaaccaccaagttatcttcaagattattaatgccattccactattcacgatcaatcttctacaccttatctccttcataaattcatgtcctatactaatttatctatagctcacaaagcttttatttgtgcagtccaagctcattataaaccataacattacaatcaagttgtacaacataaagtgtggaaccaagcaatggaaacagaattatatgctcttcttaacaataaaacatggaccattgttaactccctcccaacaaacatgccattgggtttataaaatctaactcaatagtgatggtttagttgaaagatacaaggcatggcttgtagctccaggatatacacaacaagaaggattcaatttttttggaactttcttccccgtggccaaaatggtcaccttcaagatgttgcttgccatctctgtcattaaacaatgacacacacttcaacttgatattaataacgctttcctcaatggagatctccatgaggaagtatatatgtctctcccacaaggactcactcttccttcatctttgtctgcagaaacaggtctagtgtgtaaactctacaaattaatctatggcctcaagcaattatctagaaaatggtacatgaagcttactgaatcactcattcccaagcaaactataccctgtacaccaaaggctccgatagtaccttcattttcctcattgtttatgttgacgatattattatcactagaccaaacatctctcttttacagcagttagaggactccaagcatgcacaatttaaactaggaatgtcagtcggtgttggaaattatttta

SEQ ID NO: 295888 - DNA, 6093 bp, Cannabis indica
  modified_base (6042)..(6042): a, c, t, g, unknown or other
ctgatcactctcttaatgaggtaacttaattactttatttattttcttttctcactatccaaacagaaaaatgttcttttcctgctaattactttacttaaattactttacttaatacaacttgtctctatatatatatatatatatatatgattgtttggatcgtttaccttcctactttgaatagctcttttttcttatcttcttacctttgcggttattctttttgtttgcaccaaagaaattcaataagttcagtcatatgaatagtagttttttttttttaataaataaataaatatttgtaacttatattaatatacacatatatctatacaagttttttttgggttttccaagagaaacttactcgtgttagttaaagtaacatacaatagtgattagatagaaacaaaagggactggtgttttcagtatttctctgggttttgtttactctttacataacagattaactctcagctcagacagttttaaagttgccataatcaacccactgatataaatatatatatttaagtgcaaatattattttctacctgcaaatctcttactaattggattcctgttttattaaatcacaaaatcaaccttgtattttctaaaatggttaaaacagtaagctgatctcaatttttaataattttttttttttttaatgtaatcaacttttaagataattttgaacggggcgaatacaaaaaatgtaatcatctttgttataacatctctaaatcatattattattaaattttattttaataaaaattcagttcagggtcttatttgtacaattttaaaaaataaagagtccatattatcatttaacaaaataaaaaatcgaatcagtaacttttgcaaaatacagaatttaaaataatatttaccttatatttaaataaattaataatatgtgttttgattttgattcgataatcacacacaccaccaacaaaagaacaaaaaggttttagttagataacctctcattgatggtaattttcacaatttttgtttcctttgatctcgaatgtatggaagtattataataatttacttaacctttattttttaaaagaaggaagataatttatctagctatagttgactaatgagtcaaaactgacttgggtatttgaggctacaatttttgaaacactcaaataatttacttgccatatagtttaatacatcaacatgtagctcttatgattattaaaaaatataataggggcaaaattaaaatgcctactaataaaacttaggtcatagactcatgtgaaatgaaagcaagtggcgtatgatatcatatgacttgtaaagtctattataagtcaaattagttctttagaaaagaaaaaggaaattgataacacatgttcttctatttaatatttaggctacaaagagaatcataatgtgtgaaatgatcaagattttgacattggaattctattcaaacatattattatggtatgtacttgtcaaataaataaaatatagaagaaaggagtgtttaactataatctctttttatgatttttcagttaaattctgtgtttgaaaatatatggcgaaatatatattttttatagtattattcattatatttatcacatatcatgtttgaattttgaagacacgtgataaattagaatattaagaattttgttgtcaatacttaaaaatttataactttaatattataattataacaaacatcgctataaaaaaaaaaaaaaaatattctaacatgtgttttgggtatgaaatttaactaaaaaattaaaataagagattaacggtaatattttttaaatatcgaaataataattattatcttttcttttgcaaacaaaaggttctcaaattaataaagatataaacctttaaatcctcacatttatggggtagatgagagttttgattagcttttagtatggttatcattatgtaattaaaagggtagggcaaagctagttgcaattcattaactaacaataacaagtctccacccaattttggtcctggctaaacaataaactttaaaatacagttaggcaatattttatcttttaggcctttttttttgctgggacttttttcttttctcttttttttttcacagctgccaccggttgccggaagctagaaggtacggtaaagaacatatttgtcactggaaaagtgacaatggcaatgggggaccatgacctcggctcggctggcgtctcggcttctggagccgccagtagtagtagtagtactagtagcacattttctcaaaagggctgttttgtaatgtggcaaatggttcccaacaagtggttaattgagctagtagtaggtggtcgcaaggtcattgctggtagtgatggaaatgtggcttggcgccacacaccctggctcagcgctcacgctgccaaaggcggtgttcgacctctccggcgagctcttcaggcaagtaattcctaccctattggtataatgcttccattgctgagaaatgctaaacaaaaacatttaatcaggatgttagtacaaataaatatcggagattatatacttaaattacttttagccctaccaataataatacgttaattatgatttttaccttctaaattttgacatgtactaaataatacttctaaagtttttagactgttaaaaattctcaccaaactattaaaattattagatttaaagaattttgtctaattttatttaattttactaatgtggcaattatccatgtactaaattatatctcctaaattttgatatgtactaaattatgcccctaaactttaacatgtatcaaattgtgtctctaattttcatccatactagattttttttaataaaattgaataaaagtttttaaatttaacaatctcaataaatcaaagaaattttttacgacgtaaaaaattcaaaaaaatatagatattaaagttcaggcactaaaatctaaattagccataataatatattaggatgttatatacacttagggtggtgccttgtaacattgcttcttaatttcttttgtaatttagaacttattagcatgttgaattgtttatagattagtaaattgttacgtttcttaaaaagtaattatagtccgtacacattcaccaataagataaaacaacatagatctatagtggtatgtacataactcatatactgattcaagcaatgtatcgacacatatattgttgtttggtaaaatggcccatgttgttattataaaaatatatatatgttaatacgacattgttagcacacaatgcaagtagagtggttatcactattaatagtatataattataaccatcaaaatagtattgcttgctcatagcaatataacatatatggccatgaaattgtgtacggatatgggggaccaaatgaaaagtttggagagtgacccatgcttatgtttgtctatttgctacattatttattttattttattgtatttttgttgttttcctcatggtttcccttttgtccagcagcctcaaaaattattggtggtatatgcgtataatatattcttcattgctttctttttagtataaatatatgtatacatatttatagttatacatatataatctttcatggttggttgaactactgatggtgatgctttgagctcgtgaaattgcatgttaggtcaggagatattatgataattaaaataatattttttggaaaaataaatataagcaaagcttattgaaaatttgaaacagtaattatttttagtacaaaaatgcttgaaaacttaaataaaaatcacatggtaatgtggttagctcacttgctttttttttttttcctttcaaataatgaaattccgagttaaggttctcaatctcttaattagatataatttaagcgacaccaagctgtaattttgtttaaataatcaacaatcatttttaccaaaaagatccaaactagatataatccaccataataaagtagttaattaatgaatggatcttagatctttacctgctgcctgtagagtatacctaatatctaaatcaaacaaaagattagatataaataaagactataactcttgaggtgctgtcacattcatagttggcttcaagtgcacttttttctcactttctgatacattttgtccctattcaaaattgttaatgtaaagcacttgactaaggtgaagcttgggttactttgatttcttattttgataaaaaatttattctcttaaagaaaaattgattggttggatgtttatacatgttatggactagactgtgatttgattttgatgagctagatagcatgaaatgcacattaatggtcccccttaaaaccaacgaataatcctagctaccagccaagattatggatcttgttttatggtcccatgttcttgaagagaaagaaactttgccttaatcatgtgtatgttcattattttccatgttactatgttgtcaatggcccaaaattgagttgcaatttgtatgagcagggactagaccctttggcaatatcagctgtattttccccagcacaattcataggcgaaaagcgaatctcgggcgaagattgtttcatgttgaaattgtcagctgatcagacggatctagctgagcggagtgacagcacagctgagatgatcaaacatgtaatatttggttactttagccaaaggagtggcttacttgtgttcttagaggattcttacttaactaggattcaatcccctggaacctaccctacttattgggaaaccacaatgtccacaaaaattgaggattatcgaacggtggagggtgtgatgatcgcccattctggtcaaacaaacgtgatcatcacacggtttggagataatctaaaatcaggccccgcaatcactcgaatggaagagatctggaccatagatgacatagcattcaacgttcctggtctctcaattgactgtttcattgctcctaatgatgtacagaaacattacctccctgatgacaatcttgattggagaaagtcactatagtgttgattaacaatgattgaccatggtatcttgatccaacagttctcattggcttttgccttatcatcaatgccataaggctttgactgagacactacttgtgtatatttgagatattctaatactcaacatagcaactactactaccactgtgcatcttttggaatgtgtacaaaaaaaatataagcagaacttttttttccctttgttacattaatttgtatcattttccaaatgtaaaattttgcttcttggaaaaaaaaacaaaaaaactgtttggtagtcggaccacataaatgtgccatttcccaagttctgcacattgagtattatcactgttgaaatatcagcacatttattcttcgattcaactcttgctaaaaactatactttggtgggtcttttaaaacaaagttaataattactggagaacaaaaaatggtaattttattgtcaaaataaaggtggtatatttcctagtgtagattgtagaaggagagaactgaataaaaaatgtacagaaacaaatgttgagagtgggatttgaacccacgccctttcggaccagaaccttaatctggcgccttagaccaactcggccatctcaacttattgtcaaactgttgttttcttaataatttgatttttgaatattataagactaaaagaaggataatatattttggccgtctccctatatggaaaactattgactatttccctatgattaaattgcagcataaccctaatacttttaatttgttaataattaatccctaaaactcaaattttttcttcacactctctttctcctctctctctctctctctttcttcttcatctactgactaccaccaccaccaccatcatccaccacccaccatcggtttacaataatctttttcttttcttttttacttttttcttaatctatttttctttcgttgtagaacgaagaagataggngtcttgggttgtcgtgacttcatggcttcgtttcttcactgttgagaagtc

SEQ ID NO: 295889 - DNA, 2178 bp, Cannabis indica
tatatatatatatatataatgatcattgttcttaattaattataatcttttaatccaaatagattggcaatgattaaattacatatatagaagcaaggttaattatatatatttatatatgtgtagtgatgatgatgatgtgaacccaacttaaatttggccgttaaaactcgctctcacgtaaacgtacacatgtgcaatccaaactgaaaccttttttagatccatataaatatatatatatatatatatatatatataagtatacctatctatacatatatttatatttaatagctcatcacatctgtagctatatagagatctccaacgtcactacaatcttaatttgaatatgtttattatatacatgtatattatatatttaattgtttccattattggtaagtacaaaattaagactttaagagattcagaactagttaattaaaacttgatatgatatatatatatatatgtgtgttaggactagatatatatatatatatatatattttaattttggatattaggtttctatatattttaattttggatagcattagctgaataagctacatacaattcaactaattaattggggatttattaaccagacactaacaagaaatactgacaattaatttcctaggtagtgaagaaaaatatcaattacaatttgtttctaagaaaattaacgagcaaaggaagcaagaataagcatgttatgatgaaaataagacacaaaaatgaaaaaaactttaaacattgtcaatactttttatttatttatttatttattttggtaaatgagtaatttcattgatgaacaatacacccacaaagaactcagcccaaaactcaaacacaaattcctatatataccaatccttatcttttaagcttacctttaaaggtaaaatgctcataatcctatggtataccatatatttcactatgaacaatatttactgatatttcaaaatttgataaatggttgcattcaccgtggcttgatagacacattcctgttagattaaaattttgatgggctcatttgtattggtgtattgctatttgaagtttgacctatatataatgtgatgattttagtaattgtgggtcattaggtattacactgtcatggactaaatgtgtaaataccttaaggaatatttctaacatattaaagagctaaattagaaatacttaaaattaataacctaattatgaggttataatatactggtagtaatctctaaaaaacaagagtcaactctattttcattttccctcatcaagagagaaaaccagagaactctaagtcttgtattcttagaagatcatatccaaatcacttcaaatattatctctagaaaataggttaagatcatcattatctatggattaagatacgcttccactatttgagttattctctttgaatcaacaaaagtattctttagatttttgtttatatgcttataataatatataatatgtttaattatctatggaattgaatcttgttattgcatattttatgagtaatataaaattctaacaagtggtactaaagccatgcatctttgattgattctttgagaatttaagatttatatttaagaaatttgagaattttctaaaatctaaaaaaaattaggttttgttcttccatttatgatttggggttacaattttgtgattatttatttagtaatccaaaattatttttcaagatggtttttttaaagggaattcattcagcaacaaacaattacaaagaggaagacaggtccttcatgacagtaggactagcaacacaaggcacaacctcgattacaaatggcagaagctttaaaatctaatgcatacttagcaatacaatgagcgtgaaggttcccatctctacactcgaaacaaaaatcgatagtaaataacaaacaacaaagagcatcaatgtcaacaagaatattgtctagatcactataaccctttgcttagacttaattgagttgaattgctgccaaacaatcagatgctaagaaaacattttgaagcttcaactcaactgtcagatgaagtaggggtgagcatgggttggaaaccgaccaacccgcactgaatgggttgatcaatggggctgatggtttttcaacccaatcaacccaaactggg

SEQ ID NO: 295890 - DNA, 2493 bp, Cannabis indica
accaaaaacacaatacaaaagagaagagtgttcctcatacctaccagagtgttccagagagaaaaagtccttttttaatgaaattagtacaatgattatagcatattgataatgggtaaaacacttatgaattaagagttaccctatatattagatataatttttttgaatatattaaaatatatacatgggcaggcctagtggataatttgttcttttctattaacatggacaataaaaataatcaaataaagaaagaaaaaaaaaagttttctcctgacaagaatctaagctctctaaaactataattaacttaaaatgacaaaactgtgcatctacattagaatatatttagtaattctaaaccaaaaacctctcccaccgttgactttgatctttgtcctatataaacagccacactgcttggtcaaacctttactaatctctctataataatagttagcccattttttatttattattataatattgaataatatagatcgttacattgaaattaccacttgaaaactgtaaacttgtctggtattcagcttaccatgataaattatgttcattaaagtagtagacaaaaacatataaaatataacaacttggagcatctgcatacaactaactgttaaatttttattgcttaattatttcccccatttccatttttattcatttcaatatttttgtcttgtttcttcattaaaagttgacatttgtcattaagcatattttaattagtggattgacaaaatgaccatgtgaatgtttcctacatatatgtaacatgtatttttttttatatatatctatacacataacatgtttcatgccattcacctaactagctaataagctagctaactacaaatatatatatatatatatatatataactacaaaactggccaacagaaccaactaactgaatcaactccattttctgtatattgatgatggaatgagtaaaactaatgaatcatcaacaatggccaatgcagctacttgtatagagcttcccatctttgacatctctcaacctttagattcatcttcactttattctctctcccaagcctgcaaggaatggggtttttttcacattacaaatcatggagtctctaaaaatctttacaacaaactctcttctctttccaaccacatatttagtctacctttggaattaaagttggaagttggtccattttctcctattaaaacttacactcctcattttgttgcttcacctttctttgagagcctccgagtttccgggccagacttctttgcctctgctcaggcttcatcaacagtgctcctcaatcaacaaagttcagagttcaggtaattaatatatctataatgtatttattattttatatgtttatgagttatgtataattatttgaagttttgtatgtgttttctagtgaggtattgaaagagtatgggaacagaatgagtgagctatcaaagagaattgtgcaagttgtgctgatgagcttattaggagaagagttggataacaaattgtatgtttctgaattcaaaaaatgtcatggttatttgaggattatcaactacacacccccagggagtgtgaacagagaaaaagaagtagaagggcttggaatgcacactgatatgagttgtataacaattgtttatcaagataaatttggtggggttcaagtaagatctaagcaagggaagtggcttgacataaagccaagtgaagaaactcttttggtcaacataggggacttaatgcaagcatggagtaatggaaaattgaggtcttctgaacacagagttgtgcttaggcgattagttaatagattttctttggctttcttttggtgctttgaggatcagaaagtaatttatgccccaaatgaagtggtgggtggttgtgaagagcataacttgaggctttacaagccttttctttgtgcagattatttgaagtttagagagataaacagtgttggggaagaaaagtttgagaaaattggttttaatgtgaaagattttgctggcattacatgttctgatcagataacaaaatccctcaaaagttaaaatttctacattataacaattcattagtgactattattattgctatatctctaagagattgtagttaacaaaatttccatgtggattagttatgatctgactaaatttgtggtttttggaactttgtttaattatgtttgtttttgtgtgtgcataatttatacattcatattaattggtgtgtttaatcattatttattcactactaataatatgttcattcatgtgatttagtattgtgctcataatataatctcttgtttgttccgtttttcttttatatatatatttttctctcttacttctaatgtttaagtaatcttggcttgcaagctttatatattgaagttatataagagagagagagagagagagagagagagagagagagaggaggtc

SEQ ID NO: 295891 - DNA, 1942 bp, Cannabis indica
tagttaggtgttacataatcgatttctgaaaatctcgatagcattttggtgctttcactaagagttgaggtaatatttaaacatgcacagtgtttgtcattacgaatcccaacttacaaaaaggagagctcatccagctagaagaagatgtgttgggaaactcatcgactgaaaccgttgtgaagaataatagtcttaaaattccagcaattcctgagcttatttggaaaagcttgagtctggccagttgatcctctggggacgcatcaagccatcggtactttcaagcctgggcaccatgctgctcacagaagcacaactatgtagaaaggataaggtgtgagaatgcttaggtctggcgacaaggccaggaaatgttgtgccagtgacgagcaatctgtagaaggctaccgaaacggccttgctgctaaacgtaggataggggcaagagctctgtccgaagatcacgcgccggaagtctattggagcctcttgggtttaagaggcaagctccacctacaatctcatgttttctttgtaagtaattgttcccaaaatcttgagtattcaaactatcaaggaatatcctacatcagtggcagtgcctacgcgaacctgtttctttaggtatggggcgacaaggaaaggatggaaagtacttcctggaactgttcaaagtatggttcctggagcagagtttgagaaactcttggaaaatgagagatgggcaatggtcgagatgagtttccaaaaggtataagaaagtcttggggcagaagatgtcaaagtggcaagatcctcggagaaaactattaaaatatcatgggagatggaacattgttcaaggaatagatatcttgtaaagtgaatctggagtaatagtcacagtgatagaagtccaaagtcttatctcgtgcatcggatcggaggctgcacctggaaggatgccagttcctggacaacatggtaccgtgcagtctccctgaggattagatcacccttgagcttctagaatgcatcttttagtaagcccgaatcctcttgctcaagatgaaactgtgcaaagtgttgtcagattgaaaactcaatgctacttagcaataatagacgagagtttcattagtggaccccgtggaaagggcaacctatgtggaattgcatcgaccatttgactgatctctcgagatgggaacctgatcacctaaatgtaaagtcaaggttgatccatttagtatggagtggtggtcccaaatcacttgggaatccaaaaaggtcggttcataagaggtgaaggtcatctcagaaatgcttaaacatccccagaaaaacgtaggagtttccaacaaagtgggtcaggtccattgcacaaagttttaggctggatcacagagaaccttttgaccgaggatcccagtacctctttgtcttctcatcggcacatgtgtttttactgtgcgtgaaagatcacagggagttcgatatatcttcaaccttccttctcagtgagaaggatttcttgaagtctatcacacgcctagtggggtttcacacctttggtcttgaatgtgaaaacattgcttaaattttagtgcgacttcagtcttccttcatggaagccaaagtactgccacataattcaacagggtgctctcgggcacgtgtgtttctacaatgcgagaaagatcattggtgattcgatacgtcttcaaccctccttccaagagagaatgaagtctatcacacgctcagtggcatttcacacctttggccttgaatgtgaaaccactgcttgaattgagtgcaacttcatccttccttcacggaagcgaaagtttgccacataattcaaaatggttctcatgtgcacgtgtgtttttactgtgcatgaaagatcactcggggtttgatgcatcttcaaccttccttctggaagagaaggatt

SEQ ID NO: 295892 - DNA, 2745 bp, Cannabis indica
ttaaacaacatacttatgagtagatctaagatcctggtaaaataaattccaacagatgggacatgtcactttcgcgacagcttccttaataataatagaaacctcacccggaccctgcttcctatttgccttattcctcttcttcttatttggcttggatgttggttgcacaagaacatgtgcctcggctaccgacccttcttttatagcctccccgaacgagtatagtgcataacaaggaaattctcctcgttagctagcaaagagatgtttcatgttgtgctcggcatctacaaaatagcttgggcccttgtcctctacccgtgtgaaaggaggttggtcatcaattttggcctactgaaaggacatgtggttagccttcatcccttgcacaatataataatcttggatgaattcatctatcttcgagacatcctagcccgtcgtgccagtcagccaggggcagtcaacttgggaaaattaaataacctgagcggtcgtacctcgggctggacttcatgtcaaagaactagttggtatcatgaggagaaggtatcccccatttctgttgcccgtataggatgtataaagcagcctaatacttgatacccttcggcgtaaactgcgtcaagcatattgtaatttgccagcttctagaagtatgatgaagggataaaagagccccatgttaggcatgtcaattggaccacgcgcaaataccatcctagggtcattggcaagctgttcgtcaaaatggagaaaggaagttacatctccattgagccccttcttgtttaggcttgtaagcctcttgagtgtgaggttggacggaggagaaatccacattggcttaggcctttcttagtgtatggactcacgagcctccttgtattcctcactaacataatcaattttctcgaccattagttctcttcgcacagtaataggctgccccacctcattatatccgccgaacccttcaaacaacgtaagagcgacaagctcttcctccttatcaacttgagttgggcgagcctcgccttggtcttcaacttcttgcacatcgacattatcgacatgcacctcagtagcttcttcttcagagcatgaactaacgccattaaccgtgcaagatgagggtcttcagatgaaactttcttgtaagttttcttggtccatgccaattctctagtcctgggcgggcgtctagttgaaggatattgtgcaacgttaaccgcaatctccacttccacagtgactttctttgaaggttctggatcgcctacgggcaaagtgtctggaatccctacgaggaccttgtatgtccaagaaataggtagatatcgcctcatgcctcgattcaattcccaaatgaaccgaccataactttcaccgctaatacaattagggtagtgatggtgttgcgcaataggttttggaggttcagactccttgcttgttacttcccactcgtcaaagctagacgttaaagtctcactcgatgatgaagaggttgcacagagtttaggctggtcctgatatagtaattaaagtaatccatcatctacttggtgcttaccttccaagaagtcgctcgagttcatctaaaaaagagggaaagggaggtaagaaccgaccagggtcatggaaagaaacaactcatttgctccaaccaattagatttaaagatcgaaggaaggaaattttgttctaatgacgagaatcctagtttgaagatgctcaagtacactggatgatctcaaaattctccaaaaacatcgagcatagtgttttaaagtgttttttttaacaaaaaacagtgaaatttgcaaaaaaatcaaagattatggtccgtgcgcatgcattcgatatcaaattataagtcttaaatctctaaaaatgaagaacaattcatttcataaacctagaatgttcatagaaacaattcaaagtaaaatgcaagaaattaaagaaaatacataaagagttagggacttactcactcttgaagatcaccgagtaattcgagtagaagtttggaaatgatcttgaaaattccttgaagcttcgaagagaacttgaagatttgagagaatttgattatttgctcttaattatctgagttttgaaatggctaaaagagaaaaatgaaatcctaattcccttcgtataggtttctgagagggtattttggtaattcaacattttaaattttgggtttttccctcaaaaggtgccatcagtacacactggggtgtccaatcgtcagcacgtgacccaaaggtacattttttgaggtgaagcattaaatgcttgaaaatatggaaaactctgtatacctacatcgtagtccgagcacgtgtcactccattcacctagtgtgtgggccaagcgagtccacgtaccaacagaaaattcccacatggacatgggaggacaaattttatcccaaattctacgtaggatgacttgattcatctaggcaacatgtggaacattttaagatttggacggctgatacctcctcggcatgccatcatgggtgggttattcctcaaacaatttatttaaagaataagctataatatccagaaagggtaaatgacaccgtccagccagcgtcaatcttgcaggtttctcgcatacatcgaccagggtaaatgcaactgaaatctatagagatacatgctgggattttatgccttaaataaaactcatttcaatacaatctgatttgttatcaat

SEQ ID NO: 295893 - DNA, 2007 bp, Cannabis indica
aaccgatccaatcttggatttttaaaatttacatctcatccaactatgattagatatctgattctattggatcggtcggttgtaattggatttaatgactttctgtacactcctatgcactagtccctccatttggaaagaatccattagcaaaagccaccacatctccaatgggaacttgcttggaagggcggtcacgctcttttgcacaaacctccgtagaaaactcgccaaaagtgtcacgactcaagatagtagaatgattatcgagataaccgtgcttatgatcccataccttggaatgaatataatgcatttgtcataacaaattttgtgtttaatgttccataattcttcccaaacgtaaagagaactgaaatctacttaggcaagtattcatggggggctggcgggctgaagaaccatttcgctagctctttcagagtatttactgaattcttcaaaataagtccaacacgttttggtggcgttctcctttttggaggataataatttgtgtgagcaaaggattatggaagtgtgtatttacgggagccttggcactaggaaaatagcatagcttgtgtatcaactctatgaggctcccttcttgcaaaattttggtgaaacccttcatttcgtgagtaatataaggcaatatgtcttgtaactcaattttagggctgaaaaacgtcaaaattgtgatatgatcatcatacaaacttagattcttctttaaaagagatttttaatgcaacttgaattgaataagaattgagcaagttatggttattttaataaagggttgcaagcagagtcctagaattcttgctccttgcgagcaatgccatctttttggcataaaagatgacactacttgcttatacttgttttttaacaccttggggtgtgttttggatgatttttttgatggtgattcgtgctttctggttttggggctcaaaaacttgtgggaccctaatatgggagcaatgccatctttttagccaaaaatattacaatgcttgcctagagcattccaccaccatttggtaggattttacatttgtttcatgtgtttttgatgttagaaaaacacataactaacttcctccttctctttctctttatgggagcaatggcatatttttttgccaaaaagatggcactgctcacccaaagtagtccatcaccatttgttggtgcttctcattggttttatactcattgatgttagaaaaatacaattggccaattttccctttgtcattcttcttggggaacaatgtcatcgttttggtgaaaaagatggcattgctcccctaacacctttgagagggtgtttttatacaattctgactcattgttcaagtcttgattttcttgtatctcaatgagtcaagttttcattgaatttctcattggattagggtttttgctccaaccctacttcggattcatgaaaccttaggttcagaatcatagagtgcaagcattgcagtgcttgcatggctttcttagtgtatcatggggcactcaaatagggtaccatgtagttgtgggccgagttctaaccccatataataacaaaatataatatacattaattatattttcattggattttttttgtgttaaatttgtaacagttggtcattttgtgtatttattttcatgatgttttgttctattttattatttagaaatgttcttgttttaattatttaaaacttttagttacattacattgtaatgatggtaagtttatggagtctaaacttaaataaaggatgatatttattttttacgtatttttcttcatatgtttaagttaatattaaaatttaggtgtgtaattggatatccaattaaaaaaccgatccaatccaattagtaattgggtagtattggattggattttgaggtctaattggattggattggatgatgattttttgaatccaattctaattagattgattggatgaggagaaaaaaattggattg

SEQ ID NO: 295894 - DNA, 748 bp, Cannabis indica
actccagcctggtgacagtatgagactccgtcaaaaaaaaaaaaagaagtaaatctcccttttctagatggcaggatagcaaatgtttgaaaaaatattgatgcacctgttctttctaccttcttcaatgtgatcttcttcttcagccagggccttatgttatctggggaagattagacattttatggatgaaaacaaagagaaagaggcaatgtctagcttttaacttctaagataaactcttgaagcacttggtgagaaagcaagcccagctttgtggagagagagacagagtttggaattcccaaacttgccatcatatataaagagtgaagatgagcagttctgaccatacatgccctcttagcccaggcagagagatctgaggctctgcacaggggaatccctcaacagggaggccgaggagggggtctcatgcctccaggtgggcaggggggatggattggagagggaggtttgtagggaaggacagggccaaggtgaggatgttatcagccctccgtgagaaggtatagaccccaaatggagtgaggtggagtgcaatgtagtgtgggcttgtccctgctcctatttggaacttcccaagcagccatggccaagcagcaatggctaagagtgaagcttcagatgatggcctgcctggggccttttctctgtggaagccacaggcagggctgtgcctgagattgctggttggagctttcaagggcaccagaacaaggtgcac

SEQ ID NO: 295895 - DNA, 4320 bp, Cannabis indica
ctaaaatcgagttggtcagcttaattgagcagattggacctattttcaacccaccaattaacaaattaaacttaatatttatttgcaatttaaattttaatatttatgatccaaatgtcaaaataatttcatggtttagttttggtggcttgcgagttcgaaaaggcccactgaaagactaatggaccctcatccagactaccgttattataaaaggctccaaaaccctagccacttctgtgttggactagcagacggcgtcttcagacttcagcagcttcgattaatccaaccctagagctacaatggtaaatctaatatctaccctctctccgtgcttgaccttatttcattttgttagaatttgggactcatttttttcgatttggctatggtaaacagggtatcgatctagttgcaggaggtaagtccaagaagaccaaaaggaccgcacccaaatccgacgatgtttatctgaaacttcttgtcaaggtccttttaccctacctcttcccatttttcttttatattagactgatttaaatccttgtggtacatgtttattttttctttttaacttttttatttttaggtatagacgccatttggtatatatgggtgtgtttgtatgtgcatagaaattataatctctctgaagaacgtaagaaactaaatgtgattttctgactgcgttgtagttctatctttacatttctgaatagaggaaaaaaagtgataatattaggcgagcttgattatttaactggtttgtaaatcttagttgttaatttatatatgttactaattcggcaaatgggttgtgaatgctaattttacaagtctggttttttgcgaatagcaatgatatagatatgtatcgatcttagggtatagtcttatgctatgggaatgtatctttccagattttttttttctgaaatgcttaattctttgaactcatttctgacagttttactcggctataatattattttattcaacttaattttcaaacatatatatattttaacagaagtagatttatggaaatgtcggtggtactttaattaaaccctattaatactgatcaccgtatgatgatttttatctcatatatcttgagggaatcggcactttttatagtttgacatttgccatcactctggtttacatatttttatttatggatgtaaatgggttttgtttttttaatggctaaggaaaaacattcttatttatggttgttttctatttaacttgtagtgtgttttattctaaagatgttctgttcatcatcgtatcatctcctttttcttttatattgttttacgatgataaaattttacgtatattaactgactagatttttttcctatattagctgtatcgctttcttgtgcgaaggactggaagcaagttcaatgctgttattctcaagcgtctttttatgagcaaggttaacaaggcgccactttcgctctctaggctgatccgttacatgcaagggaaggtggtaactctgctctcatctgctttgtactagatgatctgtgtaacttgagaaatttgctttttatttatttatgctatggtctttaatcagctattcctcaacattatgtaggactccaaggttgctgtgcttgtcggcacagtgactgatgatatcagggttcatgatgtccctgccatgaaagttacagctctaaggtttactgagactgcaagggccagaattgagaaggctggaggggagtgcctcacattcgatcagcttgctttgagagcaccgcttggccagaacacggtacttgaccactttctaaatcactttgtcttcaatataattgccaaatgttgctgtttctatcaacagtcactctttgaatagaaaaatgttgcattgctagtttcttttttcggttagatcaattaacattgcactagaatgatctgtttaatctattaccattctgtaataagaatctttttcggtgatatctccataggttcttctcagaggtccaaagaactcgcgtgaagcagtgaagcactttggtccagctcctggtgtgcctcacagtcacaccaaaccctatgttcgttccaagggaagaaagtttgagaaggctaggggaaagagaaacagcaggggatttagagtttaagctcagttcagtaattaaaagtcaacttttgtcatttctgactgacagttcaattttgctttgtgttaggatctttcttggttatgtgtgttccattacatgtattttcaatattggttttatgcttgagaatcggtactctagttagtttgattccatccttccattttaaaaaatggcatttcatacattgagttaattttcaattattacatacatcagtagctacgttattgagttaattacaactttatttatttgttattgttagctagaaattttatctcgatcgatagaaattttagaaagattaaataaacaatatgaaacgaaacgaaatttcattgcatattgcgtatagcaaacggatttcatgcattatgtcatgacaggtttccatttgtcgttaatgtgaaataagttattaattattgctgcgttatttatgtgtttcatatatgaacttatcttataaatggttggggatgttgatgccattttttgtcaatttactattaattcaagaaaacaagagatggaaataataaatgaacatttttgtagttaaatttacatattgcgtaattattatttttgaattttggttgtgtttttaatttgatagagttttcataaattaaaattgcctaacccctaattataggaattggatgataattactcaatcctattttagttgatgggtggttaataccatttcatattcaattgaacatttggataaatgtaaataaatgtttatatttaaaatataaaaaagtggcttttgacttggtcaggccatgttgtttatgagcaaatacatagctgagtatgtaatacgacgagatgcatagccgagtgtgtaatacaaggagttacattgttgagcatgtattacgaggagatgcattgctgagtgtgtaatacgaggagatgcaagatctttgtattacgactaggtaaaagttcattgtattacaagatcattatattacgatcatgtacaagatccttgtattatgaccaggtacaagatccttgtattacgatcgggtacaagattcttgtattacaactagctacaagatccttgtattacgagatgttgattgtttattgaaaaacatctcgacaacgctgaaatacctcacttcataaaccttgggatccttatttagatgatgttgcctcataggttaaatccagagtttatttgacctaactgtcccataatatattttttgcgagaattattattaacgccacatggcatacaatttgataggattattaaataataaatagtccaaaaaataggtataatttccccctaagtcactttttgtggtttgcacaaagctggcttattatatgtagccttcctattccttttggtaccagcccaggtagctcgttttataatatatgagttgggtgttacttgttcctgaacacttaaagattgtcacatttattgagcaaaaatgtttaagcaatgaagcttttatcttgtgtatttctcgtgattgatgcatggtggagtaagtattacaactagatgcattgggagtatgtactacgactagattcatgtgagtatgtactacgactaaatgcatgtactacgactaaatgtattaggagtatgtactacgaccaaatgtattgggagtatgttttacgaccagatgcattgagtatatgtaatacgactagatgcattaggagtatgtattactactaaatgcatgacagagtgtgtactgccactagatgcattgggagtatgtactacgatcagatgtgttgggagtaggctcgaccttgggctaaggcgagctaggtccatgcatagggcccactcaaacccaaggcctaaaaaattttatgtagtacgttttttttgcattgaaaaaaatggtatttttgatattttttgtaaaaagaggcccaataacactcacattttactttagataaaacacacactgaacaaatttcttgggcccattattacttagggccaaccctggttgggagtgtgtactatgaccaaatacattgtgaatatgtactatgaccagattgttgagaatattttaccaggatctagatttactaacaagaatgttgattaacatcctaaata

SEQ ID NO: 295896 - DNA, 1110 bp, Cannabis indica
aaaaaacagaaaataataccgaacatgcccttaccctcttggaagtagaacctttgagttttggatttgcacctacatacccagtgagtccaacatagggaaccaaatatgatgccaaaagaaagttaatagaattagcataaggatcaaaagggggcctcagttttctcccaaatgcactatccataacttgtgcaaatgaagatgaactcaaattcaacaatggtcttgggaaccctttcactgtattttgaatagccctgcaaattaatgcaatataaccaaacataatttcttaatcttatttaagtaataagtaattaataagaagttaaatgtataaaagaaagaacctcaagtgtccaacttcttgccacccaaattgtaagatgatatccttagtgagagaatctaaattggcctttttagcaccaataggtggtggaccacctttactcaagtttggagcaactttgtctaagccataacccaatgctccaaacaagaagaactctgcttctaaatattctagatttagaggaaattccaacagatcaacatcagaatttggaacagacccataattatcagaacactcacattttggaattattactactattaggaacattagcaataaggctaaaatattagtggaagtagtagtggccattgttcttcttcttggctctctttgcaaactcctctatatttcttattagtgataatgacactcttctgtgtgtgtatatatataataggtgaagttgtgcatgaaaattgatacatggcaaaataggaggattttttgggacacttgggaaatgagtgcatgagtaggtttaggagagggcagatagtgtgattttattggagtggtgtggactatctcttaggcatctcttaaggtgctttaacaccacaataagtgtcatatctttagttacaattaaatgtggactttcatatatttcaatttaataaataatattaaaaaattcattaactagtgttacattatgtggtattgagcagaaagtattttatgtaagacacaaaacaattgttactgtcaactttctattacaatctcttagtgaaattctgtgt

SEQ ID NO: 295897 - DNA, 2415 bp, Cannabis indica
gtaaaatatatccaacagaaactccatgaagttggccagttcatggtgggcaaaccatgagctggtcaatttgtggcctaagcccttcatgggctggccggttagtacccacgggtattggcctattagcccatgtttttcattcttttctttatttgcgatctccggttgttcacctccctttatttttctgcacagatgaacccgcacgattattggggaggggacaactaaatcaatgaggacttgctccgtaatctgtacgaagactaccgctcagttggttcttcttctaagagcttttcagatagttcttcgagtgactttgaagcgagtagcgattccctagatctggaaattcaacatcaccactgtttggagaaaatgggggtgatatctacgggagattcatttgggaactgaattaagggttaagacagttcctgccagctttgtggacttacattgtccaccagggtgtgcttgacaccctccttgtgaggcatctcctgcacttagagatcttcctacagcagcgactgctgttactattgcccaacactatgagctgtattcaaagatggcacaaacaaagtaacacaataggatgagactacaccttacaagatgcaccaatgcctaaactaccattgcctacttatgtccctgtccctccattccctagtagattgaggaagataaagaaagatgagattgtcagagaaatccttgaggcattctacaaagttgaggtaaatattttgttagttgatgttataagacacgcacctcgctatgtaaaatgtttaaaggaattatgtacgagtaagcaaaagctaaaaggaggtgaaaaagaagtgtgggggagaatgtgtttgagaatccgcaacagaaacttcctcccaaatgtgaagttccaggaagctttatgaccccttgtactatgggggacaagttggttgaaagatgtttgttggacttgggagcttcgataaatgtcacgtcgtattctatttatgctttgttaatttgggccataaaaagaaatgggaataataattcaattggctgatcgatctaatgtctatcctcgtggagtagtggaggatgttcttgttaaggcgaaaaacttagttttcctaactgatttttatgttctagacatggaagatgattctattccatgcacgacgcaggtgttgttaagtagaccattgatgagtacgatgaatatgaaattggatgttaagttaggaacattgatgatgaaatttgatggtgatcaaatgcatttcagtgtatttaaatttgataatctaacatcaacaccaaaggtattgtcaaggtcaagctagcgatgttaaatttagcacaattgtaaattaattttattttgaaattttagtcattttaattttaatttttcttagtttagtttgaattcggttgaattctagctttaatttttgtattggagccacaaaaaatgttaagaaaaaagctccatcagctctcgtcgcgctgagcttaaatgttggctgcggcaagagcccatgatttttgaaaatttcttacacgcacgacgccgcaacaaacctttatcttcggtgcagtgatgtcccaagcacccaagcagtacttacatctagcataggcgtaacgaaccaagaaagcgacacaaacccaacctagcaatttccaaatgcagaaaaaaataagagcaactcttcccaaaacatgtgaagaaagagagttgaaatttcttgccatcaactaaacccgatacctaattttgaacatccatccaaattccaacgccaactcgcacaagctgaaaaaaatttaccagatactaatcgcaccaagaaaagaaaaaaaaagaagaagagagagagagagagattttccagctccgatttacacaccaatcctccctgatacctctcatcttcttcccattcaaaatctaacacaatactccattctcgtccctcctttcttctcccattttttatttttcatttctctttatttttctaatgaaccaagaaaatgccatgggagtcattaaggttcacaattgaaattgatttcgtggcctcaacaatgaagtaatgtaagttgtttttaagtttttgttggattatgttttaccaggatctagatttactaccatgtatgttttttaacatcctcaatatgaatttctaaaacaatgtaatttaaacacatataaagtgtgagaaaccttacattgggtgcagtggaattaaatgactccttccgctcagatctctaacccttgtatcatttctgtagcagagtatcaccaagatttgagcccgattctccttctcttgaattggattcttcacagtcttacacactatgattgagtaccacttgatgtgtgtg

SEQ ID NO: 295898 - DNA, 5315 bp, Cannabis indica
catatcatgatactctcacatggtaatccagaataggcgattgaagaggtgtccgaatgttgtcttacatggcacccctctaataccaaatcccataaaattagggacctacaccagacttgagaaaggcggataacataaaaagctacatatatttttgtccaatgtccactaccatgacatatattgtacactgttgacagcgcatgcccacctgtcactatcaaatggtaccgtacggacgatgagtatctcacaaatcaggcctcacctaatcgacctaatgtcaatataataatgtattttaatctcttagtgggcttagttgtcattatgagaattttatacttagagaaatagaaaatagaagaagataaattaataaaagggtaatttattagttatgatgtttgttgttaagataataaaaatattaaattacgctttatttaataatttagtaattattaaattaaaaagaaataaattagttatgataaaaaaaaaaaaaaaaaaaaaaaaaaaaagaagacactttgtgttgaatgagcattgaagaagtaaagagcaatatccaatagctctgtctatattaaatttcagctatagggattgcttggtgaccaagcaatttgatcttttatttttcttaattatttaattaactaatttcttagaaattaagctcttttcctatatattgtctcatcttttagctataaatttaaggttttgaagaaccgttttttactctattcaatgcacttattattgaagtgaaaattctctccaattccttctatacccgccgcccactctccattttcttccttctctaatttttcatgtagtgtaattgaggaaatatttgcacactattcgacttagtaccttgatctttgtgtaagactatgaagaaagagatagtgttcgcgtttgtttaaagagtagggttcaatacttggtgacactttactatatataagaatcaaagatttgagtactaaacggaacgagatcattaattccgctgccacaactctataagtactctcaatctcaatctcgtaaaataataatacaatcatgatattatttttttcaatataaagttctttggtgaagtattttgtctaacatccttacttttcgtgtgaccttagctactagaattccaatcaatgatctgtggtgtctactttgtggtggtgaggacgagacaacttaacatatttttatgcattataactttgcgtatcagctttgacagtttttgctttgggattttataccaattgggatgtttttgtatgcaccgataaagatgccaattgttaaaaacttacattgtatatacgtgacaggaaattctcaaaattaatgaaaacatgtgagatacatataagtacatataataactatacatttagtatttaatgataaaactttaactgatgctttgaatttataaaaaaaaataaaattaaataagtatggccacacaaagatcaacattaaaatatgctgagtttggctactaattagccattaatttaattcaacattgtcggcaagaaaaattattaaaatgctaaattagattgaaagaaaaaaaaagtctagtctactaattgttccgacttgtttttgataaatttcaatcaaaatcatatccaattaccaaaaaaaaacctatttttcggacaaatactaagtataggagaagaattttattgacgtggtaaaattcaaatggtccattaaaaaaactgcaatggatccaactacagaggataaaacaaatccatcggaacccacactacacatcaaggcagtagcggtggcacgcaggtacaggcgttaggcgtagtcccaacactcaaaaatctcacatccctcgatctctctcttctctctctgctttttctgtcgttcagatctagggtttcatcacaaaacaatgatagagcttctgtacatggtgatcctcaccgaaatggtgctgattctgaccttagttttcaaaacccctttgaggaagctggttctcatggctttggataagattaagcgaggcagaggtcccgtaatggtcaagaccgtcgccatgactgtcttcgttctgctcagcttcagcgtctacagtattgtcaacatccaaaacagcacgatcgaggccggtgccgtcaatccgactgaccaggttcttatggccaggcacatgttggaagcttctctcatgggtaatgattttcccttccttttcaaataatgagcggatttagccttgtatttggttactttttatatgtttctggttttgggggtgtataaatagaaataacaagcttaacctttagtctctgcaacttaatatggctctacacaaagcttagttgcataaggattagaagctcgggagtcatatatgtcttttgggtatcttttcttagttaattttgattttactgcgacaaaagaagtgtagttacgattttaaaaatgcgtttcatcttcgttaacgaggtgatgaaagtacgtgtttgtgtcaacttgtggctttgcaatatagttgtttcattcatggaagagtagatgcctgattgctactcttagccaaatcaacactttctagaggtcgaaaatatggatctcttcgccatgagccatcaactcctactaaatataatagagtgcattgaaattttagagacattttaccattttatgatctatgagggctctttcattgaagattatgttggactgagctgattgattaaatcattgaaatttgttgtcacttttactgatgcatccacttatttgtttctattgaagttttacatggagatgtagtagttgtagtagtgccgcctttcattttcataggaccttgtggtttatccactttgaccttgctgtatgatcttattatataatatatataagcaatcatatggccatagaaaccactttatgttatctagttagagaaaggaacttcatccctgtgttgaattcttgatatgacacaagagaatcacgatcgagaacacccttcattggcatttgttatattgataatagtcattaaagtccttcactatcaatcataagcaatgcatgaggctgcagtaatattgacattttgctttgttgtgatttaaccattcttatgtttgctcaatgttattgcgtactacaggattcatgctattcctctctttgatgattgatagactacatcattacattagagaacttcgattactgaggaagactatggaagctgcaaggaaacaaaaccgaagtcacgaggacgggaaaaatagtagtgcagaggagcttaagacattggaacaagatatggttacactgaggggaaggatcaagaagctggagtctgagtgtgaggcgaaaacaggggaggcaaaggcatctgaagctaaagttgaggcacttagaaaacagtctgaaggattgcttatggaatatgatcacttgttagaggaaaatcaaaaccttcggaaccagctagagtcaattgaccaaaaccctcagcatgataacaaaaagagcatgtgaagaattttcagatggaagtaaacaagaaaagctctttctagcattgtctgagggtatcttagatatgacgttattaaagagagcaataggaaggcagtgattaatctttacaattggctttcgttcaatgtgaatttgtagtcagaatatatgcaatatttggttaaattttcaaatgcaatggttaaaaatatgtatacccattaaacgtagctaactgcggacctccatccttcataagtttaaaatttttccatcctgattgatcattccaaaacttgtctcgtttctcatttcaaggaataggccactagccttggtatccaaatggcatgaacagtgggggtagctaacattgtggcttgtggggtcctaagtgaaggtgatgtggaagagagggaagttgttgtccgggataaataaaacactcttgtcaattgattttttattttttaaaaaaatctgtttggttgaaattaaatggtagggctacttaagcttcttgaggatacgagcattgtagatggcctaacccaataaatcaaaataatcactcaagaagcgtacaattaaaatatggtcttgtctttttatagggtctttttgtctttgttaaactgtggttgtggtttggtgttggttttcttatttttctttatttggttgttatggtttctagtagcctagggatggcagattttgactgtcaatgtactaaactttgtatgtagtacgatgaggaagaggatttggtagcttattatactttggaggccctctaagggggtggacacgagatagtgtttggttggtaagtttttgactgaaggtgcgattgattttgatattaagcagcatcagttggcgtcactatgaaaaccaagtaaatgagttcttctcattaagatgttagagaataacaaatatctatttcaatttaaccatgagattagtattgtcgtcaacttttaatgtaaaaagttgctcatgaaacgattaaacgaaggagagaacccacactctgttgttattgatactttgatctttgatttacgatcaggtttcatgtcaaagtgagtagccaatgatgttggtaatcatcttgaaattttgttgaatatgataagaaccttataagagtttgaagggaattcatacgagtacgagtcactttaaatatcaataaacctctgcctcagaggataaagacacaacaggaaggcaatgattggttttggatttattttaaatatgagcacattccaatattctgttacatttgtagattaatagggcatgctgaaaagttatgtctcgtttatttgaataattaccaatagagaaaattgtaaagccatatggctcgtggatgagagtgcaaagtggttgaggatgggaacaagagaacaatggccgacacaggagagttatttaccaaatatggaacgtttgaatatagtatttgaatcagactttgacggtaatgaattaatggaagaagatgcaaatgccagctacaataattgtggtcttaatatggaaaagtgtggtggataagatggaggaaattcatgagaaaaacgtgggtttataaatacaggaagtcaactgatttaaaaaaatgtttctagaggaaaggatgtcggacaggggattttattaagaggaaattacacttattgtgaaattttaaaagttcttatgttaaatatgacatttttaaattt

SEQ ID NO: 295899 - DNA, 2886 bp, Cannabis indica
attttgaaatgattttaaaattattttaaaaattaaaattagtttgaccaatgaaaacatgtgtacaacatatttctttatcattttcattcatatataaagataattgatttaaaagtgttttattttgttatcttaattattgtgcaagattttcaaaaaagaaaaatgcattttttgcttatttccacgttgaaatcaagattgttcgatatgttttttttttttttcttaagatgataaaatattcaaattttggactacacgtgaaaagaaaattaaggtgcacttttattattttttttttattttacataaggcttattttagtaaataggaaggggtataaaataacttgttgcactttcgagaaagatgtgtaaccatctagtgagcctattagacgaagaaatatacgggtcaagttaataaactagattcctgtgcctaagagttatggatccttgtgcctctttggacggaaaggtcccgagccttcttttggggtacaaaggacaagaatatttacagattggtgtatcttttccatactcaagaagtcacgtaatgtcagtgtttgttcgataattggccttggtaatgtggacataatttttaacacgtggcaagaaggtaaatacttagggagtctcacgttcctaatcatagtagtcaacctcaggaacggattcctagcctaacgcccaggttgacatggggaactcccgagtgggtatttagatcctgtcaaattgtttccaagtcacctgaaccgacatgacaagaagaattcgagtcatggatctagaagctgagaatgtcaagttgacatcccaaatgccaacctagcacctagtgtttcactcaattcgcaagttaacattttggacaagggtttcagtttcagacctcatcttcgtgcatactactcaacaattgcacttagacacgtgaaagacttgccacaagcatgccaaatgccccataatcaactttggaacactttcaacatggagcaccaaagcacacaacacctaggttgacattttcaatcaacttggggttaaccttggcaacacgacaacttgggtttaactttttcaagagtctttgcctctcgacacctcacatccacaaggaacgactctaggacttgagtttttgcaacttgtgcacatgaggggaaggggacaaaccttggacctagcgcccacgttgacatattgccaacctagggcgcttctaaccacttttcttgaagatgttttttaggtattttctttgtcttcatccaaaatggagatacaagagctttcgagaaacaaacagagccatctggtagctagaacactaatccaacccccaagttgacattagggcttggcaccggcgcccaaattgacatcttgtcaacctgggccacttctaatgacttttcttgagttgtctcccgggcatattcttcgtttttatcagtaacgaagatacaagcaattttgcaaagcaaacaagattatttagatgccagaagccctagccagcgcccaggttgacattcaacctggtgtatatggtttcattactcaaacaccaattttgttccaagcattcttcatattttggtcccaaacgggggaggagatctcgtgtcctgactaaaatatcatcaaagtaccaaaaaatgactcccgaagagtcataaagtaagcactcagcacccaggttgatgtttaacctgacgcgggtggtttcgatcctccaaattcagtccttttgacgaatatatgctagttcttcattgcaaacaaggtgtagcacttgtggcaagtcaaattcatactttaatatttcaccttttcagcaaagtggaatatcgataaactagtcacaaattgggtagttttgagtctcacaatttcgcgtaatagcaaaaccttcgaaaattggtgaacgactttaccagacccaaaaaattagctaagcgatgttttcatatcacttagactttgaaaaatatttcaacacgaatttctaagtacccaacacctaggttcacgttgggcaacttctcaatcgtaggattgtcaatcaaggcgccgactagtgaggattccgtagtaaaatagtcataactcgctcaatactactctgattgatgtgattccaagtgtattggaaagctcttttgaagatctttgtatgcatgcctcacactcatatctcaattctaaattttgtaagtcaaaaaattgctcccaagttgaagtgcgattttagccgcaaataacctgaaaatgatccaacagacacgattcaatctcaaaaattgacgatcatcattcgaagtaaaatttgagcatcttaaccattggatcacaatcaatggttaaaattactctagatggaatattcccgaaatattttattttgtattattttaatagacattcttgtccataaaaggagagctccactaggtcattttttacattcataaaagtctccataaggtcagggcatcttttgtagaactcgagatctcttcctttcttgtcattctcgtgagaaataaaaacttgaagtagacatagtgtttggattttatgccctaaataaaactcattttaatataaccttatatactataaatagaagattagaaatcatttaggcttacatgtaattttcatgattatggttttaatatacaaattctattaaatcttgaacatatagttactcacaattacactgatgtcatcacaatggaaagtaattgtgattatatttttcaaactatttagtcccatgatttatcagtgcactgaatttacacggacatgataatcaacgataaagtttacttacacaatgatatgtggaatg

SEQ ID NO: 295900 - DNA, 3358 bp, Cannabis indica
aatctctacaataaaattagatatcttaaccatttttatttggaaaagaattattacatatttttcgagtctatccaaaaccatgatttatttcgaaatataaaaagaaaacaagatattcttttacaatagaagaaagaaactaagaaattcatatgtaagatttttttttttcattaattcatgatatgttctttcctttttagtgaataaatcaaatctcattaattttccataccataaaattgatctcaagaacaacaaaatgccaaaaataataaaaaaaataacttcattcttaaaataataaggatattgagagataataaaggtttgatttgaccaaaacaataagggcaaattagtaacttcagacactaacacgatccacactttctctttatacatcgttctcagtgggcccatccaacttttagggccgtcccataattttatttttatttgaccattattcagacagtctttttatttatttatttttaaaaatttcacataaatatttcaaacttgtcacctaacaaattcttgaccgtacgtcaccattctctaatccaatccaagccgtttaattttaattcaatattagccacacgatcgttaaaatccaacggctgagagagaattactagaaccttctcatttccttcctcctatattatcccaaccaagtcatccattttcattcgcaaaagcttcgaaccgagcttgtggtctcctcgtgccagtccagttctctgttagggtttcaatcctattcaatctctccactcaattttttttgctcaggttagttagttactccttcgatcgatgtttttcatttcataagcttgattttgatgttgattttcttcgatctgagtttttttttttttgatgcagagttgtgatcatggcgaaatgctatccagttgttagtgaagagtacaagaaggctgttgacaaggcgaagaagaagcttagaggactcatcgctgagaagaacattgctcctctcattcttcgtctcgcgtacgtttatttaaatctttgtttgtgtttgtagtgtgaatgtgttttgtttatgaggtttatggtgagattcctttgtgttgttctttagatggcattctgctggaacttttgatgtgaaaaccaagaccggtggtcctttcggaaccatgaagaacccggctgagcttgctcacgctgccaacaatggtcttgatattgctgttaggcttttggagccaatcaaggaacagttccccattctttcttacgctgatttctatcaggtattgaaatcactaccagtcgaatattcataatcttaaaaacatcgtcgttagatctatctgattttcatgtttctttttggcttatttggttttcgttggaaatttagttggccggtgttgtcgctgttgaagtcaccggtggacctgaagttcctttccacccaggaagacaggtctgtatttcaaattttcttttttacttttttaaaaaatattattaataattaattatacgatttagaattaatgtttcgttcgatttttttttgtctttaccacttttcctatttgagtgagtgtaatgttttcagtttgctcattctattacttttggttggattttaagaaatgttggaagaatttgatatattttgttttatttctaattgggtaaaattcatgtaattattagctctttcaatgttgtattccctttatttcattctcgtaattgtacttgacatttcgtttgcgttgttaaatttataacattgtttttctaaatgtcttggttttacttttagtgtgaattcatttacactgtttggaaatttagatattatttgttagctctttttctacttctgcatcattctttactgatatttagattctttttgatctcaggacaagcctgagcctccaccagaaggccgtcttcctgatgccaccaagggtaactatatacctctaaacatccaattcttatttcgtatattacatttacaagactacatgaagtgtagaattgatttggtgctcatattatactttggttttttcaggttctgaccatttgcgtcaagtttttggcacaatgggcctcagtgacgtggacattgttgctctttctggtggacacaccctggtttgttcccgctcatcctttggatacactttttgttttaactttgttttggctgacctattttatctctttttcagggaagagcacacaaggagcgttctgggttcgagggaccctggactaccaatcctctcatcttcgacaacacctactttacgtatgttccctttcttcagtaactaaaaaatgtagcattggttttggggataattacttaatagctgttcaaatcttgtatcagtgaactcttgaatggtgagcaggaaggccttctacagcttccatcagacaaggctcttctttcagaccctgtcttccgccctcttgttgagaaatatgctgcggtgtgtattatttacatagccacagtgaacttttctattatgttttcaatcttaagtgactcaattgtttattataatcctcaggatgaagattgcttctttgctgattattccgtagctcatcagaagctctccgagctagggtaagtttcttcactatttctaagttgatttcgtgtaaacaatacttcactgttaagctaaccattactctttttttttttgtggggtttagatttgccgacgcctaagcaagttgggtcatgtcatcaaggatgttgccattgtcttcattttaatgggagttaattttcttttttccaaatagatgcagttgttttgactgttggttaaaaaaaagggaaattagaaggctctttatttttgggttttgttgttgaactaaaagatatttgtgtatgccgcagtggctatcatccttttgattaaataactatgtttcttcttctttggatataataatgttccacttttccatagcgcaatttcttcttttgtgtattttgaatatatgtttgttagttgttactatggtaggactgcctggttgggctttcgtaaaaggctcacggaaacaattaccaatatgatatcgattgggtttgggtcttaggttttgcatttcagattggttgtgctagtattttatattggtctgggcttctttttattgaatgttgggcctgtaataacatttccataatgtgcttcacttttaatagaggaaattgtactctataccctttttatattgtcctcttttatttttaccttcttttttaaaatctatcatttttacctctttttttaaacattataccaat

SEQ ID NO: 295901 - DNA, 1629 bp, Cannabis indica
cgtatattttaaagaccaaaatcaatattgtcgaaagttcagggaaccaaattgctaattattcaataacaaatttaaatcacccacaaacttggcaagtatacagctcatggaacagaaaggattggtaagactataacttaggttggattgaactgtattaggttatgccctactatcctacattacgcgatgatatgttgtactacgaggttggatatagatttgtatactaataaatgtttatttaagttataatataatgttaagttttgggggaaaaatattttgttcaaaattcagtattaatgtaataaatatattaaattttaaacttactcaatataaccataaacttaagtaactcttacaattttaattaatatttataataacttgggaaggataatacatcacttatgaatgagtttggagtatacacaaataatagataccaatgatagttcttataaaaacaaaagagacatatttattataaaaacatgttaaatactaaaaaaaagatatataaattgtcaatgagctgtcaagttggaaaaaaaggagagagataaaaagaagtggcatcaaatttactttagcggaaaaagatttacaactagggtaatttaataagaaaatcacacaagcaatttcctgaagattcatgagcaatagtgaattgaaatattaagaactaaaaaataatgctatagtgaacaagagaaacatgctaacctgaatgacgcacaatatatcaggaagttgatttttcgactcatcaacagggcctgcatgtcaaattagtaaaagtctagccacaatataaatgatgtaagaaaaagtttgcatgcaagaaaaagcatttcccaaagaaataaaatataccaagcaatacaaacaagtggtgagctggagcatctgccataagctgcaggtcatttggagagtttttgtagtgcgaggaaacatacaaggccatcatccgctgtagatattgcatcacataagcaacaatatcaacaacccccccccccccccaaccccaccacacacacacacacacaaacaattaaaaagcaccatttataaaatgatttgtattttttgtgtgtgtgtgacagaagcaatgaagagaaataaacttttacctgcaagaataactcgctctctttatggaaagaaaaaagtgtatcacggttaacataatagagctcacacttacttggatgaggtaacctagtagcaaaaaggaagttgtgaattagtcaagtgaaagtagttttaacctcctagaggctttaaaagacttatccttacccactaagtttaggaacagaatttgtagcatccaagcaaagtaaaccatgaagccatgattctattgggtccccagatgcgtatctgatcgattcgctcaactctatctttttgaaaagacggcctacaataaaagattttgaattaagagagagagagagagagagagagagagagagagagtattgctacactctattcttttagaaacgacgcctaacaataaagtatttagaattaagagagagagagagagagagagagagagagagagagagagagagagagagagagagagagagagacgag

SEQ ID NO: 295902 - DNA, 2054 bp, Cannabis indica
ctgctacaagaatattgagtgagcactggtaaatcttgtcatttgtggttgttcaactcatcaactcaatatttgtggttcttcttcagttatatgataacaaacatttcatttcaatatgtttttctaacttagtattttatattgtaattcaatgatcaccagacattggtattgataattatgttaagcattgctttgaaggtgggtggaaggtgatgcccttgatttgccatttcctgatggttactttgatgctattactatgggttatggtcttcgaaatgtagtcgataagcggaaagctttgcaggagatgtatagagtgctaaaagcaggtagcttaaatttgctaacctccctcttttgaaagtaggattattttaagtttattgttttttctgtacttttcaggctctagaatatctgttcttgactttaataagagcaccctaccagttactaccttcattcaggtattaaagaaaagcacaagctgtctatattgtaaatgactagtcactatgcttcatcttgctgcatagttgatttgattttaaatctgtgctctgcctatcaaatgtcattagcaagactattttgcatctgttgcttacataagatcttgaaaggtttgaatgtttttctctttgctaggaatggatgatcgataatgttgtcgtcccagttgcaactagtaatgggcttgaagaggagtatagatatttgaaaagttcaatcagagaattcttaacaggtcttgttttctcttagtagcttatcatcatggttttctattttaattaaattgagcctgtggtcactattggtatttctcttaaaaattcatttactgcttcatggacaacacatgtactagaatagtcaaaaattgggttcttatgttcaggtaaggaattggagaggctggcattggaagtaggtttctctgaagggagacattacgagattggcggaggccttatgggagacttagtagcaaaacgttgagttcatgcttttcatagaagtatgtcatttctcaaaatgtgagacaagattataaaaaaatgataataaataaatttgtaacaattctactcacattttatttgttatatgcatcttattcttttgtgtactggttgaaaaattgaaacttcttattgtttgtgaactcactagacaatacaaccgtaatggagtaacccaaaatctttacaaattgtacactttcacagtccatctacttcctcaaatctattcaaaaacatgaaaatgtggttctatgtggttcatctacgctcatatgtatatgtacaaatctatagttgcccttttttcacttcattttcaaaaaatttaccatcaaaagatggttagcaaaatctttgtactagtctgaagtgagaacaggttgaaatcttgggaatcaggactcaccaaagagaagagttctgtctttgagcacatgccattatctcggatagaaagaactatgagtaacatcagcaatagagccatcatcgtccgcattgagagggtaagacgggtcctcgtacttgtcattgagttccatcgtcttttcatcgacgaaaggtggagtggtgggaggaggaagatgctcctccttattagttagcatccgcagtgcctttgacattgttggtctcaatgaggcactctcttgggtacacagaagtccaacatgaaccactctacatatttggtttttcattgcctgattgtctctatagttatgtaacatcaggttgggatcataaaggtcctcaactctcccagattggaaatgcttccatgtctgtttcggccaagtacaaaaaaacatatcagatgaaactaagtgtcaacaattcacatttttgtctcaccaatttagaggggaaatttgattttctatacttaaaaagctaaaatattttattcttaaactaatacctttaaaactaacaaaaatatgacacttttttcaaaaaaaaaaaatacccctcaaactctcactgcatctctctttctctctctatctcggcatt

SEQ ID NO: 295903 - DNA, 1554 bp, Cannabis indica
aaacaactgaattaactctaatagactccgtaataaaaataacgtcatgtttattttgagagatgagcaaacaaagttgacaaaatattcttggattgctcaagccccgagcattccaactaacaacaatcatggtgatttgtgaggctgaacatcaaccttcgccaaagaagcaccattgccaacatccgatagtgaaatatgtgccatttcaaaggaaggaattggatcttggtgcaacataatatttgttgtttccgtcagtggagtgatttgccgattggagaacaaagatgacaacctgttttcattagctgattcaaagttaggttctaaaccagtagctagtgtgtgagcagccaaacagttatgtgggagagtagtgacagttgtagacattatagaaataactctatctttctgggatggggaactgttatcatgtgagggggagagatgaatgaatgctggaggagtagccattgacaggaagattgacttactaggcgaaccaggttttatttgattctctttttcttggtggcagctagaagaatttgcagttgtagtgacatgtgctgacattataaaataagcctccaagtaggttagtggagaggaaatggatcccttgctgtaatgtttgtcaatgtcaacattaagggaatatgtagcagcagttgggcagtatggatctgagaaattggaagtttaccacttttcttagagagagtatcacttaaacactgaacaattttctttccattttttcatgatttgtgattagtggtggcaatgcaggaggcggccttgagtgaggaatgattggagaaattgtgttgcatgcaaggggagtaataaaaggccacaaacctgcctttgaaaaatcatgtctatagcaatcgtaactcgattttagtaatgtcgagccttccatccatggcccataaggaagatcaggttctcttccctcatctagtttctctaaaaatatagggcatttatcaaagacatgtcctacaactccacactcataacaaaaatctggaagcctttcataacgatattcaagccacaactcatcaaccatccaagaaaaagtaatcatctatccacaaagcaaaggttttgacacatcaattccaacacgaactcggagaaagggcccccatcctttgttaagagaatcctcacaaacctctagaaaagtgccaattaaatttccaataactcgagcaagagactcagatttgctcaaaaatggtagacgaaaaacttgaacccaaaaaggagtaatggtgacagaattaaaaggagtattctgcagaatacttggtaggcataaaatcatatgttgattatgaaagtgccaaggttcctttgacaacatcctccttaaattgccttcacagctacaggtaaccatgagagaatccaattcatatgaagatacagtaacttcaaatcgacctctccattgggtagtgataaagttatttctgatctataatcatatgaagatacagtaacttcaaatcgacctctccattgggt

SEQ ID NO: 295904 - DNA, 1891 bp, Cannabis indica
ccggttttttaaataccttttatcccactggcatacatcccggttttcatattagcaaaaaccgggataaaaagccttaaaaaccgggataaaaggcctttccttgtagtagtggagtagcagaaaccgtgtgatccaaatctcctctatcagaattctgagaaaattcccaaaatctcctacgaacggagtccaacaattccttgacatttgtatccttttcatcagaattgggccatagagcattcctcttactccaaattgtgtctataataaccgccatgcaaagaagaaatctggttctttgagcacattcaagattcaaacccatcccaagtacaaacgtctttaaagattctgtgtggactacattggtacagagaggaacaggggatccgaaccataaaccagaagcaagagtgcacttcacaaacagatgcagggtattttcatcatagtgcgaacaaaagcaacagttattaaagggaagacccgccttacctcccaaaggaagagcacctgacaaagctctccaaagagtcattctcattctcgggtgaagctctccatgccaaatccacttccacaagggatcaattgaaccaaatcgccctccctgatgcagcaaataggcttctttaactgagaaattcccattattagcttgcttccaaataaggaggtcctcattaaggtcagtagcaatttggatagtactgatcttaattcccaattcatctccaaagagaaaacatagatgttcagaattccaatgtcttgttcttcgaaatagaaggtccgccacagaccgaaggcccggggctttctctcgaattgactccatcagatcacgaaattcaaagtatgtcaaccatggaatccaaggttggaaccagatatcgatctactcccccgatgcaatgatagtacaggaacccgaaagaatgatctgtctcgcattgaggatgcctttccacacaaaggaatctagggttgatgaacacgggttatatataatcgtgatcaatatcaaataatagtttgcttttgaattacaaaatgcatgattgcatggactatataccttgaccgccttgtaaagattttgttcctcgtcgcataactttttaagtgtaacacaatgagctccaagcctgcattgttcactaaaatcaacagaatctttggtaagtgaccttgatgatcgactccatgacaatccactaaacacctttgcaggattggtacctttccctgtaaagaaccagtagttagtaatgcaaacaaaagaaagttaatctatattgttgcttcagcatataaagaaatttgaatatacaagaatgataaagaagccaattttgaaagcaataactatctagaaaatacagatgtaggctataacaaaaacaaagcatatagttcttttaagtacagcatggtagaaataattctaccaatcaattgtgaaaaaaaaaacaagtatttatatttataggaggtattgggagttttctcaggacgttgatggtgttgttacgggtcctgttgtggcggccgcgcctcctttgcaggagatggtcatcccaagggaaacttgcattatcaatttgttaatgcttcttttaaggaaggtagggttggtgttgccttattggcgtggaatcgtgatactatggagtggttcattaaggctaaggccactactagaaaattggattttagtgacacacattaagtaactttaaaagtgtatagtggcacttcaacgcgcgtcactaatgaggctggctggaaagggagtttttagtgacactccatacgtgtcactgaaaccttttccattcattttctgctcgtcactataggcgtatagtgtcaggttttgtca

SEQ ID NO: 295905 - DNA, 3321 bp, Cannabis indica
ataaaacaacagtagaacacaaaacagaacagctaaaaacaacagtagaacaactaaaaaataacggcaaaaacttaacacagtacacaacataaaacttatacagtatttttgaaaaaaatttccccccacagtataaaagtaaaaaaaattgaaaatttcaggtgtaattatccattttttttttccaaacttttactataaaaatgaactgggcccagctctgtcccattttaactagtatatatcattccaaacccggttgcggctctcaaatccaagtctcttggcggcccaaaagagagcccaatggactcgtcttcttcctcatccgctgccgaatctaacaccaccgccggagccaccacttcgccgcttctcctcggcgctcttataagtatagacagcaaagtctcgttccatctccacactctctgccgcccattccttcctcatttcatcctcctcctcctcgagctctcagccgattttcgattcttcttccccatctccctctccctcctcccggctcgccagctccgaccatttctcatccccttcctcctcggcctcgtccttgacctcgccctcgtcggtctcatcaaggtcatcgtccgccgttcccgccctcactacaaccccaccatgaacgtcgctatttcggtcgatcacttctcttttcccagcggccattcttctagggttttctttgttgcatcccttgttcacctctccgcctccgtcttcgtcgatgctctcaccgccgagggcaaggtcgtaaatttgctcattgcgtttgtttgggtctgggcagtggccacttctgcgtctagggtcttgctcggacggcatttcgttgttgatgtatttgcaggggctcttttgggtattcttgaaggtctcttcgctttcaattttctgaagattgagaaattcgtatgaggtaacaaatcttcatagcatttcttccatttgtggaaaagtttgattttttatgaatatcaactgatatcaaaagcactgcatctgttaacagcaattgtattgtatgtactaatttgttaagttcctgatctgtaatcttaatcattgatcattgtatggaagatccaatcattattttgagatacagtacatacagtctttcataggggaattagcaatgtacaagttcattttgaataattgtttcatcaagctaaatgaagctcattctgagtttgatatttgttcctgcatttgttgaatgattagtgtgaacaaattttgaccatggaatagtgtggactgctactatcgtgtcactagattattgtgtactaatttatcattctatatgtttaagctaaattagtttaattgagtgaaacaacttctgcaattacgtttgtttatggatagtgatattctaacagaagtattagtcattgctagaaattatggaagtatcatttttttgtttgacctggtctcactcatctctaatattggctatagaattggaaagcctaatatgagttatagatttggttggaaatcttacttgggcaattattggtgctttgtggcttgtaaatgtggaacctaatatgaaataggagaatgtcaaaaaaaaaaaaatatatgaattaggagtagcccatgaatcctaatgttacagtgtttgacaagaaacaatcaactgtattgagattttatctttggtacttgcaaaagagataaaggcctagagttcaaaattgagttttctgataataacctatctaataatagatcttactttatggaacacagctagtttaaacatgtcataacttcctgtctttgcatgtgccattgccagtttgggtgagctatctttgttatgttcttccctaagttagaaggtgtttacatcaacacaaaagtgaattagatatttttactattgttattcctaggttatgtgagaaatccatcattttctgcgaccgataattgggcaggggtgaactcggattttcccttcaagaaacatataaattgattttggtctctttaggcaccttcaccttgcagatgtagttgtatccagtttccttctctctcataacgaaaaaccttatcgctaggtagcttaaacagtgagaggattgtggttgacatatcattgttgtacctttcatatccccaaattttctatagctgtgcggggaacctggttttctttgaatcaaaaattgttatgacttgctgatgtttcagtaccttgatgggaaatgtgtacaaaccaggacgagggagaagtttagattccttttactttgtaaaattttttgagtggagcattatggattttatgctaaggtttgaagcctcttcacttaggtctcatagtcgacatcattattcttatcaatgctggctttattattcacatgggctaatcttggagtgctgtagctgaaaagtgagatgaaggtcgggcagcacatgcttttacaacttttactgtgttttgaaaattcatttacattgtagttgatgccattggttccttccccaccactcctccttttgttgaccctgagaatggttctccttctttgggtacactgttgtccaattatttaacaccaaattctcacccctatgagacctacaaattacttgtagtctctaggtgaagaaaaaagaaacatcttcacatttgattttttctactaatgtacagtataatatatgcttccatcataattaggaatttaggagacatgtttgataactagtgtataagatatccttcaatattgtatcgttggctataccatcgatacaaatctttaatgcaccttttaaagcaattataagtgtcccctctgtagctttcactttaaaagcttgcatgtcacgtaggagattcaacctcatctcccacaatagtatctttgaccttaacattagcagcaactatggagttccaagaaacagcatcccttaaataagcttctttaaacatttgtatccattacaaatacggatagcccatattggaatgacgcttcttgtgtaagctctaatcatagtgttagatacgaatggattgttgtgcttgtgagtaggggtgttcatcaaaccgctctaaccgtctgcaccgcaaaaaaaatggggtttgaaattctttgtggtgtggtcgcggtttaaatttttcctaaaccgcacggtgtggtgtgatttgcggttttgaattgttaatatgcggttcaaaccgcaccgcaccgcacattataaaaataccaattttatatttatttaggtccaatatgtgaatgtccaatccaa

SEQ ID NO: 295906 - DNA, 4086 bp, Cannabis indica
aaaggtcttgagtttgaactcttgacctctcttttttatttacaaaattatctctttagtaaaacgataaactgttttttgtagttgttttatagtttatttatagttgtagtgagattgatttctatttgtttttagttattttttaaaaaaattataagaaaagtgtatttttaatgattttaaaactttataaacgtatttttgttaataaaaactttatgccgtaaaattataaataaaattaaaaaataatatttttggaaattcctgttgttttaattccaaggattctttttgatgtcttccgttctttgtactagggtattgtatcagaagatactcaactctataaagtgatgggagtactttctcttgttgggcttgtggtcagttttttttctacatcctttcaattaatttatttttgagttaattgttacaactttatagactgatttgtatggtggattgtattcataggctgtggtcatattcttctctttaggattgggacctattccttgggttattatgtctgaggtatgcaagttttattttgtcaactattttaatgcttcttttataatgttcaatgctttgttatgataaaattgaaaatgtttatttgagatattttgttaggaagatgactccgaatactttcttaacctttaaaactgtattatcagattcttccagtgaatattaagggtcttgctggcagtatagcaacaatggcaaattggctcacatcttgggttatcacaatgacagcaaacctactcttgaattggagtagcggaggtcctctcttcctctttatttttatcttttttgtttttcctttttgtacattttatatatttatatatagtaggaaaattctaccactattttggtatttgagagaattttttagtctattttttttatagtcctatatgttgtagttatttaagacatccagtaaaattttaagaaattcgaaaaaaaattaacatgactgttgcactcatgattcttttattttatacgcgtgtgaaatagactatttaaaaactgttttatacattataaattttttcgaatttttcaaaattttgtaggatgtcttaaataactaaaatgtatactggctataaaaaaaaacaagtgtcccttcggggacatccgataaaaaaaacaagtagactaaaagattctcttgaatgctgaaacagattgatgacacatcgatacattctttttacgggtgcattgtgaaagtaccttatataaaatatgttacattaacttatgtggtgattttgttaaaatatgaacagggaccttcacaatctacaccttagtgtctgcttttactgttgtttttgcgtcgctttgggtcccagaaaccaagggaagaacactagaagaaatccagcagtctttcagataattgtactttttcttaagtcctttcttttttgtatggtggcttgatcggttctgaagtgtttttgttagtgtcattcttataaatatatgtgtgtttcatgtagaggtgattgatttttgttacgaaatgtgtcattagagaacaagtaaaggaaatattcattcaaatttttaataaatgtgcaatattcttcaatccttaccctctattcaaatgtttttgttctttctttaaccaacactcaactttcaaatttttgtttatgttttagatcttaatcttactgttggagaggtgtgagtttaattatttgttcttgaagttttactcttatgtattagtatgattatcttttgctgaattcgagttgtaatgcatgccttcaattttctcttttcgattctttatggaatgttggtgccatggttgtggctattgccagtagtccgattgcagaatacattgggcctaaaagcctaaaagggtatgctctgtttctcggtttttatactcttttcataatgactgaaaactcttttctgtagattttagcttagtttaatttatcaagaaatgttatagataaccaaaattgaaaaatgaatctctacctatacttattttacccttcaatctgggagtgatgttcgaaaaaaaaaaaacaaaaatctgggagtgggagtgagattatgtattactaacttataattttttttttataaggaaatgactttcattaatcaaacaagcaatgcaaactgaatggtacaaaaccgaaccaagaacagattctaaaaaggcagctccaccagtccaaaaaaaaagatattacataaataatttcctcaagtaatctctctcactcttagtatacttcctgttttttataacttgtaatctataagttgctgtaaattttatatctttaattataagagaaactgatatagaataatcttaaaaaatacagtggtttctgttgagctaaatacggtagcaaacaacaactaaaactgctatgttaacacgctaaaccaacttcaaatcagttgttgacagccaagttttccatccttcaaagtccataggccaaattctaaaacccaaccaaacaaataataactccaccactctccgagaaaaatcacaagagaagaaaagatgttcatgagattctaatttgtctccacacattgggcaactgagagactctaaataaatgtgaaaattatctatcttatcattggttagcagctggttgttagtatttatagataagaaatgtggatcccgaagtctgtggctataaatgttaagttattaagttagttatgatttaacaaacttatcaaactcctcgtaacaatatctccacattcaacagaaaaaaaacgtacttctaaatgagacgtacacttcttagaagacaaatcgaagtgtaagctgaagagacttcccagataggataagcgacaactggagtcgactattcgaaactcccttccaggaaggaacaactagccatccgaaacttctttccaaaggaagactagctttcttgaagactccttcaggaatggacaagataaattttcgggaacgccctttcggactacatctatcattccacgagacttcttctggatgtacaaattagacttccaagaacgctattttggatgtcatctaactttccataaccagaataacttttaaagatctttacatttagaggactataccacaagtaattttttttaagaaaaaataattaaaaataatatttgaagtttttgttagagtaaaagaatgtaaaattagaatgagaaatttatatacaagataactttgttgaagtcactcctaataaacatggattactttgtccacgatattatatttgctataaaatttatatcaccataaatttataatttcattattcacttttaggtcctttttattattttattagtctatatgcttttttattattattttatatattaaaattaataataaagttatgtatattttttaagaaaatattaaattttgtattacaattatatattgaaacatatataatactaaaattgatgcaaatatattaatatttttcttcgccaaatataaaataatgtttacgtctttccattacttgttgtgtttgcaaacacattttttccataatgtgttagctaattctcattttttagatgacataaaattaaaaaaaaaaattaaaaaaatctctgaattttttctcttttttccaaatatatttataattttgcactataataaatattgatctatttacattctacattgtacagtctatacaccaccaattcccaccctgctacaaatctagctactctgaaataattggtgtagtactcttgagtatgtgccatgttaaaaaaagaagcaaaaaaaaccacaaaaggatcatcagttttagtttacttttttttattggtatttatgtgatatgcaaaagttgtaaagataatattcattcatatatctcttatatttaatgaggttatttaataaaaattattagtttaatattttttttattaaagttaacggttaaaaataataccgttaaatcaattaattaattatttttttaa

SEQ ID NO: 295907 - DNA, 2507 bp, Cannabis indica
aaaaaaaatggtataattttaaaaggtaaatattttttttgggcccctgggataggtgggccctaggcacaggcctagcccgcctatgcccagggccgggcctgcccttagggaagttctatttacacttcataaatttataaatactcccattattaaaaaaaaaaatataaccttaaataattttttaaaaagtattcctaatcagacatatcaaaggtccggttaaaagtggaggagaagagaggaggtccggttcaaactcatcaaaggtcttcttttcactctccaacaaatcattcccttggttaatcgatgaaacatttaccccagggagattcaatttccattaatcagagaaaagatattgctggcagtccctcctctaagaacaatcatgaagacaataatggagaaaggatgattccattgatcaatactggaagtcccatattaacacaagaagataagggtaagtccatcattacagaagccactggatgtaatttaaaaggtcaacatctttattctaaagagaatggtaatcttgggagccgattgaatatgacaaagatgaatgaaagtagctatgaagcccaaagaagtggtatatggagtaaggtggagccgaacattactgggaataagcataaattatctgaaacagcagttctttcaactgatcaacaatctttgcttgttataccacaattgaatcaagaatatctttttgatgtgcctattgaatttgttaataaccaggaagttttcaagaggcaggaagggcaatccaaacgaagaaaagtggtacctaaaagaaacaagaataaagaataagaagggaaattgctatattgagacaactttgagggactctgcagtggaagggacgacggaggatgctaaggaaatttcagttattaatgatttgaccttagcaatgaacattgaagcggcgcactcagcaaggctgggtcgccgagagccatgaatgccttattttggaatgtccaaggacttgggaacccttggactctaaactctcttaaatcccacgttaaggattatcatcccgggatgatattcttgtctgaaacttggctaactagtgctcgtatggagtttgttcaaattcaacttggttttgatggctgttttacagtggatgctaagggcaaaagtggtggcttggctctactttggtcccatgattatagagttcagataaagtcatttacgatctctcacattgacacccttgttgaaaataatctcggttttacttggagattcacaggcttttatggcagccctgatccgggaggaagagtggaaagttggaagcttttaaatcgcctcaaaaacatgttctatggtgcgtgggtttgcggtggagactttaacgagatcacaaacagcaaagagaaacaaggaggaggccccaaaccagattatttaatgaagaactttcgattggccatatctaattgtctccttaaagaaataaaaactgatgatgatgggttcacttggtgcaatggtcggacagcgaacttagtttttgaaaaacttgatcgaattctttgcaactcggattggaataagaaattcaaaaagaacaaggtgacactcctaaattggtggaattcggatcatagacccttccttttacaagctcactttgagaataaagatgaggctttcactaaaaaatggggcactggattccatttcgaacaagcatgggctgaaactgaagaatgccacaagattattgaggaggtttggagggaagcggatacaattcagccgatcacaaagcttactcgaaagattaataggtgtggtgagaaacttaaatcctggaatactcagtagaaaaaagtctcggctgctagaactaaagatataaaagatcaacttggaagcttagcaaattcagttaaagtggaagattggatagttaaaaaccgtcttgaacaagacctcaattgtttggaagcaaaacgtgaaatgtattggaagcaacgaagtcgggcactttggttaaaacacggggataaaaataccaagtactttcactttaaagcttctaatagacgaaagaagaatacacactactacaaaaagggctattcccaacggtttataactgtcttttatatgatttcccaacagttcctaaaaccgttggctatgtggctgtcataaaaatgcggaattttaaatgacagtttataactgtggcaaaaagttactttaaatgacggttaagaaatgttggaaaaagtcactttaaatgacggtttataactgtggggaaagaattccgtgatggaaaacatctctttaaatgacggtttataactgtggcaaaaagtaactttaaatgacagttaagaaatgttggaaaagactttattcagactataactaacaaaatacactacttaaaatgacggttataaaccgtcagataatatgaagtaaagtataaaatagaaata

SEQ ID NO: 295908 - DNA, 2234 bp, Cannabis indica
ggttttacatgaggaagtgtgtggagattgcaagaaaggctatcgggtgtaccagtcccaatcccttggtgggttgtgttattgtcaaggatggaaaaattgttggtcaagggtttcatcctaaagctggccagcctcatgctgaggtaaatttcacttataataaaactctgtgaattagttatattaaagtcatattagtgttgtattgttacaaaagtagtaaaatggtatcaggagatttgactagatttaattgactctaaggggtttgttaaattctttgatttctaggtgtttttaatactgaaaagccttatttctgttggtaaagctatggctttctgggcatatatttactaagttggcatgaaaaactgaagcttttgatgctgtgaaaatcccaagtagcccatttgatcttcaattattaaagctaaagcttatgcttatagaactagtggcttttcggtcaagtagcttttctaatgctgagttagggggcatgcatgttctataggtatttgctcttagagatgctaaagattcgactgagaatgcaacagcgtatgtaagcttagaaccgtgtaaccactttggaagaactccaccgtgtactgaggctctcattaaagccaaagtgaaaagggttgtgattggaatggtagatccaaatccacttgtagcatcgaaaggggttgagagactcagaaatgctgggattgaagttactgtagggatcgaagaagagctatgcaagagcttgaatgagccttttgtccacctaatgctcactgggaagcctttcgtcacgcttaggtaaataaattaattgctacttttgatactttcagttaactgatctacaaatttataaactatgaattaattgtgtgacattcaaaatatgtttatttaagggtctcttcctgaccagcagatactcactctcagtcaatggccaaattgtagaccagctcggagaaggatctacagagtccggtggttactactcgcagttgctgcaagaatatgatgctgttatagtttcatctgcctcgataactgacaagctatcaattcctcaatctcaagaactcggagccaatcaaccgctctggatcatcacaacaagtaataatactaacaatacatctttggataaaatatttgatttgcccataaaagaagcatctactaaggtggtagttttcagtaaccaagagatagtagtaaacccgaaaatcgttaagagagaaatagaaacagtagttttgaatcaaatcagcttgaacgccattctggaatacagtaagcgccaagggttttgcagtgttttgttggatttgagaggaaatgtagatgatattaatgagctagtgaaagagggtattgagcaaaatttgttgcaaaaggttgtgatacatgtgttgcctcagtgggttgaaaaggatggtgagaactcttgtgttgcagctctgagcaatctggataagagtttggacattaagaaattgaagcctaaaatttctggtaagagtgttttacttgagggatatttttgagtgaaaaattgagaaattatgtttaatagtaacattagtttttggaatttatatttattagccattaagaacatttagagttagttgtttttattgttgaatttaactttgtaatgctctttggtgttgaatttaatatcaatattctttttaaatttaaaataattttttatttttctaaaaaaatgatttatgcctagttacatctttaatatgtttaattaaatgagaatcgagcattaaggaaatttagtaatcaaatgctgcatgaatatcttatgttttcagtttcttatacttttatatggattaaatatttaaagttacatttttttgttacttctgttattaccattctgttaaattattttcaaacattgaggtatttgcagtaggggtgttcatttaatttaatccgtactattttgctttaggttgttcaaaaaaaattacaaactatccaacccgaataaaccgcccaaaccaaaccaaataaaccgataaaaaatataactcgaataactttacgaaaattcaaaccgcctaatgaatgtattgggtgagttgaatattattctaacccgcctaaataacccgaacaaacaaaccgatttatatattttttactaaaattatctataatataatatatataaattaagtttaata

SEQ ID NO: 295909 - DNA, 2025 bp, Cannabis indica
tcataattttggtattggttactaatagtctcaggtaccaagaagaagaaaaatgacctgatacgaacgccttctgcagctgcccacttaacccggtagcccagggtctgacagtaacaactttgctgctttgtaagaaaagaatgccagtagctgaaattagaataaacaagacgccaccaacaactccaaccgaaatcaccattacatgattgtcttttttggcaacctttggagctaaagatggagatggtgataacattggaatagcattcttttgtccagggtcaacaactgatggtttcgcaagaattggagggactgcactaggtgatggcgaaggtgaaggtgaaggcgaaggactagtgaagggagatggcgatggggatgatattggtgactcgaatggagatggtgatggggaattttgtgaatttgaaggtaattttgaagcggatggtgatggtgggaaagggcgggatcgtggtattagatcctctttattttctctaattggttttggtttgctagactttggggaacttctcccttgcaaaagcctcctataagctatatctccaggttcagcagtgctcctaatattaacaaaggaaaaataagaaaaaaatgtcatacaaagatgaagatccctcaaattcctacaaagatactcaaaattgactttataaaaaatggcaattgaaccatgaaatttgataaacaaagaagatagaaactttctcattgtatacatgtatcattaatctaatgtttcatcaacatttcgatctagagtaccaatatcctgaaagtgagcttgctatacttggaatcatcaaatggagttcattctcataagagggaatgattagcatacattaaaacttgaattttccatgaaatgtaactaaattattacaataccaacgtaaattagttaagcatcgttatatttgagctttagaaataagtagaattagctgagaacactcacaaggacacgacttttccggttgagcaatcaacccagaaccatgagttacatgggttcttctcaccgctatccttattccaattcgaccaagctccaaaagggtctctaataattttctccccgagctcgaacaaagttgaacctgcatccaaacagtgatgaaaagaaaaccctttttacaacaaagttcatttctttctgtcgaagaaaaaactcaaaacaatttaacgggagtacggagtagtagagctttcaaaacacagaccttcattgtgaagagagtaacacaagctaaaattctgaagaaacaacaacagagagaccatcacccacaacgccgtccgatcaaatcgacccaggtcgtccatattctaatcaaacttcctaaaaccgacagtttatggttatatgtatattcccatatattatatatcaaaagaaaaaataaaaaacaagtaaagagagaaacttgtgtgaatgtttgttagttataatttaaaagaaggaagaagaatgaaaacgcgtgtagtaaaatcggtgaattcattaatatgtattatatattagtattagtattgaccgaaacgtatccatgggactactgggtttgggtgggtccgacacgaccaaagtgacagatgtttcggcccaaaatcccgtacgacacaagtaaaccatgttcgtttgcttttggagtttgggttcggttcagttcgatccggttcacataaacaaaatcatggttggattttaatccagccacaaccaggtcactctcaacacagaccacacccacgtgcattgcaattttctctctctttctctctagtattcccttttacttttcttttccttcattttcattataattattttcaatttattatttggattagaaatttatgatactggaatggataagaacattcgaggaattaataattaggaggatgaagcataaatatatttgtataaatcgctacttaattaggattaggcatgtcaaaaagatctatttagttggagcgggt

SEQ ID NO: 295910 - DNA, 2592 bp, Cannabis indica
tctctctctctcttgtctctgagaaatgtctgtctttgcatgcttaatttggagtgtttctcttggatcacgcaatgcagcaataaaatgaaaattcattccttcttctctgttttgttacaactgataataaatagattattttattactaacttctccaattctaatccccttaattatcattttctgttgagccctttactctgcatgtacgtatttggattaacacgtaattagatgtgatcattcaatcgaatctatactattttattcatagtgtatctgatccgcattaaatacagatttaattttttggatccaattcaatctgcataatagtttaaatacaatttaattcaatccacaaaagtgtttattggatcggttatttttgattgattatattttaatattaatgtaaaaaatattatttttcatataactagcaacaaaataaaataaattatattattattttatttctccaataataaattaaaataaataaaataacaactttaaagaaaaaaaattatgtgtataaagaaatattttatttggttttacctgtagaaaataattatatataagaatgtaatatacatgtgatgtattatgttttgaaatataattatactataagtattggacttttgaattattattttctttacattaaaatattatttgtatatataattttttagttttttttattatatatgcgtggattcgattgaatcggttacttttacatgtcaatcaatatccaatccgcacaagtgcagattttgaattttcaaattcaatcgaatccgcacaactacagatattcacactttacgaattggattagattagattaaatcgtacagattgaataatcagctattttatgaacacccatgtctctttttgccaaacaagagattcaatctctccttccatcactctcccttcacccctccatctatctctctctcttaccaatatagttttagtatataaaatttgaaggtaaataaggaagttattctttcaaaacaaaataactaagttataaaaatagctaaatttatattataaatatggagggagacattctttctccaaattttaaaaatttaattattctaattttgtaaaaattgtaaaaaaaagacaaaatagaatattgtaattttactaattaaatttatcttctttattccaacctcacacaccaaacaacacaaaacatatagcaactatgctttctatctctcctactctacatcctctccatcctacgtaccaaatatagcctaaaaccactaaaatatctttccctttcttttatctttgagaaatattacatcacccgagaagaatagtattagattgctacacaattgtcactttgtataaataaaatttttgggaacctataacgcaaatgatgcatgcttatttattcatttatacatacatatatacaatatatatgttatcttttgtcctataataatactacatctaacaaataaaataagtcataattctttagttgaatatatatatttttttcgaaatattacaagttatttcatatagactgacctaagtgataaaatcagaatttttatacaattttttattggacccaaccctcgtgtctagctttgccaaaacatgtacaagtatttctcaaaaccttcaaactcatggttgatctgacactactttactcttacctgcaaatagagcactcgtgagccaagatccaacaaaataaaaataatacagtatgagcgcaattataataaatacatttcatacattacacttctgtgtatataactatgccacaacactatttattacattatttcatatataataatgtctgtatagcatagacctatgttttacgttcacacgtctttttaatttatttaaggccttaatatgttttatcgcagttatagttactgagtctaaccttgttatgccttactcgcataactctattcaattatccacttaacatattattgcatattcatcatagtacgtacttagggtaataactccaattcacggttctataataacaatcaaataacatataactatgccatcacactatactctacgtgcttagtttgttgtcttacctgattttcaatgtatgtaaaagaatcccaaatcacaggtgattttgaccaagcgctactattcctagtcacaattcttgagtttcacaaactaggattaatccccaaaataacattatcaataattcacaattaattctccaactctagaccaaataacagagcttgaaacgagctttctaacgatatatagaacatctaaattagagtttggagtcaaaagttatgctcaaaacaaaataacaaaaattgaactgtcgctgccatcccttcgcgaccaattatcgtcgcaactagattgggctcgccacgaccagatagggccaggggctaaccccttttttgggtttgagcctcgtcgtggtgaccttatatgtaacgccctaatgctaaggcacgctatagtaatttttcaattacagtgctatctttgct

SEQ ID NO: 295911 - DNA, 6046 bp, Cannabis indica
aattccaaattaatcacaaccatttaatagtaatccaattacttaaaaatatgtaactatgatggttacaataaaaatgtaaccattgaaacctcttccataaatataaatataaatatatatttatgtataaaacatatatagggtagtaggggcatctaatatctcacactatctgtatcttttgcttgaacttgttgctttgctttgtctgtatcttttgtgatttagagaattactttaagcaatatggtaagactaaggtgacatgactgttatcatttattcctatttgtcgacttagatgtcaacgtatctagctatatataaggtaaaaaccttacactgtagctgtataaatataaagatatatgtgtatgtatagacaatacatccatatctagctctatataatatattatcgagagatagagagaaaggaaagaccagcttaaattaatgagggttattggaaataggtctgcatgaaatttaggattttggacttttgtaatgagaatagatcacgggcgcctagcaaataatagttttgacttgaaaattaatttacttaaactgtaggcatcgcttttcattccattgccaactcagtctcaatgttgttataaattacttctcactttgtatacatgtctactatagctaatttatgtgtatcatttcctcccaagcttgattactttagaatatttcctattcgaataattaatttttggtggtctgactctgaagtgttaaacttgtactatattttttttgtttctaccatataaaatgagaagttttaaatttttggttcttgaagaaccttttaacaaatttttgcagttccgaaatctaaaatttcatttaaaatgtaagtaacgctgctctttgggcagatagttgactgttttggtcaataaaaattgatacttggctatgctctctgcaagactgcagctaggaatactgcaacttttttttttttgctgaatgactgcaacaactaaccaaaaggcattgattctataaattatgtgatgatatgtactactgtaatcagtgatcataattcaaggcacccaaaaaggggcttacaaattacaggttcaactgctctaatggggtgatggttgcaaactacaaattacatatcttacaagaatgaaaatgttaattccttattagtacttgaggcctacccctactggtgcagtcgccatgggttgggttgtgagaacacaactctggtaaggcacttcaaagaacaagaaaacgaacccttaatcaaccaagatatagcgacattaccagatgaaagcaacttcttacaccaatgacaaaagaatatgaagtcagccaactgttgagatgcctggatcaaccagaaacaggctggaatgaccctttaaactcgtcgtaaaaccatctgtaaaaaaaaaaatgtttcattttaagactccaacttgagcaaaatatttctgcttggattgaaatgcataacgaaaaccatgagagagtcatgctaaaaaacggaaaacataatggaaacggcagtaagtagtccttgtgagattttgagttagagaaagagccatacttgcatataaaaattggatgaagtctactgttagagtcagcatttaactgactccgtcgttcattttcatctttaaattttgtcagaggaagaacttcacaagggccattgatcaatccagccattatggtgctatcatgattagagtcatacacctacaacagaattaagttgatgtgaatatctgtctacagatgttccccttaacatacaatacagcaacagaaaagggagagtggcagtaaactagaataagacagaaatcctaatatatgatgcaatggaaaaagaatgtgcaaagtcaaactatatatatgtacatatataaacacatacaaagactaagtcaattcattctagttctaactaatttgacagccaaccagccttcagaattgagagaaaatcggaggtcaatcaattataatataaaaatgtgcacataaatatacccaaatactatacctcgttgctgtcagtagtacaagggcgaccaacattctctggcaaatcaccaggaaaatagcatctattgacaatgacccacttcgatccagttttgctatcctcccacatcgactgcaataagaatcaatgtagccatattagtgctgtcaaaagatataaacaattcccaaaacaactaatacatcagccagatatctcaacaccaatgttaggtaaccaacatcaataactcatccaacattgtaataagttcaaatatttcaagatcaaattgctggtaaaattttagtagaaatatttggtgttttcttgccttaagctttgaaggtatcaatttgccatgactagaccgaaaaagagcatgatcctgcagtttgtacgttactccatcgacacaacaagtctggtaaaataatttctcatcgacattctgaattacattaccaacccattcaacagaccttaggtcatcaaatgaattcccagagtgctctgtaacctcactgctagttgcagaccatccaacagtattttcctgggcaccatcatgttcaactcgcttgtcataagttaaagtactttcaattaaatgagatttatctgtttctttcagcatttcattattttcttgagatttcttcaatgcaacttcagcagaatttgtctgatctgcttgctcaacaacacaagagtcaagtgaggattgtgaaggatcaaccatattatcaccaaaagtgtcagatgcatgattaagaggctgcgttttgacttccagagagttctcctgatggtttggtggttctgagtcttttaaaagttgtgaagagctttcacttgaagcaacagctgaagaaccacaagtatcttctacagatttcattgagacagttgcacaacttcctaaaacaggtttcgtgtccatactgattgatgacaaattatacgtttgtgtttctttgggatttgggtctgctgcagaatcaacattattgtttcccagagccataacatcagtatgagtaggagtctgtaaatcagagcttccatttgcagttactatttgctgactgaccttcacatttgcattttctactttcttctctgaagatgactgagctccagctgtgctcgaagaaatttttgctggtgtattacttctcattactcgaccatatttcgggggcagtggttttccattgcttaatgccaagcaccttgaacagtgccactcacctcgtggaataggaatcacccttaaattaaatgactgtgcacacttagtgtgatatcctttctcacaagcatcacagataagcacgttatccacttcatgtatagtcaccatacagatttggcattgcaaagccttggtcatatagtcccttgatggaggaatccatgtgggatgatcaggaagcttgggttgtaataacttctgcactgtctttgcaatttcattgtgactgttggaaagagaagcagcttgaacaaaatttgaggcctgcaatggctgaggcatagtaggcaaatttgcagaggctggttgagaaattaatggcctaaagttttgatctctaagagctgaagtagtcaatcgttggacattcatttgaccagttccttcaaccttgacaagggttggaattggcagcttgctttgttcaggtccacttttagtagcttgtgtctgtacagaccgtgttggagcattcactaggtgatgatttgaagaagcatttactgtaagtagataacaaacaatgtttccttgtcagaatagcagttaaagtagaaacatttactgaagtaatatactttatcaatattctcatataaaaagtacgaccagttcttccttcatgtgacaaatacacagtgtttcttttgatattaccttgtccttgtgatgccaaagagggcacatttggtccatctaatttgaactggggcctttcaattctaggcaatgctaaagaaggtgaatcccttcctaaattattgctaataaagccactagaaactgttggtgctctaacatcactggttggcaactggtatgacatagatgctgaagttgctgtggagacatgaccaataggcaaagaagcaggagcggccacagaggaaactggcagataagtttgtttatctgaagggatcattcttagagtatgtgggctcccacggctttcggctcccgtgttaaagcttgtttgcagggaatgagaggtatatggagaagattgtccagcatatttcctagattcttccatctaaaacataaaaatatacactataataatgacaattgtaaagatcccaccaaatccaataatattctctaaaatagttagattgtaaatgctataacaggaagtgagtcattaaaggcccaatagaatttattgctagaatgaatttgaaaaaatcaactaaagcataataaaaccgctgataatatctttatcccaaggtggtaacaaatttcaatgcatagtccagagttaacacttgtaacaatgatgaaatcaagacctgataacttaaagtactacgaaccaaataattgcaattagcacaattgatttataattattaattaattgtgtagaagttaactttcaactttttagtgaacagaaaactaagaattaactcagcatagaaacaaaagttccaagtctcttccttgtgaaactttcttagccacccatcacatcaaagatacagtctctttcctacattttctcagcaatcataaaatgtataagccctaccatcataccatgaacatacacagttatttaacttatttttacacatcttataaagaaattagcaaattaataatcatgcgcaaatctgtaagcgttatatgtatatacatatatgactcaatctacttttcttaccatactcccgcccactaattagcataaatttgcattttatttttcactaaagactacccaggatcattaagctaaacacgaaaaacactgcaaaagcaatagaattgacaccgtaccttccgcttagtttgcgagaacctctctgctatggtcaaccttggtcccctaaatcctaatttctggtccttagccttagcattaagccccaaatcctcaaccactgcctcaattgcatccctagcaacaatgtccttcggcgctaacccttcacataattccaccaacttagtcctggcctctgacattagcccaacctccacttccgtaggcttcttcccaccccgaatgctcgccatcgtcgacaacaccaacacaatctctgccactctctttagtcctccaattctaggcctcttgttgagctgagcttcctccctttccaatcctccaccttccccattctccagcggcctcttctcacccatcgacactggtaatgtctccccaaattgtttgccaccctctgtatcaaccgccgaatccatgacgtagcggtgaagagagtgatgagtcggcaaagctgtaagaaagtggggagagagaggagaagaggaagggagaaaaccctagattgaagtggagaatggcggaaataaaaatatgaagtttggaatggaaaacttgagtaccttttggcgcgtaatttagaaagaacgaagttgtgtaataatttgataaaagtaaatatgggaagagcgagattgtgagttttgaggagagagagatatggtgagttgaggtggctgagcagaacgagttagatgaaaagaaaggcaagaggagtgggtttatttttgccttttccgcatcgcttcgtttaggtaaacccggtttcaaacactccatggatcactgggccttcactactgggcttctgtaagccttctttgaagggattatttcacaaaaataataaaaaaaggggtaagttgaaaaataccactttcattaatcaattgatcaaatttgcctctacttttatatttaattgaaacatacctct

SEQ ID NO: 295912 - DNA, 2972 bp, Cannabis indica
aaaaaaagaagaagaaaagaaaacagaaatgctctgatggagataaaagacacaagttgtaaaattactctaaatatagtatagttttatgtttttacgtgttttcataaattacatgctatttggtaaattaaatttttttatatatatgatcaaccatgaattttcattttacttgctgcttattcatgtttaaaataatggtcaaaaggatttataaaatattgaaattaactaaccaaagatatggtaattacaaagtttcgaatctaaaataggtggttgctgagctgatttttgctccttgtcgatccttatccatttcctaactcccaggtcaaattatcaaaaataagtccctacctttcctatagccttctatctagttcttcaccaagttgccaacatttttcaactagctacttatccaaatatatttttaaaacaaattaataagtcaataaccttggtcacactaaataaacatgtgttagaataaaacagtaattgattgtgtatgtatgcgtattaactaaagcagcaaaagcaagacaatagaaagaagtgagcaaaaccaatgttggaacctccttcacaacttatcttcattgatttcaaagggtgttagcgttcaaacaaaacatcttgtggttaagaaactggatctataccttaataattaacaaaccgaaaaaaaaaggcggtggacgatgattcttgaggcaaaatttcaggaatccttggaagcattctgattgcatgatagatgactttgatcctttggcagcaaatagggtggaaggaacgatgggatgaagaatgccaagcatagacagagtagcaccatggctgcaacccaccaagctttgtgtggaatccccaacaaaagttcatcacaaactaaagtaaatagcatgccaattagtacccattttacaatgtctgacacaaaacaaactagaatatgccacgtggaataaagcaataacaaagcatagtaaagacaatgtaggaaacatgacattgaggaagttttagtaagaaaaaacagtcgttttcttctaaatattaggctaactcaagtctcaagggtgactggccatgctatagtttttcattttatccccagaaatatagccagaaaaatgaaaacaaactcttatagaatccaagttttggtctaaaacaattcaatcgtcctagttaatataaaaacagataaaatttgaagaagagcaattgttaagctgaaaaaaaaagttgaaggtgagaaaggagtaagcagtttagtaagaaatcaaccgtcagagagactaaacaaaatatgttcaacaatacctatgttgaaaagcataaactctctctcaggcacattaggtttagcaacaaacccctcaggttccacagtcaccaagatattcattccattctgcagattccaaaggtttagatttttattgacatgacatatgatataattcaatctaatttccaaaaagaataattgaacctgattactcaggctttctgtcttgaaaataagcttttctgtgttgagcaatcttctactcgtgtgtagtgagtttgctgagcccttcttcagttctaaggaaaagctggctggtatctatcaacacataaaccccattgagaaatcacagagagattgctaaatgtagaaaaagcaactacgctgaggcatgaaatacatacagaagctgggtatgatatctttacttcataccacgtataagatttaagtccttgtaactgataaaggcgagaacccatttgaaaaggcagtgtttccctccatagttcctccccaactttcagaactttgtggtcaaccctgtacattatcaagcagtgagtgcaatatcaacacagattgaccagacctcagcaccgttaccatgtagcaaaatgatcaaagaaaacataacatactaacgtattttcacaattgcaaagctgaccactgataagggaatggaagataaagagtggaatcaaaaagttaagagtttgtataagatgcattttatactgcataagccaaccgccacttcaaattcttcacccctaaaaggctgcaaaaagagcaactggaataaaaaaaaaggccctcttgtttatccaagaaaatgggggaaatatggtaactgaagtaagaacaaaaacaagaaagaaaacaaaaaaaaaaagccataacatacaaacattagtagaattaggacacaacaatttgattctactaagccatgtgttcatttcattcttctttgttaaccttaaggcaattattattgtgctggatgaagcatttgatcaaacattttgcgtgcagtaatagataaggagccgcccaataaggagtcatggagtgatcattaaagaaaaatgtctgaatcacacacaggggcggacaaattaaggtctggctgtgtcgaaattgtattaatgtacaaggattggtgaattaactggaccagaccaagtcgatttcggtctacataaatgtttattttaggcaagcatgctattctttctgaattaattaatcaagctttaggctgcacaagaagaaaatccaaattatatttttacatgagtgataaactacaacacagaggaggagatggaagttccatccatctagatcgtattggattggatcggttctatccattagatgctttaactggttttattgaattggattggatccatccaatggatccaatggatggatccaatccattttagccactatttaggctggtttcattaaaagaaaaaatatatgaaaaaacataatttaaaacctaaaaatccaacataaataataaacaatagtttaatccaaatccaactaattttcatgatcgcatataaaaatataacacaaatcaactttaataagcacaaagagataaagacctgcataaatagataacacaattacaaat

SEQ ID NO: 295913 - DNA, 3835 bp, Cannabis indica
aacagttgaacaatttggaccacatgttagtgaatcttttgccgttttagcttttctggaaaggagaggacaccttttcttttcttttctttttccgtcttggtaaaatacggttttagcaaagagtgaaacaaaaatcaataaggtgaatcaaagtttaccataataatcgataacagacatgaaatctaaatttaaaatggaaagaaagttctgacaagggtattattgtaattaaaccaacaataagaagaatagttctgaaaaaggaataaggaaaaatgaaaaaacgggaaacgaaaaatcttatcttaaatattaaattcgtacttcttcaaaaaaaaaaatatattaaattcgtacataaaagtgacagtaactatatcctaaatttaatcaaaactttggtttgtgggtaagcctttcattggtccaaaactaaaaaaaatattaataataataaaaaaaaactctcgaagaacaacaacaaaaaaccaaaaatcttttcttccccactctctcggccatttatgaatgggaaatgaaaaacttcaatttcccaatactaaatgaccaaagcccaaattcaattttagcaagagaaagcataattacgcaccaaaacaacgatcaaactcaatcagaacaacccctcaacgaatgggattttaatctccgcactgtcgtttcatcactttcaggcacagtcgccgcttcggacgccctcggcgtcatcgaatttgatccctctgataacattttcgccacaggaggcatagctagaaagatacgaatatacagattgaattcattgttatccccaaacgacgatcaaaccgacgtcgttttactcgaccatgcggccgcgtacgactactatatttgcacgcctgcgaagctcagtagcctccggtggagacccggcaccggtggacgaatacttggctccggtgactacgacggcgtcgttacggagtacgacctggagagaaagacgcccgtgttcgagcgtgacgagcacggtggccggcgcgtttggagcgtggactactcgcattgggacgttcatccggtattaggcgcgtcagggtccgacgatggaaccatgcaaatgtgggacacgcgctgtgagagaggggaatgcgtggctacggtgcggcccagcggagctcggtgcgcggtttgttgcgtcgagtttaatccgtttggtgggccgttggtagccgttggatgcgctgatcggagggcttacgggtacgatattaggaaactttctgatcctgttttggttctagacgggcataagaaaacggtgtcgtatgttcggttccttgatagccgtacgatggtctcagctggtacagatgggtgtttgaagcaatgggacacggaccagtcacgtgtggttcgcacgtacgagggacacgtaaacagtcggagctttgttgggttatcggtttggaggaacggcgggttactagggtgcgggtcggagaataacaaagtatttgtttatgataagaggtgggagaagcctatttgggttcatgggttcggacccatgggaggatccgaacccgagttcgaacaaggctttgtgagcagtgtttgctggagacaagtgggggaggagcggtgcaccctagtggcaggtgggtcggatggggttttgcagatttttgttggtaataggaagaagccatgacatgatcctcatcttcttcttatttttcaagtaaattactcttttctccctgaagctcctcaaaattacttgtttctccaatttcttttctttctttcttctttcttttcttttggtagggcagaaagattgagtatgagaaatttaattacatgagaattgtactaagaaaatactatagctaaggaggataactaagttgaaaggaagatgaatatagagatgccattttatttgccttttattcttttttattataattaaagagaattttctaacgaaattgatactcttatacgtatactgcctttatttgtttccttaaaagattataacttaaaatttgtgttgtatatattgatcagcatttctatcatttcattccaaagaataaagtattcagctgatcaaataattattttcattttggatttttgttgcctgatttataacgtggcttaaattaataattgagatttagtaaatttgttacgtactgacttttgctgacagtttaagtaaatatgtaaatttcttttataaactatgatcagttgcttccataatttcctcattgtcatgcatgtcataaataaataaagaacacttgtttcaaacttaaattcataaattaattacatttattaaagttatttacaaattaatttggtctgaatttttaatttttttaaattaaattaatattacagttatttaaaaattcaagtcaaactaaattaattaaatgatcaaaccaaactaatcaatttaaaaataaattggtttgattcaaaactataatttgtatgttatagttgttctaatttttttttacgataattgtttatatggtaactttttttatttttaataagtttataaatacatatataacaataaaaaattactatcataataatattaaatcaatattaatattctacctaaaattgttctcaaatatcaacattttgtcaaaaaaaaaatatatatatattaagtatatataaaataattatatagattgatttagtttgaactattacaagatttctaaaaccagaattgatcgaattagagaattttaattagtctagattgaccaaatcattcacatgaaatttatttagttcggtctcaaataatttagtctgaattaattaattgagatttaaaatcatggactcctaatatttatgataaatgtaagctttttaaaaatcaaatcctatatgaagtagtatattgcatggttgtcatatttcattcaaagtttaaattgtatccttgaagactaaggtgaagcaacaagataagtaaaggatttggatctaattttgctctggagagatgattcatcctagtctcattaaactctctaatttcataaaatatgaatcacaagagagaaaaagaaagttaaaaaagaagagagaaaaagtctgagaagtaagctttggtatgaagtccaagcctctgtgatacctttcatcttccccagtgagcatgtcttccatccaatcgcttcatcttcctcttcaaacaatgaagataatcaagacttgctgtattttctcaccttcctaaacacattttccacccttctctgtgtcgtggtggcgcgacatttatggtgattgacacccaactgcctccacctaaggtgataaagtcagtacaatctcgagcacaaagcatcttacaataagcgtggatttgcattaatgaagatttctcaggtttgatttgtttttgagtaaatctaatcattatatttccttatatttaagtttgaaagtcctttcaattcttagatatgggttttgctttaattgttgggtctaccaaccaagattgtggatgaatttggataatctcccgcccgaaccagccatttatggctattacctctatcgtcttcagtacttgattgtacctagtatggctgaatatccaacaagttgaccgagtttcgggtttgtgggtttcaggtttacgagttttgggttcaaaaaattatgctcggacccaacccataaaatggtttgggttcgcggatttcgggcttgcgggttcacgggttcgtgggttcgggttggcgggttgacttggtcaactcttttttttttt

SEQ ID NO: 295914 - DNA, 5804 bp, Cannabis indica
tttttttttttttttgtacaatggtgatgggcatgccatactatcatgtgattacatgtgggaaaaaattgagatagtaatattttttatgtgggtcccataattttacaatgggatcttgcatgtggttgtgattccatacaattgggtgacataacatggatttgttatgttgatccatagcattatactacatgcttcttataattttttttttaactcatactagtatatatgtatacatttatacatatacatgtatatgtatgtatatgtcgcttttttgtcttattaaaacaaagatcaattaaatattcataacaaaacaaatggtaagcttaattataatagtctagtctaataatggtaactcctattactacatacaaaataataatgatataatataatggtaggttttgagttgtgatttaagatttggttcatgtgaagagatcctttgaggttcttatttcatcaaatacatgactaccacttactagaagtcttctaactcatctttacaaaatatttatatacatacacaattcaacaaaaaaaaaaaaaagtaagtgtgtgtatgtgtgtttaatagtgagtatgctataatattgtgaagtgaagactaaatcttgtagtgaaaggaatcaaagagcaaattaagctaatatatataaatatttatatatatatatatatttatctgtaaacagcaaggagttgaataccacacattcacaaattcatgtcatgaggttgatttgttttgttcgacttttgatatatgctctgtggactacagcctgtgattgcactagataattagatttaagttactcacctatatacaatagtatagtattacttgttttttaggctactgattactttcaatatctaatacaattaagtaatgtatattttagtattagttatgagagtacatacataaaaatttaccctgaaatttcctcacctaccaattaatttagttgtgtcattatatataatctcaatatgtgcatttatagatgaaatatattaatatattggtactatactatgtatttttacaaaatatatcttatagttttttttttttgaaaaaaagttatcttatagtttcgatttattggatacctttacatttgactttaataaatcacatggtactctaaattacaacaatttttttatgtatattttcatatatatttgtagaaaaatctaaattatttgtacttagtgtaattttatttcataatatttgtactagtgttgtaaatatgggtcaagttttttaacatgacacgaaatcagcacacatccagaaggcacgagtacgattatgcacaaaaaaatatatgtttggtcacgacatgctacgatgctatgaattgtactacaaaaaaggggaccttttatccaattttttacatttaagaaaaataaaaagtagaataaaagatatgtagaaacattttatcccaccttttgtatttggtgcctataagatgaagctagagaaattattaaacaagggtcgtatttggtgtgacattaaaaaataatcttttaaacaaagttactattgaaaaaataaatcaagataaaaatttcaatggccatccaaacacaccccttatgggtgaagggaaaagctactatcctagtttggaccaaggaccatgtttggctggtcactagaaaaacacattttctaagcctttttccataacaaaaatcaaacaggcctcaaggaattaccttttctcgcagttattagcaaaaaaatcaagataaaaggtctttgctaaaggcccactctttgacacacacttcacttcatctttgtcataagtgacactcgaaggacttcaaccacaaactacaaattttacaattttatttattcttctcaaagaacagcagcattattcttctttttcacattataacattatatacatctataaaatttattatttttataaaccaaacaaaatggtgagtttgtgaaggggttggtttggattcaattttttgggagtgagtttgtttagatttattgtttgccatttatgttggattttaagcttgaaataggtatatatatactatgataaatatgtgtgcgcttaattttttaataagatttatttttttgatgatgattaataagatttattaaaatgttttttgtgatatagttatcttttcaattagtctgaatttaacaataatgttagtattaatattttttttcaattataatattttattgtgatcaatatatgtttattaaccaattagaaattaaaatagggtacaagataactttattacttaaagcatctttcagatcaaaagatctaatatattgatattaagaagttttaagttatgtaactatagtgtaatgtaaataatattctgtgtttgtttaaacttaattgtggataaattatgtgactttgtggtgagtttaattttgatttttaagaggctttaagagtattattgtaagtagttactaattattatattattacgtagttattagttaaatttgtatgagttacttattaatattagaacttaatttttattgaaattttttataatgcatttaatattgtaggtgtgaatcactattataatgcatttatttatagttattctaaaagatcacaagacaagtgaaatatgtagcttttttttcttatttgaatatcttttgtatgattaaattaacaattaatctaaaaatttggaaaaacctttagtgtctttttattttgtattctagaactttgtagaaaatttaaattctttaaaattgtagtaaataaaatatagttatactaaactcaaatagattttagaaaactttttaatctaaaagagtaattagtttttaaaatgatctagattatattgatattgtgaactttttagttgtgtgactattgtctactaactataaaaataatttttaattatgtttgtttaaatttaaaagtagataatattgatcttgtttttggccaataacactaagtcttgaaagtaatttagacttaattaaatgcaatgagaatatgtctaaaataaagcataaactaagaacacaaaattttatataggttcagtctcatttatttagtaatagcctactcatgtttatgattatatttcacttttgagatgagaagcaagaacagtttaatctctctcgaaagctttttatagatatttcagcaacgtaataactctcttgaaagtataattttggatccctcaataatagaattgctccattatttataggagataattacaataaaaaatagtttcacaaaagctatcaagccataaaaataagaaattaatgattttcgtgaactgtgacaaatatttatggatattctttaaataggaacttgattatataaaataagaaactttatttaatgagttctcttcacgcgttttcttctagttggattgtgtgaagtgctagttgtttcttcccgttcatgttagcttcgttcattccgtacaacaagttttactttgcttatctattgctgcatttggcaagctgtttatcctatgcaggcacttggaagaccattgtggcccaggtcttgaaaccataatgcgtgttacgcaaaagacgtgccacatcatccaaataaaatttggattaatattttcctccaagtctacaggagaactttctggttggtgcgtggacttactcagcgcccgtactaggtagatgcagtgacacgtgttaagtgaataagcataacaaacagggttgtcacttcaaatctttttaaagcatcttttcaaatatttgatgcatttaatactctgatatagattaccgtgtcctaggcgcatgcgttaatggttgtacttataatgaatactcattgtaaaattttagagggaaataaaaatttggtttgagtgcctgcattactgttataccctctaaagctctaataaatagagagaaaagaggttcatttgacattttcacatctattaagtctcttaaataccataattattttgcatttcttgtgattttcaagagcatattttggagacttcaagtacttaatctttgacttcaatctcgcatttgaaccttccaactagcaactccaatagtgagtaagtatcttatttctttatgaattttccctttattttcttgcattcaattttacatgcttttctggaaaaacctgagttatgccgttgatatacttcacaactccaattaaaatttgaatttactctgattattatggttgaatatgctcgtgtgggactaaattgttaacttatcgaacatttatatatttttcctgagagaatctattgaatggaggcatgtacatcgttttgacaacttttgggttttcacccaatttttaaacatctttgaatcaggttcttcgtaatttggatggagttctttccatcgatccaggcatttgtctggacaaaataaacaaattattttcatttgaactcttcacttttgttcggtacttatctcccctattctttttttttttttgtaaatgaatacggtcgactattgggaaagtaatagccgcattcacgacaacctattacaactactctttgaagatcaaccaaagacccgtgcaaagtctccttttttagacgataactcttcctctagcttagaaaagtgggaagtatcaagtgatgattctaagcctactgtaccactcgtccatcatcatttttattcagactggactggaggcaacgtatactagagatttttctaggagtacaacagaggtttgaggcgatatctacccattaactggacatatgttgtctgtgcaggcatcccagacactttgtcaaaggtggatcttgaaccctcactccggcctagggtcgaggcagaaatacttgtcactatcatagatcatccttcatcgagctatccatttcgctcaagaaaattggctcgtaccaaataaattgcctagaaaattggcccgagagactcagagttcgtccagttaatggcaaggcaacacaaacagggtggggaaaacttcaagggggaagacgccttgcccgtaagggacccaaaagtccaagaaattgaagggcaaggcgagaatggcaggtatgccttcatgcctttcaaaggtgtcggttggtattgaaagacgggcgaccttttgacttttgaggccgtcttttagtcctaggtgttgattacacagatgaagaattcgacgaggctgaaccatctgagtatcaagaggcggaaggcccaatatgggttcctccgccatctgaactgacaaagaggtgccttagaaatttggacaaaaaggtcctccttggcaacgtgcacgtatttctcccctttaagggacaactagccaatgattcgggcgaaggaatgtgtgcatggtctggcccacatgctgagtatggtgctcttttgccgcttcactcatatttcatgaagttggctaattactacaaaattttctcgatgcagttcatgtcaaagggaattaaatacttggccacaatgtttgtactttatgcgcaacaaggatgggagaaccttctgctcatgacataaactggttctttaaactgaagtcttcctcgcatctacgaatgtttgggatacttggccactaacgtatattcattagtgtaaaatacaaaataaaattaattcttataatattttatgaaattaatgttatatattt

SEQ ID NO: 295915 - DNA, 8347 bp, Cannabis indica
tcatatccctatatttatatatatatatatatggaagagtaaagaacaacgctcatggatgtccaatttgcttagactgtgtgcaaaggcacatgctccttatttggcatccaaacaaagttacattcatacatatggacaattatgaggaatatgccttcaaataaataaataaataaaaatagtatccaaattaattctcatgtatgttggtactgaaggggagtcactaatagtacagtaatcgtcttctatatgatatttatttatttgtctacatattatgacactttttttcaactagctggagcctacgataataatgtattaaagtgtatataatacatgttttcattcaaataaattggtaataggttcaagtttagctctcatagttaaccaatatcatcaatctaatctgtatatccaagttacgtgtatatttggacatttagtatctatgagactaactaaccagctaataagttctaccaattttataattatcccaccctaattcaacactttaatttcctaattataattaacaaaaaagctagtgacattatttaattcaataacaaaatattttttccagcaaaaaaaagaacactaaaaatataaaaccatcagcaccaaagagaagtattaattttaattattgaattcaagcaaagtcaatcctaaatcaatggtttcattatgaagaaggccacttggaaaatgctagttaaactaagaaactacacatgcaatcaattacaaacttttcaatcaataaagaagagacttaaaaagataataaagcaattgaagtaattaactaattaggtgattaattaacattaattattaataattagaatgaaacagagggtgcatggcattggtacagaaacctctggccttccatttcaagtagttgtaactcaaacgctgccggaagcggtcattccttttagcttggttttagttccgctgtctttgtccatttttgaccaatttaatttattatattaacgcgtgaatatacatattatttttatatatataagcacatacgaacctcattttcttgtagccatcaactgaaactgttctctgctttttcgtctactgctctgttctcggtcagaaaacagagtaggaagacagaaaaagaaatcatattattgaaacacaacccattatatatagagagagagattgcattgagagataatcagtgggaaatattcatcatcaagtaaagtttcttgctttgtagttttttctactctgtaagtttggagtgtaagtctaaactagttttttaatttctactacttgtttgttgttgttcattgtgatcatcataaaaaaaagccagtacgtgggtctatctttttgatcatcaaactcatcactgacgaccactactccacctctttcacacatttatctataacgtaatccataagccaaaaaccaaacccaaaaacatatatttcaatagaacaaagtcgtgtccttttcgcaaactcattacacacacacacatatacatattatatatatatatatacaagtgtagtgaacttggagctgtaaaccaaaaaaatggagcaactttcatcaacgacaatcattcctgatgcgtttcaaagcgctagaaacgatctcacaggccaaatatctttggtttgggagcaagcgaaggcgcctttgatcgttcccacgttgaggcttttggttttcgtttgtttggccatgtctgtgatgcttttcattgagaaggtttatatgggtgttgttattacgtttgttaagctatttagacgaagacctgagaaacggtacaaatgggagcccattagagatgatgttgagcttgggaattctgcttatcccatggttcttgttcaaataccaatgtacaatgaaagagaggtactttttcttcttctatgattaaccactaaatttgtataaataaaaaattatatatttataataataataatcaagttttgccaattttgaacaggtttatcaactttctattggagctgcatgtggtctttcatggccttctgataggatcatagttcaagttcttgatgattcaactgaccaaaccattaaggttaaaatctttcatcccaacttaaagtatataataatatccctttatgatgtttgaaatttgaaccatcttccttaaaagaaggttgatgtgtcactctctaggttttggtacaaagaagtttctttcacttaccttctatagaaatttagttttttcaatccgggtcaaaaatcaaaatctagtagtcaaattattaacaacccaattatatatttatatattaaaaacttaaccgtccccaaataaggacttttccttaaaagagtcatttgaatagaaggttcaattttcggactcatgcaaagttgtcactttttttcttttttggtctatgtttaaaaatttctgatgtggatttttatgtataataatttataaacaaacagagtttggtggagttagaatgccaaagatgggcaagcaaaggaataaacataaaatatgaaataagggacaatagaaatgggtacaaagcaggagcactgaaagaaggaatgaaacatagctatgtgaaacagtgtgactatgtagccatatttgatgctgacttccaacctgagcctgactatctctggcgcactgtacccttcttgctccacaaccctgaagttgctcttgtccaagctcgatggaaatttggtaaatttttcttataattagtgaataaatatcattaattaaatactttattacttgtgtcggtgccactctctttttccatattttgttcaacaactttgtcaaaactaagtgcttttttttgcttataatactggttctagaaagtatcttcatagatgcttttcaatgaaaataataataaaatgtgaattgtttcactctttgtcacctattgtaatgattatattcaatttcacatggtttatgagttgtgaccactggttggctctatgtaaataaggcgtgcatatagaacaatcaatatgctaaatcgttaggtgaaaaacgttgtcataaattcataatactctactatattaccctttctttttcttttgtcacatacagaactcattctagaatagaacctgaaatagaatattccaataacacaaacaagttaggaaagttgtagtttattactatatattatagttttcttttgttctttgcctcgtttctttaggaagccagtttagtgataatctgtaaataaaacaataaatcacgtggaacattttttaattaagaaagttactatttaaaaaaaaaaaaaacaatatatgattcctctattttttttaccaaaaagtacttctgtcaattagagtttaagctcctagtttttatgatggtgaaatcattgatgtctaaaggcaaactaacagagatattgactcttaattcgattgataatgcaattaaaaaaaaaaactaaattgtgttttagtaactaatagtggtagtactgaacctctcttagctagtgaacttggctgcattaacatcataactagtagtatcagtaatttaagagcattgtaatgaattttggtgaaatataacgtgtgatggtctggtcttctgggctgcagtgaattcggacgaatgcttaatgacaaggatgcaagagatgtcactagattaccatttcactgtggaacaagaagtggggtctgctgcatatgccttctttggtttcaatggtaaacaaaaatctatataggatttgttaacattggtgtcataaatttttatgtattgagccaaaaactcattgcacaagataatgtttgtttgtgcaggaactgctggtgtatggagactctcagcactcaatgaagccggtggatggaaggatcggacgactgttgaggacatggatttggctgtccgagctagtcttcgaggctggaaatttgtctatctttcagatctcaaggtaaatggcatgtaaaatgttttgatgctatagtgatgtaccttctcttgtgtcatttcaaagcaatgaaactaactaaagtgatattactaattctgtattacaattcaggtgaaaagtgaactaccaagtacctttaaagcttacaggtatcaacagcacagatggtcttgtggccctgctaatcttttcaagaagatggccatggagatcataagaactaaggtactttttttcttcccttatctttttagtttctatgcataacatgaatgaagaactctccaatatttttgcttcttattattactaatgccataatttgaaatacaaaacattgcagaaagttaccccattgaagaagtttcatgtgctatacagctttttctttgttcgaaaaattgtagctcatcttgtcacattcgtattttactgcatcgttttgcctgcaactgttttagcccctgaagttgttgtccccaagtggggtgcagtgtacattccttccatcattactctcctcaatgcagttggaactccaaggtatccacacttataaaactttcacacttgagtatgtgaaaatctcacttgtttcattactaatcctatcttgatcttcatacagatcattccaccttttgatattctggatcctctttgagaatgtcatgtctttgcaccggactaaggccactttcatcggtttgttggaggccgggagagtaaacgaatggattgtaacagacaaattgggagatgcccttaagaccaaagcatctgtgaaggcctttaagaaacctcgatttaagattggagaaaggtaagcaactttgatgatgcatcagaatttcgagttatagtacttaacataaaaaatggcttacatgttttcatgttgttgtgattgttttaagcagaattcatgtccttgagctcagtgttggagcctacctcttctttattggctgctatgatctttctgttggcaagaatggctacttcattttcctattcctccaagctttcgcctttttcgttgctggagttggatatgttggtacatttgtccccagtgcttaggtgggaagctcattttggtggttggagagttgttatcagcagcattacactactagtcaacaattcattcgtttcatgtataaaaaagaaaaaggaaaaaaaaattgtgatagtacagtacccttttggggagattttcttttcatattaatttgtacttgtgttcatatattgttcaaacaagaggtggccattcttttgtgttacataatggtttttatatatcatcattcatttacaattatttcttgtggataagttagaagaaatgcagagaattcaaatgctacacaattgggaatgatgcattatgcaattttagaagaaacaagcagctacaaagcttgtgtagaactgttattctcacctacattatatatgtaaagataaagcttagttattattattattttgaattgaatatcatacatttactatacaaaattcatatctgcaagaggggataatagtctgatctaacagtttaaaccaaaaaaaatctgaactctttacaaattgaattgtcagagtaatcattctaaaactataactaatttaaccaattactataatcgtaagcaccacaataggtgatatactattattagtgtaattcaatatcgaattttaaatattttaatttaaaaaatattataaaaaactactaattaaagatcgagtcttccatattagaacaattcaacatggagtcttacaatagctatgttcttatttttggggtctaatttagtttataagaataattgggtccttttataatttttcttttaaaaaatgtgccctttcctttatagaacttttgaaattaggactttaaatcatattccctctcgtggttcctctcactccccgactgtctccctctacttccgtcgccgcgccgtctccgttcgccgctcgttaacttaagtgtcaacccgattactgcttgttcatctggccactttgatccaggtttatgttgtttccttgtatcttatttttcttttgttttggacaaaaatgtttatgttgattgcttttatccttcttcactgctcaattttgttaatgctttgtacatgtccataaactattgagaattttaatcatatgcaagttttggataagctagaagagcttgattggtaggattcatttgtaccaagatgggatgccacattaatgggatacaaataaggaacaaataattctgttaattattttttattgctgtgaatttttttaaagtgcataaacatatctaaataatccttactaagctgacctctgttgtgcttgtatgctgttcgatgaaatgtttagctagatagcgggagatggaatagcagtttgttctcacaaaaactccatttatataagaaagcttttcgggaatagcggtttgtttgtatagctaaagttttagtttgcttacctagcttgatttccagtttttattttccttttgatttgggtcttaaattttgtgtttattttattttatcttatttaataggtttggaagataaatggtcattgcttctcatctgactgtttctaaggctttgtaagattttccttttttcaggcttcatatattctatttcatattttttgtgttttaaacgtacatatatataaaatgccattagatatggtagtaaattctaggaaaatggaggatttcaggaaatagcacataaatttagaaggcaaaataccaattaggcctgtttaatgcgaaaacatgatcagcctatgtgttttgtcaaataaatgacaattgaacttgtgttttgtaaaatagatcaaattggtaccttgagatcaatttggtcaaacaatttttttaatatgactaaccctgcagttgtcgttcatcctaaatctgaagtcactgttgaaaaattgagcttagggcatcaatttgctgaaaaagtgtctcaccaaaattgagctcaggatatcaatttgatctattttgccaaacagagagaataaaccgtcattttacaaaacataggatcaattgcatatttgcgctagacaatggagccaattgggatgatttatttttaacaaaaatgagcccttaatttataggtaatgtttatgcctctttcttaaatgcccaattacaatcgtcgtctttactttttgctcttgatgtatcctataatataacccttctattgtgtaggaattttgttacaatatcaaattagcagcataagggtctcagcatagttgcatctacagttagtatctcttccaataaagagttttattagatgtgcatgtattgagtgtcgtgtaaacagagctccaactcaactggcaaaagtggttttttctttaaatcattatttaggtaaatcaaataggtgtggaagttgtgtcacacaactgccacacttgtgtgtgtgtgtgttttcttatacccaataaaaagtgtcgtgatttttcactcttggttagctccacaaattgagtgcttttgttgtgtaggaatttcggtacagtagctgtaacaaggtcctttaatatacaattgaagtgttcttcaaagggctttactaggtccatacaaatggcaaatatccctgtctctaagtcaagtgacagcagcagctcaagaggagcattgattgttctagaaggcttggatcgctgtggaaaaacaacacagtctagtaatctacacaagtatttggaaggattggggcattcagctgaattatggcgattcccagacagaactacaagtgttgggcaaatgatatcatcttatctttccaatgaatctcaactcgatgatcgtgctatacatcttcttttcagtgctaaccgttgggagaagaggttagctttcttattctaaattctatattcagtggagttcattattgctttatgattaagaacaatactcatatgctgaatttttttttcttcgtgttatttcagcacttttgtattatttattggttcttgaaacaaaaaattgctgagttcatatcagtaactggtctaacatggtgatggatgatatcttgatttaacagaagtcatgacgctgctcttattttttagattattcagggggtaaagacagtccagatggatggctagtgatgaaataataaactatttgttttttgcaacataccccgtcatatatttaatcccgcccaaatatgtttgcaaatgagatagttgtctcttcaaca

SEQ ID NO: 295916 - DNA, 5411 bp, Cannabis indica
aatagttttttagttatgatgtcaaacatgtactaaaagtaaacaattttgccttgcatgtaatacattatttttacattttggccattaaaagtaagtgtgacgatcgtatctcatttgttgtggctaataaattaaagtgtgacaatcgtatctcatttgttgtggctaataaattaataagttaattattcctaaaattaaaaaatatatatgcaacataagtacaaattttcttaaaatattttaaaagttcattacttcatatctctatcatcaaataaaacgaaataagtgtcaaaaatcatacttattaagttattatggtatcaataaaaaaaactgtaagttttgtcttttgacatggtatcctatgcttgatcttagtctctaaagttttgttttgtcctttatttgttctggttcatttgtttgtggcgtctacgtgttgtttcattgtggaggatgacgtgagaaggaattacgctaatttttcactagacgatgatgaggatgaaggtttattgtttgataatggtgatcaaaattttcctgagtttgatgcccgttggtgcatcgttggacgattcttaacaaatagatctttagactttttggcaatgcaacataaaatgatgtctctttggatacctggcaggggagtaagcgtgaaagaactcgactctaacctatatctattttaattctaccacgaaattgatgttgagagagtgattgaaggaagcccttggacttttgacagagttcctctgatctttgttcagctcaaggagggtgacaacccaaggacagtggtgttaaacaagttggatttctggatttaggttcatggtttaacaactggttttaagtctgaaaatgtgttgagacagttgggaaactatattggttcctttattgaatttgataaaaataattaaatgggattatggagggactattgatggtaagagtcataattcagatgaatcttccactgaaacgtagaaagaagttgtagttgaaagatggaccagagtgttatgcacagttcaaatgtgaggatctttctaccttttgctttatttgtggggtcttggggcactcgaagaagttttgcgatgtaaacattacaaccccgcaacacttgatcactaagaatggtggtctcaagatgaagaccgacccacgacatcgtcatcaactcaccattggagctgagtggctctgtgaaggtttgtcgtcaggcataggcaactcaggaaggaggaagttcgaggagacaggacattaatgggggggggagaaattagtggaggaagatctgggattgattaggcatttaagaggaaagaatttggaatcctatgggaggtttcaatgtcaatccgtcaggtacacatatggtaaataatagggataatataatagatatatctccaagagatttgctcggtcaaaaaaattaaatgaggaggacgagttagttattttaaaaagtaaaagaaggaaaacttgtccaaagggaggaagtggtgcaatagctaatcaaaacttgggccaaattgtcttagagggtccaaaaaaaactcatttggtgcgagctctggtgtctaagcccaccaagaattatgaatgtactaagttgaaattattgggggcttgggaaccaacgggctattcaattcctaaaagagctaatttcttacaagaaacccaattttatgttcttatgtgagactaaatgtgataaaaatcgtgcaaacattgtgggccggttattgggctttgaaggtgtgtttgcagtggaggcccaaggtttaagtggtgggttagttttattttggaagaatactaaagagggccatgtgcttggttactcgcaacatcatatcgattttgaggttactgtcgatgagcgactacagtggaggctcaccgaactctatggcgaaccaaatagaagccaccgctgcaatacttaaaacccactttgatccttagtgaataattctcctaactcgtggtgtgttattggtgatatgaaccacatcttgcatctcaacgatcaaagaggtggacgtggctatctgcattggctcttggaaggttttcaacatgtgattcagagctacaacttagtggattttgagcttcaaggtcacctgtacacttgggagagagggaggggaactcagaactaggaggaaagtcgtttagacagagcattggtttcgtccaactggtatttctttttccctcagacacatttggttaatttggatacttcaacctctaacaattgccctattttccttgagttggactgccattctaattctattcccaataatagatttagatttgagaatgcttggcttaaggaacctttttgctatgaaataattaagagttgttgggaagatgtgggtatccaggatatttttgccaaaattaattcttgtgcatctattctaactacatggaggaaagaatttacaggcaatttcaagaagagaataaaaaaatgtaaaaatgaattcaagatgctgaagaataaggaatattctctgtcaatctaacgttatagtgaagtcaagaagcagttatttgtcgtccttgaccagaaggaggctttttagaagcaaagagaaaaacaattttggttaaaggagggtgatcataacagtaagtacttccacaaagctgcgagtaatagacgtagtcataaccgaattactaagctaaaaaatgataatggttgttgggttaaatgggagcacggtttggaggatgtagttgttgattatttttcgaacttgtttactgttgatggaagtgtttgtgatgaggttattgactgcattaaaaatcgtgttactgaccagatgaatgtggaattgactcaagaagtatctactgaggaagtgaagtgggttgtattttatatgcaccccgataagagtcctagcccagacgggatgaccctaacgttttttttaaaaatgtttgggaattgtttgcaacgatgttgtcagcctagtccaacattacttcaatacaggtgagttcccattaggttgttatgaagccaatgttgttcttatcccgaagaaaaaaaggcctggaagaatggttgatttacggcttattgcactctgtaacgtactatataaagtgatagccaagatcatggccaatagaatgaagcctttttatggacgagattgtggtggatacccaaattgcttttattccaggtcaccttatctcggacaacattatggtctcctttaaggtattgcactacttatagcaaaaaaagaaaggaaaagatagttacatggcacttaagttggatatgagcaaagcttgcgatcggatcgaattgagtttttaagatcgattcttactaagctcagatttggccaggtttgggtgaattttattcataactgtgtcacttcagcccgatacaaaattacaaatgggggctatgacttgggtccaattttaccgagtcgtgggattagacaaggagacccactttcaccatacatctttatcctttgtgcagaagatatgaagcaaatggatggctacatggttgtaaggtagctaatggcgctccaaggattttttatatgctctttgttgatgacaattatctctatagtaaagccatagaagcagaagcgttgaaaattcaagaactgctccataaatttgagattgcttcaagacagaaggtgaatttgaataagtcgtctatcttccatagtgtcaacactcactctattcaaaggcagcacattaaccaactcttacaaatgcgacatgcacatgataatagtctgtatctagggataccaagtacgttggggagaaataagtctactattttgggctacctcatggatcaagttaaggaaagactacaagggtgggaggccaagattctttctcgagctggcaaggagattcttataaagacaatggcacaatctttacgaaattatgcaatgagtgtcttcttgttaccaacagagattgctaaagacattgagagtcaaatggcaagtttttggtggaaatcatcctcatgtgacaagaggggcatccattagatgtcgtgggatcgtatgtgtcatcataaaacatttggtggcatgggcttttagaacttgtgtgaattcaaccttgctctttttggtaaacaatgatggtgtttgctttctaggccaaactctttggcaacaaaagtttataaagctcgatacttcccaaatgagagttttcttatagcacaactaggcaacaatccaagctttgtgtggaggagtatttgggaggcacaaaatgtagtttgaaagggcataaggtggcaggtgggagacggttgttcaatttttgtattgggtgaaccgtggctgttagatgtggcgaacccgtttattgttttctctcattcgggtttggaaggtgctaaagtatatagtttgataagcatggatgagaaatgttgggatatggagattttgcaggacatgtttggggaacatgatagaagtttgattactaaaattcctttacaagtatcccaagagacagagtaattttttttggcatgtagagaattcatgactctacacagttaaagtgcgtacaagcttattcaacagggtaaaaggttggtctttaaagacaattactctaagttttggaagcatctgtgggctttgtgaattcctcctaaagtcaaaaatatgatttggcgcgcaggtataaattgccttcttactatgtgtcagttgttaactaagcgggtagctgttaatgctgtttgtcctgtgtgtgaattggaggaagagactattctccactgtttggttacttgtaatgtggtgcatctttgttgggataaggtcgggataggtacttagcaacctaatgataatgattttttgtcctggattgcttctttatttgaaatgttggaggttgataaaagggggttggtagctactctttgttgggctatgtagaacgccaaaaaatgattttttaaatttttatttttaaaaaaaggtgagtgcttcgaatattgttgtgtctgctaaaaactatctttacgaatggagaaatgctcaaaaatctcagattgagatattatggtctggtttctaggcgggtgatggagctgagcaatggatatgtccacctattaacagtgttaagattaatgtaatgcagctttgtttgaggaagagactcggtcgagagtcagagtagtttttagggatgataagggactctttatagagggtttcacaaaagtctttaatgaagcctctgttgggattttatgccctaaataaaacccatttatatctaatctgatttgttatcaa

SEQ ID NO: 295917 - DNA, 2322 bp, Cannabis indica
ttttatatgaaataaattcattggaaatttacattgactagattttataactatacgaattagaaagatattccctttagagtgattcaattgattttacttgctttcttgtttgatgatgagaaagtgcagaattgaaaagttttaatttggttttatgtggtgatgatttgtatttttactcaacagattacttttgaccaaatggcttaattgataaatgtcttagtaatattgaaagattatgtagcttcacatgatttgtaatagctgggagaatttgaggcttcacatgaaagaaggaaagaaatgtcagtagtttgatttaacatacttcattcatatcagctaattaaataattgaacatggtgcactgcattatagagtgtgcatcttttctgattaatatggatattttgccacgggagacagagtgacaataaaactttcttgaagaggaggctactagagaagaaaatgacatattgtgatcatagcaataacaggtggggtttgcgaaaattagaaccagaagaaaagaaaagaaaatccagggttttgggtgtttttgtgcttggtgttcaaattattactcatttcctgggctggaaaagagatggccagcacttggtggaactctagcttaatattactctagtacatacatataactttttggcgtttagtaaaagaaagaaacaagaagtaatagaatcatactccattgtccttgtctgctgctccatatttcaaatctagcacagaaaaataaataaaatgaagtgattgttttgagtttgatttgtagtgataaggaagaatgacattttgctattctgaattgttatctcacttgtctgttttttggcatctgtaatttcttgatttgctaatttttctaaatcataatattttttcaaggcaacgcatgacattctatatcatcggcatcacatagataaagtaagttcggttttctctgtctttatggagctttcaaaactgtagttggctgtatcacatcagaattatggcttacttttttgtttgaatttttttctcactatcacagtatgatcatttggaattccctggagtggttccgcgcacttttcttggtacgcatgcaatcttactattcttgtgcttacgataaattgaataggataccctacatgttctacataataattattgtttttttaaaggctctgacttcatggtctatttatgatgtcttattttgtagctcagtaacataaggcccactgttttggttccttgtgctatctcatttctcaagtactctttgttcatcatatagaaagtccatgtccttctgtatatgtctacataatatattaagatgtgtgtttgtccaaccagaaatgtatatgatgatatatatattccttttgtaactgaaatattctgaataatgataaaaaaaagattagtctccttattaaacatctaatttaccaagcaatgtaatctatattcctgtaggtgcgttgcttgtatctaccgtggcatctccagtcatattgataataaacttgatgcatttcccaaagctttatgctctctttgcaggttagcacttatttgttttttaagatgcttggaaaagtgaatggtcccttaaccttttttcctgtgcctgtgaaaagggaaaatttcttctatattaatgttgtacctttattgaagtgattatttttgagagagtaagtgtaatgggtgataagttgatctatgctacagttttcacatagatggtgaggaaaatcaggtcaaagagggtgttgacaatcttaaatgaggaataggtgtagtttcgtggctgacattacgagggagtgatggcccatggctttagtagatagggagaggaaaaggcagtaaagagcttctcccctcttgcattatatgattttgctatgtaatactatcctgtgacaagctttctaaaagaagaaagaacatattctagctgttgaagttctaggatttgcaatacagtaaagaaggaaatttaatctactctaatagtatactttttttgttatccagttcgcatggctttagtactattgataagacctgaactgttgctgccaggttattgaaaagtatatggagtataaaataattataataggaatatactgatctgatattaaaggaaaatctgatattgatattaaacaaacaagctgccacaattcccacaggtttcgagagcctggggtctctccaattgatgctgaaatcaataatcagatcaagcatgccccccaaaccactcaacacacaca

SEQ ID NO: 295918 - DNA, 5769 bp, Cannabis indica
tattttaataattttttttctcttcaaggaacaatttttttttttaactatttttttaaataaaagaataattctattaaaaggcacaaagctaacaaaacaaaataatcaatacaaaatctaaaagttaaagaccagatggaagactcaggctccaaactttagcagtatccaaagaaagaataatacgagcgagtgagtgggctaatacattaaaagaccacttacaatgagaaagagaaatactagagaaagatgaccaaacatttataagttcttaataatagcaccaaattcattggaacgtgtttctttattcaatgtagcttgtataagtgaagacaataaaagattatcgtcatacttatataccccagacgacgacaaagaatcatctcttgtaacaaagctactatctctgctaaatgaggttcataggctaccgccaccaacaccgcccctgagtagaaaacctcacctgactgactcatcaccacagccccaagactaatcttccaccctttgacattaacaccaagatccacaaataagctggcatctcccaactctagctccacagtccatgtagcattcgataggttgaccgacgctgaacaatctggtattaccgtcctagaagaagaactttgagcatcttgatagtgccaaaggaaacttaaaaaccattgggtcaccacatcatttgagagtaatttatggtcatgaacaaatatattactcctatgctaaatctgccaacagagaacaacaaattattcaatctcctacgttgaaagaatatccatacaaccaactaataattcataaaagctggaggccaacttaagagtgtctcaacctttcaacagttacccttgtctgattcatttgagtgaaggacataaccaatgagcgtgcaaagtagtcttattattttagaaacacatagggcaaacatttgcagtattcaggccatgacttttcaaattgacataacaaggcaggaaattaagacttgctttccaaaccattttttgctttgggggacactgaaagagaccacatgaacttttactagcgtggttgacccgaggaagccaacacttgaccccgctctaataccaatgtttaactgtgtacataccagtatcagtaaaatactgaatcaacgtatccttctaattaaacaacgaaacagaaattaataagatagctctagcttcaccttcatcgaaaagctttcaaaccaaaggaacgttccacatcccattctccaatttcaaatcactaacatattcaagctctgaaccacccctgaaagagtaagcccgactcacatgatctttacaaatccaagcatcttttcgaattcgaaccatatccccctttccaatcaaccaacgaactcctttcatccataagtcatgatcccaaagaatacttttccacaaataggaggcttgcttagtttctaccacctctaataaagagctattcgcataatagaatccttttataaccttggcagccaagaatgagggcagttatataacgggctgcatgtttagcaaaacaagattgattaattagaaacatgtctcgaaagcccattcaaccatccgtcttatgcttaggggtgtgcataaattgatcaaatctaatgacaaccaaccgattcaattacaattgaccgccaaatattggatattcaattgtgatcagatcagattggatgttatttttaaatatccaattagatcaaatcggatgttggataggctgtccaaaaattcaatacatccaatatctaatcaaactaattagtatttttatttagtttggatgaataattagattttatattgttatacgtaaaatatatatgtatatataaaaattaacattaaaattttctattttttttctttgattggatagatccaatctaatccaatacatactagacctaaaatattagatggatctgatctgatctaaaaaatactagttttaaaatatgggataaacccaaattaaaccaataaatatatttaaaatatggattatttcacaaatacacaaatacacaaatacaccaaaaatattacaaaaatacggtttcatagaattttaaatatttttacgattttttttattttgtttacagaaaatacggtctttttatgttttactcttgttaatttgttggatttttttattatatgtatgttattttttgttattgttttgatattatttagatgtcatttccatgttacttttatgtaattttcttgttgttcgtgttgtttttatgaaaactcgtaaaaatatgaacaaaattctttaaatgtaaaaatataattttttttaataaaaataatgtcttatgtaattatccatttaaatacatttaatggacataaccgatccaatttaaaatcttatagatgttggattgattggatgactgaaattaatttgatcagatcgaatagtaaaatctaacatctaatatataattggatcagatatgaatacacctaaaaatattgaatgtgatttaatgaatacccatacttattatgcaagcataacctagactatatacactagtgtaacttttgcctatcaggatctccaccctaccaagatcgagagagagaggaaatagtgccaaaaatatcattaatagagatactaatacaatcagggtagtaatcgccaaaagaataatagttttgctaaaaagtgagcaacactgttagcaactctaagacaataaaaaaagagaaaaaattaaagctattacaaagaatagtaatgcccttaataatatagctaacgtaagacaaatcaaaaatatgaaatgtactcatttaatatgagacaaatgataatggttaatatttcaagcttatttgtaaggcacttgatttattatttaattaagtttataattaataaattttaccaattatttataattggtataaaaaatttagataatgaaactctagtttttattgtgtcttgttttgacttcatgaaaaacatgtataattataggaacaataataattaaaaataaaataggccaatttaaagagttggttttggattttctctttgaccaatcacatttgtaattttttatgcattgacttttaaaaatgtcaaataaaaataactaaatcatttatgaaaatccaatcattatataagtccccccctcccaagaaattaaaaaataataaccatgattttctttatttatatctatctaatttaaattataaaaaccaatgccttaattgattaaaacaaataggctttaaaaggttaacgtgaagtgaggtttgtgtctttatgaattgtgacttttgactttatatttcaaaataaattattttttaaaaaaaaaataataataatagtattaaattattaattttttttcttcaatattttctccaacttgacaagcaatcacattcacaacatagtggtggtggtgggtattatttaatattcatttatttattttttgaaataatttaatattcatttattggtttaattattgaatatatatttcaatttttatttctgaaaatgtattaaagataaagaaccactaaagttggtatagcaatattaaagagcaaaatgtgcatttttcagatatgtttgtagaatttttcgcctgcaataaaatcttgattacaatatagttggcattttctcaatttagtatgtctttaattaatattttaaataataacaaacatatatccataaatatatattgccatatttatataaatctaattcacttatataaacatgagatagatttagtagcctaaaaaaattagttataccaataaatatgaactactaaatattgaggtttttagagtctcaataattataataattttataagatttacaaaaatttagataatttactttttgttattattattgttaactaaatttgagttaatggtactattttttccccaatttacaaaacagataatgttggttataattgttgaaaattgggggaccaaaataatatacatctttttttatatataaaaaaatacatttaattaagaagtacataattaattttgggtgagtctactgcactctctaaatgagtattttgatctccaatctattttgacatttagaagaattttttaatctattttttttttcatgatcgcatatgttgtaaccatttaggatcacttgtaaatttttaaaaaattctgagtaatttatatagtttgttacacgcacaattatttttcttattttctcaaaaaaaaaaaatctatttttcttatacgcatgtaagtaactatttgaactttattttcggcattgtaacttatttaaaattctctgaaaatttatcaagtgatcttaaatagctacaacgtatatttttttttttaaatatgaaacaaataaaaaatctacctgaatgattctggtctactacataaaattctattaattttaatcttaaatataataatagtatgatctcttacatctttttcccattaaaagttatgtttttagcactatgatctcttacatctttttttcattaaaagttatgctttcaactaacataataataataataaaaaaggaatgttctaattttgaggaatggaatatccaaaataagaattccttgtgatacaattataaagagaaatgtattatagaaccgttaagcaataaagtatgaagttaaagattgagctaaaaaactagttattaggtaccatgaaacatgaaagtttattattagaattaatgtttttttttttaagtttttggggtaattattattatcgttgtttcttgtttgggttgttcttcaaaatttatagaggtgaacaaatgttggaattaattaataagttatttaaatgaacaagttggacagttgatatttgaataaataaggtcagaaccataaaaacaatggttagtatggttaagaaataagaattgcttgtgttgaaaaataatgcaatatgattttttaaaagaaaaaataaaaaattatagagtatttattatcattactatgttttttaataattttttatagagtacattccaaacagaatatcaatgttttgagaaatctaatttgtaaaataataataatagtgccttaaaaaaatagtaatatatatacataattcttatattattacttatttacttttaataaacaatatatacaaacttttttttttcaaaaaaatacactattattggcaaccaattaaaagaggcattaatacccattaatgatttatttattgaatatgtttcccaacaccctctacaaaaaactattaatattaattataagaaaaaacccatttttgtattgaataagagaactaaatatttcttcatttattcatccaatcttctttttatttatataaacaagaactttattactcattttctcaattagttgataattgttcaaattttctaaattatatatttttttataatttattgtcttactaggacccgtttggcacagcttttggaaaagctaaaagtttctttttgaaaaagctgtgataaaattgtgtttggcaaacagtcaaaaaacagctttttgaagaatttttggagaagctacagctaaaagctgaagctgctccaacccaacttttaaaaaagttattttgattaaaagact

SEQ ID NO: 295919 - DNA, 4937 bp, Cannabis indica
atcaaatactgttatatatatatatttaataatctaatatatttattcctttttgttataatataatagtatgcaatactaaaaaaataatataatactagggcttgacttacagcgtcgtgcttgtggctatggtaggtcgaggccgaccgcgaaagaataatctctagggaatcaccaagaacgcagggaagaagaagaagaaacagggaccgacttcctcggaacaacctctcaaggttaaattgatgaacaaaattttggaggtggaagccatggagttctcggaacaagacctagaaacaaaatttggggaaaaggaggagcttaatgagcttattctttcccctaaatagtctctgcagtagatatagaggatggatgatatcaatcaagatttcaatcggttcttgatggcttcttctaggtgtgaagaacaagtaaaaataggtaaggaaactatttcacaaatcttacgttcgagtaatgtgattcaaaatttgaactcaaaatttggggaacctctgactggaaactttagcgagaataaaggggttaaaattgagattgaaaatataaaagaagaggtgaatttttggaattcctctttagtttgttatgttctaggagctaatccacctctgagaacaaactgtggaaggagaaggtggataaaataggactaataaactcggacgtattcattgtaaggtccactataatggagtatagagatgaagtgttgcacggggggatatgaaaccttggaatacaaccaccaattttagaaaggaggatgtgcgcactgcccctatttgggttcaattacgtagattggactttaaatactggggtaagcgttcactattcaaaattactaggcagcttggagagccactaaaaatagattgtattacaaagaggaaagaaagacttagaatcatggtggagcttaaaatttcacaagagtttctaaataaactacaatttactaatgaaatagatcaagaaatggaagtagatgttttatatgaatcgacccctactctttgcactcactatcaaggaataagtcatgtggcattagaatgtaaggagaagtcagttcaaaaacaagaatgggtagttaagaagaccttcttggagaaagtgcagtacaagattaaggaggtggatcaaaatggctttcagaaagtaaaaaatggtaaaaagataatgatacagcaagaccctccacgaaccacagagataaaaaatgtttttcaagctttaagggaacttgaagataatgatgcagctacggaacacatggaagaatttgagaattgaaactaatgggggtgaacctcctcaaactcatggatagaattatgagttggaatgtcagtggggatcaacaagcaaaataaacaaatggaggtcaagaaatcgattacttccttaagagttgtcttggttggtctccttgaaacaagaataaaagcttcgaagctaggggttgcatatcttactatgtttgatgggtggtgtttctctacgaacttggcctggcacccagggggacaatcattatcagttggaatcctagcatgtttgatgtcaatattctcttctgttctagccaacttatgcatcttgaagtggtttctaaggcaaggaaagagagatttttttactacctttgtctatgcatttaatgatgaggtaggaagaggaagtctgtggaaggatttagagaaactgggatcaggattagttgcaccatggttagttttgggtgattttaacaatattctgaataatgaggagagggtaggaagaagagtaaagccaaaaaaaaagtaaaagcttttcgaagctatattgaggtgtgcaagttagaaggtgtgaaatattctgggaatttctttacttggaataataaacaggggaaggatgattgaatttactcgaagatagacagagttatggccaaccagccatggcttgataagtttaacacaattgaagctgtttttttatcagaaggcacttttgaccatagtctggcagtactatcagtatatcataagatgaattttgggaagaggtcctttaaattttttcatttttggcagcaagctccggggtttattgagattctaaaagttaattgggagaaaaatctagttgggatgcctgagtataagttagtagggaagttgaagattcttaaaggggcattgaaagactttaataaaaacagtgttggggatatccaagttgcagaaacctcaacatatcagtcccttcttacatgttaagaggagctgaacaagaaccctttgtgtgaacaattaatggaaaaagaaaaggagatccgaaagaagtatggggatatccacaaagcttatttgttgtttctacaacgaaaagcaaaggtgcaatgggtcaaagatggagatgataacacagcagcctttcatgccagtatcaaaacttgaagagcacagaataaaatttatagcattaaagataagagtggagtttgggtggacaaaccagagcaagtcagctaagccttccttcaatacaacattgaaatattgctaggaaccagaatggagaagaggaaatcggttaagtcaattgtaatgcaagaagggtcggtgctaactgatcaacaaaaaaaatgttgttgaaacaatattcttcaaaagaagttaaaaatgcagtttttggtattcctggcattaaagctctagggccagatgggtatagcagctatttttatcaagattgggatatagtgggggaaggggtatgtcaagcaattatttctttttcgagttcagattagctcctaaaagagattaattctaccaccttaactcttattccaaaaaatagatgcccgaatattgtaagtgactttcatctcattgcctgctgcaatgtaatatacaaggtggcaaccaagattatttgtggaagattgagggatattattcttttgctggtagttcaaaatcaataaggatttatgaaaaggaagtttattacttatgatataatgatttgccaagacttggttaaacattatggagaaaaaaactcgaaagctaattgtatggtgaaactagatctccgaaagaagtatttatcgaagaaatactttacacctttcagtttccaaaagatttcattcagctcataatggtgtgtttaacaacaccaaaatttagtttaatgttcaatggatcttctcatgacttttttgaagcaaaaaaagggcttagacagggcgatccaatgtctctactcctatttgtgcttggcatggaatacttgtcaggatttttgaaaaagattggcgagcatagagattacaaatttcataaaaggtgtgctgaaatgcaattgaatcatctttgtttcgcagatgatgtggtattattttgtcacggggatttcaagtctatatatctcatgctacaagggctcaagttattttcccaaacttctggccttcttccaaatgagagcaaatctgttttctatagcaatggcatggatcaccgagagatacaaagggtcaaagaagcatcatgtttttcacactccttgttgccttttagatatttgggggtgccaatatgtgcaaagaagctttctacagtggagtgcaaaattctcattgagaaaatagtaggtagaatacgagtttggagttctagaaacttgtcttttgcagggccagttactttgataaattttgttctaattaccatacatgcttattggagccaaattataattcttcccaagaaagttttacaaaaagttaatactatatgtagagcctttctttggaaggggactgccatgcatgatgggccaggttctgtgtcttacgaagatgtatgtcaacccaagtaagtaggaggtcttcgaatctggaatgttatcgtcttgaatagagcattgattggaaaaactatgggctattaaccaagcaagataatctatgggttaaatgggtccacattgtatgtttgggaggaactaattggtgggactataatgtaactactaattgtagttggtattggaggcaaataggggaaatgaagaatcaaatcaagggaatcaacaactttcaacaggagatggtaagtagttacaacattaaacatgtccataaattgttgtctatggaaaaggatagagtccacaggaatgatgttgtttggggacgattaagtttaccataatatcgtttcattctttggctggctgttctagagcgcttgcaaatcaaagatagactcttcagatttttaatatttcatcggattcagattgcttggtgtgtggctctaatgttgaaacttctaatcatttattttttgagtgccatcttagtgcacattgtttggtagcagttaaaaaatggtcaggctggtcaacaaatattacaaacttaacagaattgataaggatcttgaacaattatttaggcactattcacgttggtcaacgctatgaatagtagcgttgaccgatgtgaatagtgcaatttgtagtagtgtgagtaaaatcaagaagagcgtgctagccttgacattggctgtaagagtatatagcatttggtggtgtaggaatgactctttttgaatcaaagagtgcaaagtgtaaatacaattgtgaaaaagattaaaacaagtatcaagaatagagtgttagtaacaatgccaaggaaaacaaagcaagaagatgttttgtggattgagaggttgtaaatgatagtttaataagcattttctagtgctgataggatgtaatgaaaagtttgaaggaatacaaaacttaactgatttatctaaaaaataatttaatttaattttatatatttgtttaaaaaataatatataataaatgtatttttataattttta

SEQ ID NO: 295920 - DNA, 3039 bp, Cannabis indica
tcaggaaattcactttgggtttttcttcaaatacagatatggcgattaagattgaaatcaattcttatttgggtttctgtgagctagatatgtcaaataagttcctgagcaatcctttattgatgtctaatagccaagttagagactttgagttcatcaaggattgtaacttgagaaggttggatgggtggaaatgcaaatttctatctcaagtcggtaggaaaactccgattaattcagtgatctgtgctacccctatctatgccatgtctactttccttctccttaagggtctatgtgagtcccttgataaattggtgtgtaagttccggtgaataggtacctctaacaaaatgaggtatctagctttaaccaactaggactcaatttaccttcccaaagatgtgggaggtttgagtattaagaagattgcggacttgaatttctcccatgtatctaaacttggttggaaactggaggtaggggatgcttccctttgatgtcatgctttagagtgaagtacttcccccgccagacttccttttggtcaatgtctcttagctctaatgcttcttggctaacaaagggtataatctcgattcgtgagtttttacatagtgagacatgttatttggtaggcaatggcatgctagttgatatttggcatgctccttggatttcgtggcttgattgggaacattatcaggatgcctttaatcctagagtgtgtgtgtagggggattactcttcattcgactcttcttaatcatgttggtttatggagttttgaggcttaaaaggcttggttcattctaagcttggttgggtctatgatgttagttaaaagattgcttatcgggtcttctgatgaacttatttgaaaggactcttttgacggtaaattctctgtaaggagggcttatcatggtcttatcaaatcctgtggtaataatgtctcacctatgtggaagaagtctagaaggcgcctattcatgagagggggtttctttatgtggaaagttggtagagacatcttgccttttggtgttagacttcgtcaaatcttcagcagcaatgttaattgtgctatttgtaatagccatgatgactcttaccagcatttgttctttcactgtcttctagctcatcatttgtggttcagtagcctgtgggctattaggagtgatattcttctgtttaactatccgtttgatgttgttcattgaattctacaccctcctttcttgagtaatacggttagtaatgatcttatgtttttcaaatgttttgcttctcttcgttgtctttctctgtgattggctaggaacaaagcctttcttaaagggattgttactactatttttggaatttgttctactattgttaaggccattagagagatggattgttaatcccaagaggtcatctgtgactgctctgcgggaaccttttgggagggaggtgagataccttttggatctcatattattattgttattgatgctgcatattgcgattcacatgcctttggggcaatgatggtttttgactcttttgggcaggtggtggaagctatggttgttaagcttattggtgatagtgctttgggtcgggggcaaagtctgtgacaattctgcatgctgtctctcttgccttgtgtaggagttggcattcactaaattttttctctgatcgtcaagtgttagtcaatggtatcgtgcacaggtcactgtcgtgttgtgagaggagtgctttcctctatttgttttcttgttttgatttgctgcctagtgcctcggttgtttgggttcctaggtctttgaatttgactgtccataattttgatgcttgggcaatttttgtgaatttttgtggtttctttttttagggaagtagaaccctttgtttctactaatgaacttgtttgtggcttcacttttacttaattaatgcatgattttgaattatatatatataaaaaatactaccattatactatactcagttatatctatcatattgcaagcatagcatgtattccgtatactatgggttcgttaaactataaccccatgcatcgggcatagctcgtaaagtgtgcactacgcgtacagtgagcttggccacttgtcctgcacatttgagctcataaaatttttcaaaatcccacatgtcgttgcactatgagtacccctcaaattttcgctttggggtaattaatgatacttttagaccttttactttcattaatttaagcttcgtgggaaaacccactagcttctgcatagtcgatcatctcatggacattctataacgatagtgcacttgtgcttgtgtcctaatactaccaaacaatacaccaattactttatgatgtagccataaatcaaagtctgactcacctagaatccagaatcaatatgcttagctttttagtgggattaattgtgccattacccttttagccgttactgtattataatacgatgtcaacattttgttactatttatagtaacaactaactaactacattaaagcatctataagaacgttgtccctggtctcaatttaccatacaagactaatgatccatccccgtagtgagtcataacaggtaggaagaataagaacttggtgtcccgctcctcatcggtgtccttttccaaccattaattatgatgttactaaaactttcaattctatcattaattctgttactagttactcggtctcgcgtccttttctactagcattctgtgaccgtttatcagaaatagtcccatggctattcatagccatagaattacttaaatgcaactatctcaatatatataggattattcaaacattctttaagtttttttttattaaaaaaaaataattatatttctccttaagataatttgtaaaatttttacataaagtttttttttatttcattcttatgatattttataaaaataacacgaaaacaacaagaaaattacataaaagtaataggaaaaataacatccaaacaatatcaaaataacaacaaa

SEQ ID NO: 295921 - DNA, 7619 bp, Cannabis indica
atttcacgtaagtttgttgctttctattttttttatctttatttaactatcaactggtcttgggataaattattttaagcttcacttgagattcgtttctgcatttttgtaaatcttgggtttgttccttattcctgattggttattggggaaaaaaaaattaggacttgattttccaagttcttaatatttcattagttgttttgagtgaaagaggtaagaatatttttttttaaattatttttatgaggtaatgctagttttgtcgatttatatattttgtctattcttttaagcttgatttttccagtgaataaatattgagtaaaactgttgccattattaaaaaaaaatagaaatgtagtatgggtcctatgggacatattgttggttgttgttgttgttgattatctctatccataagtgtagagaaaaggaaaactagttttttttatacactaactccttctttcttggtcaattatttggtaccatcactacaatgaatgcttattactgagtattcatgcatttcatgtggtctctctcttgacttgatctatcttgctgtttttaagtttagttgtttttctctgtatttcatcttctggtttgtgctagttcttgctggtgttgttacctttgagtttagactctatctatttaggggttactttccctgtgttgttgggggtgattctttgcacctgttttggatagttgatctatttaggctaattaagattttcacccaaaatcatgcccctaaacttttcaaaccgttcaaaatttctcctgaactattgagattgatgttggatgactcttatccaattttactaacggaagcctaacgtggctgaaagttctggaaacacgatttgttagatgtcaaagttcaaagtacatggacaatcgttctgttagtaaaattgaacggaattggacagaagtccttgagttcaacaatttcaatagtatttgggggaatttttaacgacatgaaaagttcaggtgcatcctaattagccaactatttatttagtgtattctttgctattaatctgaagtaattatatttcatattttgctaacatctaaagtagttgttgtttagcaattaacattaataagtcagcttacatctttgatcaactattttattatcttatatgttaatattttggttttgagtttgagaattaaggtcaatattacacttttatgtgtcaaagtgctaatttttgtttgctgtagattgtggatggaatagactacatggaataagaggtgatgaaaagaattagagctggttgatttcttccctgcatcaaatttgtaacagaaggtgaattaagtagattatactctttcactattgctatggcagatttctttaaaatatctagtacgttttggttggtgtggacccaagtaaccaaagccaagtcaaagttactaactttctagtccctattgacctttcaaaacaattggaaatctctagagaatttgactacaaacaatacaaaaacacgttaacaattcacaattcacagttagtttttgaattttcaaggtcagtaatggcatctttggagttaaatgatggttccagcaaaagggtggaggaagccaatgatgaaggaaacttgaagaagctagattctggcgagatcaagcgcagtgatagtgagaagaagaagaagaagaatagtaaaagagtttcttataagatgccaaagcttgcgtgtttctgtataaaatctgaatcagacgggaaagggaatttcgaaatggaggttgaagacgagtttcgaagaaggaatcctactcacttggtcataatggttaatggtcttattggcagtgctcaggattggaagtttgctgctacacagcttttgaaaaagtacccagatgatattgttgttcactgtagtgaatctaattcttctatgttgacatttgatggtgttaatgcaatgggagagagattggcagaagaggttaagtctatggttaagcgccatccaagtgctcaaaagatttcatttattgcccattcattaggtggcctggtagcaagatatgctattgctgagctttatgaacaagatatcacaatagaaccatctcaggtaaatggagattgtagagaagctaaattcaaaggcaaaattgctggactggagcctatcaatttcataacctctgcaactcctcaccttggttcatgggggcataaacaagttccagttttttgtggcctttacactatggaaaaagtagcagctaggacatcttggtttcttggtaaaagtggtaaacatttgtttctaactgacggtgggaatgagaaacctccccttcttcttcagatggcaagtgacactgaagatcttaaatttatttcagcattgcgttcctttaggcgtcgtgttgcctatgcaaatgcgcgttttgatcaccttgttggttggagtacatcgtctctaaggcgtcgaaatgaactcccacagctcaaaaagctgtcacgagacagcaaatatccccatattgttaatgtggagacagcaagaactgccagtcctgagaatgaagtaccaactgagctgaaagtagtaaatggaggggaaaatgttaacatggaagaggaaatgttaaagggtttgacaagactgagctgggaaagaattgatgtgagctttagcgggagtagacaaagatttcttgcgcacaataccattcaggtgaaaggatcgtggatgaattccgatggagctgatgtgatccagcacatggttgacaattttctcttgtaagcagctgttgttacgcgttgtcacaatggtctgaagttaggggatttgctactaaatcaaaattcagcattttgctggtgacatccatttaaagcagaaggtgaagcttggtgtggcggttcttgttattcatattaaagacatgaaccttcctatgccagacttagatggttcagagagatctatagggatgaatatgaaaatgggtatgtatgtatttgtaccctctgtcattctatttttatgtactacacacatacaattcattagattgcagagaaaggacaaaacaactgaaatttgttttgtcctttcaactataagactaataaatgttgtgatgtaatttttataagttaatttatacattcaagtaaacatgtcttgtaaaaacttataacaaatcattctgaatagacgatttcattgttccaaaataataataatagttttattgtagttttagagattttgcattggtctcaattgtagtgtgttgctttgtctcaagtgtttatgtggctaaccattaattaatggcaatataaatttgagtggggtttagatataatagtttctttcatttttatattttcagctcatttctactgctttaatacattgatgttttgagagtgatatttatactctcttttggggaatgagagaaagacctaactgtcatattttcagcttattgcaatccattaatattcataccagcttaaaataagagcatataattatacttcaagaaagaaatatcaatccacactggatcagtacttcttttggttcttttttttctttcatcagtaagcaaagcaaaggtgatcaagccaaaatcacttcttaccagaaatgaaatttgcacaatttcaattatgtaaaactagaaaaggccattcaaggagcttctatgaacaattgcttttgccagtgtcttcaaatgaacaagaattcaaagcagaaatagctgccattgatactacaaatcattaaaagaaaatgttttatagtgaggggactacaagcaaggtacattttactagatggcttttatacagcaagaatttctgattttggattagttgaaaatggtctataattataactatggtttttttagtcttttttgtctttctaaaatattgtaagagttctttgtttaatgagtaggtacttttactctgcataacaggttcccatttcttgcaatattttcatgatgccaacctacatacattacatatataaatatttatatatataaatatattgtatcataaaaaggtacaggttgagtggcttccacattttagcaaataatctactcaccactataattggttacaaatacagtccccaatggatcattatattctgtatatattgcctattattttatttcttatttaatatttaagctttttattctttctttttttaaaaaaatgcttttaatatttctactgtacaacaacatattattatactcttccactaatagattagtaaataacatattcgtaacaaaccatgtgcatggtccaaacaatgaattttttgcactggtaactgtgcatgccaacttaaaatatgtatatatatatgcctatgttaatatatatgagttgtattaccatctgtactagtgtttacctacttactagtaattaagatctgaaaactcagtttgaaaagccatggcagagttgattctctctccaattgctgagaaaatcattgatggtttgggatctgaagctgtgaagcagatttctatgatctggggtgtgaaggatgagcttgaacaactcaatgaaaccatttcaacaatccaagcagtgcttttggatgctgagaagaagcagagtcacaacaaccaagtcaagaattggctccaaaggctcagcactgtagttcttaaagccgacgacctgatggatgaggtcaacactcaagctttgagacgccaactcatcatgtctcaaagcctaatggccaaccaggtacatatttcatagctattgttagtgaacacatctcagattacagttaattctgttatcagttatgtgtgttaggctcaattagctagctatggcgtttagttgggagaaatgaaaatataagaatatgaatgagaatgacaataagaataggaatcgaatggaatcaaatttaaaatgctaaaaaaattattaaattttcttcatcttgcaatagaataatcattcttttcatttcaaaatagaatagttcattctattggaatgatattccaatactttaaaatgcaaccaaacaaataaatagaatgaaaattatttcctttccattccatttcaattccattgttaattgtctttaaatgtttcagattgtttgttgtcttctttctgtttttactttcttgatgtgttttcgtctctataaatagaggtcctggagctcaaccattcttatggtttttgagcatttcactttacttttctctgatctacatacagtataaatatatataccattcaatctcgagactttttaatattttagatttgtaatgattatgtaaataatattttggttattatctattgtacactataaacatgtaatttattttcaaaaaatattatgccactatacaggtgtgcactttcttttccagctccaaccaacttgcttttcggctcaagatgagtcgtagaatagaagccatcaagaaacgactgacttccatttccaatgatagaaactttcttttggacaagggacgtcaagacatttcgactgttagaagagtgagagatacttactcttttgtacgtcatgaagatgttattgggagagatgaggatagatttattcttataaataagcttttgttggagaattgtgaagagagtgtgtctgcgatcgccattgtaggtattggtggcttaggaaaaacaactcttgctaaaattctttttaatgatgagaaagtccagaaacattttgaattaaagatttgggtgtgtgtgtctgatgattttgatttgaaattaattcttaaaaatatcattgagtctacaaaaagtggtagcaaatttggagaccttggaatggagctattgctaaagaagtttcgagaagtacttggtggaaagcggtattttcttgtcctagatgatatatgggaggagaatcgtaataggttgttggagttaaaaaatttaatattaagtgaggaaaatgctgggagtagagttgtagtaactactcgtagtgaaaacatcgctaaaattatgactaccaaacaacaaccctatcgactaagggcacttgatgaagatcaatcctggtctttgtttagaagggtggcttttgaagatggatcacaagagctagaaaactctagcattgtgaaggttggaaaggagattgtgaataggtgcaaaggtatcccgctagccataaaaacaataggaaatttgttgtttggtaaaagatttgagttagagtggtcttcctttaataaggaattttcaaaaatatcatctcaacaggaagatgatatcttacctaccctcaaattgagctatgatcatcttctctcccatttgaaactttgttttgcctattgtagtttatttccaaaagatgaagaaattgaggtgagaactttaatcaacctttggatggcacaaggatttcttaagttatcagatgcaagtcaagatcaatgtttggaagatgtgggttatgaatggtttatgactttgttggaaggatcattctttcaagatgttgaagtagatgaatgtggcattattacaacatgcaaaatgcatgatctgatgcatgatcttgcagttcaagtagcaggagagaaatgtactacttttgtaatttcaaatggccgaggaaatatcaaagaaactactcttcatgtgtcttttgtaggtgatacttatttggaaagtgaactctcaggtcttttggttcatgcccaaaagtttcgaacatttctttgcaattccaaggacgaaacattttgtgatgcaataatatcaaatagtaagtttatacgctgtttagatttgtttaattcaagtatgaagcaattatcaaattctattggcaagttgaaacacctgagatatttagacctctcgtggaattctcgtctcaagtcacttcccaattcaattactaatttggtgaatttgcaaacattgaaactcaattattgcttcaatctcaaagaactgcctgcatattttgagaaactcatcaacctcagacatcttgaactttctcattgttgtagtttgaattctttgccaagtggactaggtaagttgacacaattgagatacttggatctttctgggcattcaagtctattgtcactgccagattcaataaatgatttgttgaatttgcaaacactgaaactccatctttgctcaaaactaaaagagcttcctagagatattaggaaactcatcaaccttaggcatcttgatatttctgattgttataaattagagtacatgccacgtggactaggccaactaactaatctccggaagttatcaaagtttgtgttgatgaagagcgaaaaatgtataacgaggcatggtgctgggctaaaggaattgatgagattgaacaacttgagaggtgaattgttagttacgaatttgacccatgaaaaagatgtggcagcagagtatgagggagcaaaattaaaggataaacaatatcttcgatcattgagattggagtgggattctgaagcta

SEQ ID NO: 295922 - DNA, 3482 bp, Cannabis indica
aattgtgatatataagatgaaagggctactcctcccattgccaattggttttgggatggaacctcattcatcttattcctcaaattctaacaaaaccacccgaagctaactcaagtggccataagtgagtgtctatgttagaagtcttggatttaaatcccaaataaaatataattttaataaacaaacgcttaaatcaattaattactacacaattagtagagttaaatcaatacttggtcaaatattataactaacaatattcataaagtgaatgcttattatgagacatccagtgacgagtttccgatatagaaaatgacagcacttaaggaaagacaaattaaatggtgctattggaaagataatccttcgatttcacatttctaaataataaatatgtctagttccataaacataaagattgtcaattttctcactttaataacaaatgtttgaaaggatcccctcgtaaatttttttttattggattaaaaaatattttactcatacaccaaaaccaatcttaaaccacttttgaagttgtaacttaagatgaaaaagattaccaaaaaatatatataattttttcgatatactatttttgactcttttgtaaggtttgtaggcatgtatctctaagatactccatacacagcatgccacgaagggaagaaagcaccatcgtaacgcctccttatcccaaatcctcagcattacttccccaatgaacaaaatgcttctctaagatactcaattcaataaattgtatggcagggaagaggataccccacaaagctgagcaaaatttcctccatataatccgtgctgagaaaaattattttgtcttcttctataagtcgtcctagcaaccaacttatcactttctttgtctagtgggaccaagtgatatttcctatttatatccaaccgaaatagccattttcttaaaccaatacaacacaaaaatctaaatactttactgctctgtttcttactccctgttttgaagcagagtaatctgcttttctcttttattacaacaaacaaaaataatccatctcaactttcttccctgttcatggctcctcttttttccatactcttattctctctcatattctcctcaagccaagctcagcgtccaccatctcctgggtacagcccaagttcaaaatttggttcaattacctttgctcaaggctttaagaacctttggggtcctaagcatcaaagccttaaccatgactcgttgaccatctggcttgatagtagctcaggtgtcacttcgtaacatcttacccattttcgtgctcttctcttttaattatgtctaacaaaagaaatatgaatcaaattgagctagctcgtactgattttgctcttctgaaatcagtgttgaatagtgctattttgtttttctactaatttattggactgcattttgctctcacaaacaggaagtggtttcaagtcacttcatccatatcgatccgggtacttcagtactgctgtcaaactccaacctggttatactgctggagttatcacttcatattatgtatgcatgttttgtcttagaactaaagtcttcttactcaaaactaatatatatatatatatataatatgttcaaaagtgatatctgttattacttttgtggtgcgataactaattagagaataaattgacagctttccaacaatcaacagcatcctgggaaccatgacgaaatcgatattgagttcttagggacaaccccagataagccgtacacgttacagacaaatgtttacgtaagaggaagtggagatggaaacatcataggtagagagatgaagttccatctctggtttgatccaacccaaaatttccataactatgccatactgtgggaccctagtgaaatcatgtaactacttttaaccactcttattatctactaagaagtaatatttttgtgtaatttgctttatttttcttttatgatagcagatgctttaaattgaagatatacgcgtaaatatataggtattggatgtgtatatatataggttccggatgtcaaaactttataatactgttaaaatacggaaaacatattacaggaaatatataatttggtaataacattgaatcgtagattactctagaagggagccagccgtatacatataatcattttaatgtgtcagatacaaaaaatgtatgcagattctttgtggatgatgtaccaataagaagttatccaagaaagagcgatgcaacattcccagtgaggcccatgtgggtgtacggatcaatatgggatgcatcctcatgggccactgagaatggcaaatacaaagccgattacaagtaccaaccctttgttggtaagtacatggatttcaagctcatcggctgcaaatcagatggaccccacttcatgccgctcgccctccgtcacaccctccggcactactggcctaacttcccaaccagtactcagccttggcttgggttcagaacaattacttggtctatgattattgccatgaccccaagagggaccatacacaaacacccgagtagttaaaaagttaaataacctggcttacaagtttggttcttgtcattggtgtgtgctaccaaaatatagtgtgctttggcgtttttttagcattattatggtgtcaacaccataccgatgtgacgcaattgattagcggcttcatatattatttactaaatcaaattatatggtgcctttttttatactgtaatttgtaatttgggattaaagaaaaatattcaagtgtgaccgtgtgatagattaggagagtcttgagatggcccccttgctaaaatagttgcaagagtagttgaccgtccgaggccccccgctctatatgatttgcaaatgatcattggccttatttaactatattgtaagtatatattttcgtttgttattgttgaaaaatacgtccagttctattttttttgaataaactaccacatcattatctcttacttcagttacttgtttgttataagcagaacagaaataaagaaaaagaaaagagaaatgggttttgattacttagggattttattggtgctcattttgactttgtgaaaataaaatgaaaagacaatatagtgttaggaagtattataacaaatcaaaatataactcaaagcaaaataatacaattataaaaacaaagaattattatgttataatttttaaccaaatatatgttgggttttgtgccctaaataaaactcatttcaatataatcagatttattaattaataaagttcagaaatcattttatgttgcatggttcacatgatttatttcatgattatctttaatgtataaaatctttaaatcccagaacatatgtatttgttcatgattatagtgttgtcaacacagtagaatataatcataattatatgttcaaagtttaatttccttgatttgtcagtt

SEQ ID NO: 295923 - DNA, 1691 bp, Cannabis indica
ttaaatatgccaaaaatggaattaacagtgtatatgcatattgctaggtacacattctctaaaatatattatgaaaagagagttgtagagtttgaagtaggagataggtatccgatctaatccaatatttttttttccaattcgtggatttgaaaaattatcatccgatccaatccatttaaacctcaaaatccaatccaatctgatccagttactaatttgattgaatcagttttttaattagatatccaattacacacaatctttaatattaacttaaaaatatgaaaataaatacgtaaaacttacaaatttcacaaaaaaaagtacactaaaaatataattaatatatatttttatttttattagttttcattatataaatcaatataaataattttttaatatatataattggatcagtttttaattggattttaagattgacatctaataattgatccgatccaattataattcaacttttagcctccaatccaatccaattataattgaatattcattcaattttttgtaattagattagattggctcggttcggttcaattgtattggattggatgttgcccaccctagtttgaacaatattgaaaatcgaaatagatgtaactttatgaaatcactaattgaaattagcaacgaattaattaagtagctttgaatctttttaaagaatataaaaataagcatagctggtaatttaattactcatgctaacaaggtgccagtgtattataattagaataaatgctcttagctaagaataattattttttgacatattagctaagaataatttaaactactaatcatatattcaaatgttaattatggaattattttattggaatcggaatggtttacgtgaccatcgaccaaacaaaatacgtgatagtccaaatatttgagttaaaatcgaagaaaatttatagtcgttaacatcaattttcctcccataaaattggtgattattattaattaattaatttaaaataaatggacctctatatgtagaatccctatattttatcttgcttttttaactgatatgctaatgctcttttacatttaatataataagaatttgattagtgggttcattagtcattacgtactgtccattaatttgattggtaaagctattttacaaagttgaaaggaccttcaaaagttcagtactaatcctaacagaagcttccttcataccacaaaagggtacgttattcctttttttttctttttttccttttctacattaaaataataataaagatggtgctcctacacagtaatcattctctttctttatgactacataaagttattaattttaattgattcttccattatcagtatcattatcaaaatattgttataagtagcagctagcaaaaaagattggtcaatttgttcattaataatatatatttcttcctgttagaccaacgcataataataatatttcgtactgatctcttattgattatatatattcgcctcatcttcgtaatattttctctcgtaaattgacaaaaggtttttttgttgaaattagcgtgatgtcattaaataaaaagaaactagatctcataatcattacataacaggttctccggtaatatagagaccgggatagatccaaacatatgatgagcaaaggcccatctagc

SEQ ID NO: 295924 - DNA, 3242 bp, Cannabis indica
aaaactgacgtcaacagtttgtgctttcattgagagcgctgtggtgaaagtttgagtatttcccttttggaaaactcattatttcaacaataatggcagactctccaaacaaaattgacatagagataagtcaatatccatgtggcaaattttgccttgcaagattgtttgacgagtagccttaatcgccactaggggcacaacacccaacattgggggaaccaatcatgaccatcgtggaggaaattgaagaaccagaggtgccaaagcttgaggaaattgatcctcgcattgaagatgacatgaccgagcttggtcctattgaagagcttgaagaaatcatactaaatccagaagaaccaaccaaaactgtgaagttggtaagcacctcaataaggaaatcaaaaagttccttatctaattcctacgtgacaatcaagatgtctttacatggctccactcagacatggtggggattgatcccaatgcaataactcatgtcctcaatttggattggaacatccaacaaaacgacagaaaaggaggcctcttgatgagacaagatatgctgccttaatggaagaagtagataaaactccttgccaagaattttactcgagagatgttctatcccatttgggtggccaacctatttttaggtctaaaaccaaatgggaagtggcgcacatgcatgaatttacagatttgaacaaagcatgctccaaggattgctttctacttccacgtattgatcaattagtcgatgccatcgccaaacacaaactcatgtgattcatgaatgcttactctggctacaaccagattcccatgaatgtcaccgaccaagaacatacaagttttaccgccaacatgggattatattgctaaaatataattccattcagactaaaaaatattggcgccacttaccagcacttgttaacagaatgtttatcgatcaaatcgggagaagtatggaggtctacgtatgtggacggcatgctagtgaagactaaaataacaaagaattacatggaagacttaaaggacatttggtgtttcatctagaaattttttgggttttattgtcaatttcaagggcattgaagcaaacccagaaaagataaaagctctcatggacatgccttcacctcaaagaaagaaagatgtacaaatccttattggtcgcattacgacactaaataggtttgtataaagtcaaccgacaaatgcctccccattttcaacttactttggggtagcaacaaagtggaatggacaaaaaaatgtgaacaagctttccaagcactgaaaaaacacttggcagagccccctattttgtccaaaccaattacaggacagatcttgtatttatacatggccataactgagacaaccattagcgcaaccttggtgcgagaagagaagaaggcccaaaaaccactatattatgtgaggaagcacctcttggggactgattcaagatatccagtcatggaaaagcttgatttttatttggtccatgcatcaagaaagctccacccatatttccaagcacacccgatacatgtactcactaattaacccctttggcaagtgctaatgaaagcagaagcttcgggtcgactactcaagtgagttgtcgaacttaccatccaagaactaccataaaagcttaagctctcgttgactttatagccgaatgtactaggtttccagaaggagaagaaattaaaaagccacctcagtctacatggcagttatttgtcgatgggtcatctaatgaaaatagctcagaggtaggaataatactagtcacgcctgatggctatcgaatccatacagccttatgatttgggttcaaaacttctaataacaaagctaaatatgaagtcttgcttgtcagcataagactcgcatggggattacaagccaaatccataagatgttttagcgactcacaattagtagtaaactaagttctttgagaataccaatcaagaggatccaacatggtctcttacttagcaaaggcacaaagcctattccaacaatttgaatattactcaattgagcaaataccaagggaaaaaaattccaatgctgatgctcttgcatgacttgacttgacaccacaaaagaagctgacactctctatatggtcccagtggaacattttgttgggaatattttaccaagatctagatttactaacaagtatgttgattaacatcctaaatgtgaatctctaatacagtgaaattaaacgcataagagtttagaaaaccttacattgattgcagcgaaataataatgactcattcccctcagatctctaacctttgttcctttctgtcttagagtattatcaagatctgagcctggatctctttctctccttcaggtttggtttccaccgtctttcgcactatgattgagtacttgacttgctatgtgtgggcatggaactctatcacaatgcgtcaattatgaagaacaatgaaggaggctcgaaattctatagaatgtgtctctcatctactagttgtcagggaataaaaattaggtttaagtttggttgaagtgaataattaaaattggaagagatgagagcatcatattctttttatagtattttaacttaggtttgaattatatggattaaaaagaataaaataatgggcaaaattacacatagtggccaaccactaaagggccttttactagttacaattttactactttatttcaacaacttattcttctttcaataataccatattttgcaatttaaatcttataaatgtcaaaactatatatttaataattataattaattatcaaataaaatggctagttatattatttattaattagaccatacaaagtctcttaattaataaattaaccctaaaacattttttcttcacaattaagcccttacttagtaaaaattcataaatatgacatagtctaattttagaattataattgattaattaaacaattaactgagtttgctagcaatattatctcaactaatgaggggaccatgggtctatataaccgagcttctaataagtagatctagaatttaccaagtaaattctctaacttattaattcctccttgtgccactatagattcagaattatattctcaattatatagaatgctctatatgtaccaagatatagatatgtgatgattatccattgttacaatcttaatagtcaaagatc

SEQ ID NO: 295925 - DNA, 9862 bp, Cannabis indica
cggatcactgacccgacccgaatgaatggatctttttgccatgcttaataccaccaaacattgaactcccttcgacttttgatatgtgtgtgcttacttcatcccgaagtaaggcttggagaagtcttctcccgaagacccttctcttgttcaatgaagctcttcaacctattctaagaatagtgtaagaacaataaacaaagactaaaaccaagtagaatactctaggttttcacaaaataagctctctcatcacaaagataaaaataaaaaattatatgactagaagggatgataaggtttggcttctctctaggttctatttataacatatagaaactctagagacagtcaaaaatacgttttcacagatgtacaaaagtttcctaaaataagccctcatttgcaacaacaaaataggactctgtagtggcagatcaggctgaatcgaaaaactttctaaataagtccaagatcaccaataattagactttaatcctacaatataaagattatatgatctgctattgctatccgtgtttccagtaagggacacgtggatttgaaatagaagtttaaagcccatcagtgggcccaaaataacgtaaaatgggtcgagcccaattattatctagccttctgagagaacaactgcacgcctctctagatgagctttcgttaaggctattttgtatccggaaggatcctaactctgtgtatctggaagaaccctttagcatgtgcctggatgctagttgtagtttcccttttactgtttcgtgcataataaggatattactttcctcgaatctcagacagagaagaatatcaagctaaaataggaaactacataattaaagatcaagtaattaatgcataattaattacccccaattataggacatagtaacaacaggtatgaccgtgatcaacatgccagatcaacatacatttactgcttaatacgctgggcttcaccagataagccaaaatctatgtattatttgtatactccccattagcgagaaagagtaactaagcatgacatctattactctataaatacacactaaatctttcatgcaaatgattggaaaattcttgactgacttcctcaagaagataatagaatgctcatactcattgtaatccttaggcttttctagcttatttgataataatactaactcatggactaaggcttgttaatgccccaaccacgtaaaaactccgagtgcttttttttgtaattgattcttttaattgtattttctttttctcgaatattaaataatttgttctccaaaaatctcagtaaatatttagtgctttcattgagagatgaagaaagtagtgatactattcaagataatgttcagtagttatgctaagtactcaactgaaccaaatctggtcttcacttcaccgatcctaaaaagggtgatgttgattccaatgctaagacaggagacatagaagatcaaactaaggtaaccagtcgccacaagaaggatcaaacttacaaggactccattcttgaagatcctatgaaagaaggcgatgaatcagaagagactaattctactgaacccggagataataatcaagacatgcctgttgatgatgacgctgaaaaggaagacgatctagatgagtcaaatccaatggtcattatggctagagagttgaaaggaaatggaagataaattttcgttacaggaacaattcttcttgttgatgcatggaaaaatggcgagaatggaagttataattaaagcactgaccactgccagcaaaactgatcatactactccaaaagataatgctacagggaaagttgatttctaaaatcctagaacctaaaattctcataaggaaaaaggtaaaggaaaagtaggtaaaagttcaaacaaggctgcaccaactgaacagcaaaagaagtctaaatctgccagccaacctcaaaagaaaaagaaagaaacacatgcctcagggcaaagaaattagactaattctagaggtagagctgcgcataaagacaaatctaatgttaaagctaagaagcctactacccaaaaggacacaaatcacagtggcaattatgttagtggaagtgacaaagtcaaagaggtgtatccccatcagatgacaaaagtagaagtgtttccacaaatgatcttcgcacaagactgaacgccaaaagataaaaggttagaactgagaaatcatatcaatgagcctattcacggaagggagtcgctggagacaccacaactcaacatctagagcgtaaaattgaagagttaacaaagctcacagaaatgatctctcggaagcaaaatggaattgtgttcgactcagaagaggaggacatggaaccatgtgttaaaaggattatagatgcgcagttgttggagaactttaaaattccttacagggaattgtatgaaggaagaaaaaatcatagggaccatctatccaagtacaatagaatgatgcaggtagcaaaaactagtgatgacataaagtgcctctacttttctttaactctgtcaaaattcgcagaagagtggtggaaaggttatctctcaaatcaattcatagctagaaggatttataaaaaaaatttcaagaaacaattcataatagtaaaggattttaaccttgatgttagttctttgaggaacattaagcaacaacaaagagaaagcctcaagaagtacatccagtgaatgatcgatattactgcaaaaatgaaggttattgatggtatgaaaatggtgactctaacatcaggaataaccactggatccttgctatggggagaactttaaaggaagaggacagactctctgtttgactttttatctagagcctaaggattcataaacctagaagatgcctatgatcaggcttatggaatacttctatcacctactgctcaaacttcatagatgactgctccgactatctttcctctggttaccacgtttacaacacccatagtttatggaccaagtacattcgccctatcaactgcacaaaccagtttctccagctttggaacaacacaaattggatacagtgctattctcgaataaacgaaccaacaaaaggaagttttggagtcgaacatgagtcattcccgaagcaaaagaagttccaaatctccaagccataatgagtctacaaagaaagaaaaaactcaagaatcaagatactttgagtatactagattgattgacactcgcgagaatatttataaggccacgtgtaatatggtccattacaaaagacctccacctatgtacaaaggaggaaagcaaaagagggacccaaataaaaggtgtgaataccacggtgatattgggcatacaacaaatgaatgtgtctacttgagcaatgaaatcgaaggatgtctggaaaggccatttatccaattgggtgaggataccagttatctatcctggataagcagtagcacccagacaactctttattcctagacagcttggagccgtaaatcctccttagggagtagttctcctgcaagcccctggaatataagctccagctatacaggtcccttacggagtacaaatgccctagtgggaagacctcttgttgttcctgaacctagaaacccatacctacttggagttgttccaccaacattagatggctacgtagcaaccatatttggaggcctgtacattgcaagaagcactagaaatgcactaaaaagatacttgaatgagctggaaccagatgacacatgcaatcttgtacaatcatttgcacaacgtcctcggatgatgaatcttctagtaacattcatagaagatgatgtcaagtatgtgtactctccacacaatgatccattggtgatagaaacgtagagcgtcttgaaagcttatgagtaaatattatctaagtctttatgaaggatgacacgtggcatttaatgagggaaactaatttaatccttccttaattaagatccttggataccgctctgccacaaaaagacttcttggaaaggaggaatatccaagaaggaaagatacatgaaggcctattcatgcttgcctcaacttcctagatggtaatggcagaatacctctcccaaacgtagaagggtctaacagagaggttcgcacagttaatatctagatagacattcaaaaggacctaaagcggatgtcaaacctcatgaagtgtcgcgaacattgacctttttgtacatgccgaatcaccaagtgacagttacacttttatgacaagatcagaccctgtctccgacatcctagcatagaatggtgcacacctccaccacccttttaccaggaaaatatcatggaccaccacttttaaaggtgaaagctttacgcgacacgtggcctttacttttaaaggttaaacctttgaaagacacgtgtccatttcatgcgtattgtccgaaactacctagctgcaaggcgcatgagcgtggtttttccaaaaactaaacagtcagttctaacatttgcatgtaatttaccctaaaagtgaaatttgagcaaagacaccaggcgggtcatgggtctgtccatacccgccacttagcctataaatatcccacactcctcataggaaggaggatcggattctacatagcaaaaactctgtcgatattgctctaggtcttcttcttcttcttcaagtgaaacttagagtacagagctaggattttctgcaaaaatactgtaagcaaatcaataccgcccttagaggctaatagactcactcgtgaactaaggtttattaacacttgaacaacgtaaaaaatcttcatctctgtatttctataaattattatttctttagctcctaaatatttatttttttttaaaatctcggtaaacaatttaacattctagagccgataatcttcttgcacaaatcgagattcctaggtatctaaagggaagctcacttctaacaaaccatgaagcttccacaattctttgaacctccctttctttcctaccacaacaatacaaagtttattttaattcatttggtaataatccagatgactttgaaaataattcaagaccttgtaaaagataataaatagatttaaaatatccatgacagatgagtaatacattatcaataaagcatagatgattagagtttcatttttgagcacttgtcatgaaattgaaaatttattttcctcccaacattagctagaattcaagattgataatccatgcatagaaaaaaaattaaggggggcatagggtctccttgacagagacccctctaagcttcagaacaaccatgcatagctccattaaaaagcaaaaaaaattttagagttcaaatgcatacattctgagggaaagttcaaagcagccaatatttcttctacaaagtcccattctatagaatcataagccttgctgaggtccaacttgatcatacaattcagtcttgtattttttctaccataatgtttaaccaagtcttgggaaaccattatgttataggcaatgaaccttccttgaatgaacccactttaattttgagcaacaatctctggtagcacctgacttaatctcatacagatcatcttattgccaccttatatataactttacaacaagctattggttgaaagtcaatgacatttattgggcatttcattttaggaatgagagttagagtcgtggagtttaattcttttagaaacttacccgagtgaagaaaggataggattgtcttagtaacatcttccttaactaactcccaactatcttgaaaaaaataactacaaaaaccatcggtccctaatgctttacaactgggaatgctaaatactgcctttttaactttagctagtgtgaaattctttaactggaattcctatttctagtttgaaagacaagacccctattttacaacttcctgcttaatcgaccttcgatcaagcattgcaatccctaacaattcattatagtagtttaaaaaagccccactgacctgttttggatcctccacccattccccctccattgtgcaaatagagaaaattatgttttctacccttattactctcaaactagcatggaacactgtcgtgttattgtctccttctttcaaccattggacctttgctttctgatgtagaaaggaaatgtaggctttatgagtgttcatgtattttcttatgtcttccatctcttccctgcacattttttcatttaacgattgtgtttgagaggcgagctgactatctaacattgtttgattatcggctgttgctatgtctccctctcgctttttattccattctcgaagctctcttttcaagacctttagtttacatactagttggtacaaaagtgcctttattcttcttttttaaactctttttaatcagttttaaaaaaccttccatatgttaccacattttgaaaaatctaaacggtctattcccaattttaatctcgggatagacggttagcatgacaagacagtgatcaaagagatcttctgccataaaaactacttctgtattttcaaacttacccaaccattcttgatccgccaaaactctatcaattttagagaaaattcgagaggatactccttatttgttattcaatgtaaaaaatgaacatgagtacttaacatcttcccctttgcagctttccacacaatccttgaaggtagtagatttgctcaatttaacttctccctactctttcttcaggattcaatatatcattgaaatcctctaagataagccacaaatcttttatatttactggtaacaattttgaatcttcccataaacaagttcttcttgcctcctcattgaaagcatagatgaaagtaacaacaaaaaattccttattacctaccctctaaactttcaaatgcatgagttgactcgagcaattcagtatatccactgaatatattgctagattctagcttataataattctacctccatgatgccatggattattcgaagagaaacaccatcccgaaaacatcaccataaaaacttctcccaaatttcgagccttaacttgagttttttggagcccaaccaaacccacttaaaaattagagatcattttcttgacttttgattgcttattgtggttgtttagcgcccgtacattcaagctcataattctatccatgacacccaagaggtactccccttcctcctgtgttgaccagctttgaatcgtttatctcttgtattagtaccatcggccattgttctattccttccaaaatttgaaaggcattagatgttgtcattacagcagcctcaaatactttaattttgacctatttccctttgctcaatactttttgaaagctatcttcatcctgtacgttttttgtcttgtttgccttgccttcattcatcttcattggaacccaaatcgcttttttctctttttttttttcttgcaaatcgttaaggagtgattcttgagcagttgctacaaattattggtaaccatttatatttgacctaaatctcaatcacttgttgtaattcattcatatatgatactttctcgagaaaatcttgaaacattccaacctcaatcaaaactcttaggaagtttaatctctccttattcttggtaatctcatctaacattataggtgtttcaagttgtcccgctatcttaaggagagtcttttaacccaataccttaattccaattcatgaagctgaatccaaattggaaccgaagtaacatcctctttatcgtaatctgtataaggttcccatggattcataataataggtttttatcaaaaaacaggtatcccccatcaaggatttcatctcttgtgttgagagcccgaaatttaataataaaaaccccgggtttaagcattccaaccttatctacccctttgtccttccacatctttcttacaaagacttcaaatggtccaattgggggattatcacctagtacattatagaccattgcgaaattctagtacaaaatttcctcctcaacatcttacatttcaatttgaccactgaattctgttttgaactctcacccttcaaactattaaactcctcacaaatgcgaaataggaggggaaatggaattaccaattttggccttagcttcacatcttttttttgcccccaagaagctcacaaaattgttcttaatatcttgtttgtctgttccttctgcaggtaagaaatggatgctctcgatgacaatactttaacaactccttcaatggttatgggaatcttatgttcttgtaattcttcttcctctgagtctgaaatatccagcttggagaccccaggacctctgctatttatttggtcttaataactagatctaaggaggtaggtccatgtttcttacctttgtttccagcactcgatcgatttcctctagttatggaattccctctatctttgttactcaaccccaaaatagctccattcctgggttgtcctcgacctgccatggcttcgatgagaatcaaagtcaaaaaactctatcagagctcaattcggtgttctgttttccatttcttgtcgcctttaattatcgttagggacaaatttgtgtggttttaggggttgtagtggttctacagataacctccatttgtaaggctttgtatttattattcatagcttgctatcttctcttcctcaagctactactagtattagctatgttgcttgagagggcaacgcaaccactcgttaactagctaagtatgttttaggcctagatcaagaagctatttggattgagaattttaactgccacctagcttgtatcctaaactcatgatgatgattttaatggatacctttttctttcaaaaagaaagtgcacaaattatatttgtgataaactgatcaagatataagttcaaaaaataggcatagcatgtgtcccatgtcttttctcacgccagcaaataagaggtttttcctattccacctttgaaaacatcttctacctacacacactcattagtacatgctacatgtcaacttcctatgtgaggatttctacaaattgcaaaaactttgttgtttgttcaacttttatagagttagttgtaaattatagtaaggttttcaatttgtgttattatgtcatgtttgtatcgacattaaggttgaaccgagttgggtttttgggtggttgagttcataattttggatttggaatttttaaattaatgtaccgaacgcaatattcaaattttaaatataatcgtgttttaaattttggtgagccaaattcaaattttaatgggcattttcgcaagaatgcactttatttttattaaatgtgatttttcgaaccaatcgaaagagaaatttatttataatatgaacatatataaattttatatatgtttatcactacataaaaactaaacaaatgtataatcaattcataaccctacaaaaagcaaagagtacccacccatagtaggttcacttcttcttcttcttcttcttcttaagagaaaactatggatgcagtactattgtcgtctagtccaaggagaatgaaggagaaaatatcgatgaatccacttctttgagatgctaccattgttatttggttcgaagagaatgaacgagaagagagatatttacaactctgcttggttcaaacctctaccgctgcctggtccatccacctagttcatggataatatgagagagagagagagagagagagagagagagagagagagagtagtattttattttgtatcagtattcgtttggtttttagttttttattttttttttactttttttatt

SEQ ID NO: 295926 - DNA, 4823 bp, Cannabis indica
agttcagggggcataatttagtatatgtcaaagttcggagggaaaaattgctaattagccaattttaaaataagaaaaactagtgggattcacagaaattaagaagaaaataaaagaagtaattctcgccatttcataagaaatatatttttctttccttatcttattttatattaattatatatttattaattaaaaattaaaaaaaaaaacaaacatgtccttcaaaaatctataaataaaaaataattacaagttccaacaatgacaatttagttaaattataacattttgattacctttcctagtttcttttccgtcagtttagtaaacaacataataaaatattatttttgattatattatattttaaaccgatttatttcttaataagtaatgagaatcaatggcaaagtagatattcacttacatttatttactttattgaaattatgaaaatgagaagttgaataaataagggattaaagaaaagaaatacttccccaccaattttttaagaaataccattaaaggtaatgatttttatttatttttaatattaaatatacaatgataattttatcctttaaaatatattatataaaataaatacaatatattatagtttaactcaaacggacaatttattaaatttaagcattaaattgaatttaagcattctgattacatttcttgataaaataaataagataaattattattattctatttccaaacaattttaggaaacaacatattacaaatattgatttcaattttttttacttattccgttacatttctccattaatttattttaattctaaatattgtatagtaaacttgtacactttaataaacatgccatataaacaatttgatttatgtggtatttctaaaagttttggggcaaagttgtaaattaatgggaacaagttgaggcaggcccaagtttggcccagttagccaagcccataataatggggtccatatcatttagttttactttactcttgtttccacttttcaacgcacaacaacatcagtagtagtttttcttttcttatcaaaaaaaaacatcagttgtagtttttttctttttaagataaatcaacataggattagttatttccttacaaaaaaaaaaaaaaaaaacaaagattagttaaactactttaacttagtccttaagaaggagagagagggagagatgtgagtacttgctttctgaatttttcttgactgaggaagcaacgaatattgatatttcaactgaaatactttcttggggtaatacaaaaaaccaattgatctgattggctgacacagacaatctttcattctgggttatcatcaccatcatcatcatcatggaatcgaccagttttgtcttttaactggagacgatgtcacaagctgatgtctcttacaggtgggtacatatatatatatatataaagatagattttcttgatttttgattgtttgtacaagtttaatttttgattcttttaagttttgtggttaaatctttttctgggtattgctaaaattggacttaatcatcgaatttgatctcattatataccatttgattgaaaaggttttgtcttttataggcaagaaataggtttgatcttatataaacaatttaggttgtggtaatgctcttatataatgattaaggaagaaaagttagtacctttggtgtttgataaaaggttaatggtgttttttttcttttttttctttcatttgtgagtataatttatagatttgaaagagcccccacaatgtatacttcttcccagtaataactggtgttgtattttgtagatttgaaagagctgaggattgctatcatttgggtgagccctatggtttatgctgtttctttgagttgaaacacttagtcatataacataggccatgttgcttttttgtcttgatgaatttgagatattagattatgttgtagcattagcatataactctttcaactgttgcaatggaagctattggttttggcttttgttaatatgaaattgattttggttttctggtttgcaatttgcagttgtgggtcttgtggataccctctgaatttgatatcttcaaatcgaattacttctggcatagactctgaatacagcaaatccataaagaaaggtttaatctcctttatttcggttgatctcagtcgattcacacaggttgatgaggtaaattgttttcctctaagttggggtcgttatcgttcaaaaaccaaacttttgtgtcgtaaatgtggagttcatgttggctatgcatatggtgacacaactgctctttgtggttttgattctcccaattcatcaaactcagcttataaaaaattcactgtaaagattcgagctttgcaaccttctgaagagtgatttagacggttgacatggagggtcattccaatattggtttaacttccatcatgcaccttcctgatgattgtctttacttcatttttcaaaggcttgattgtttcacagatcgtgaatcgtttggcctgacttgccaacgatggctccaaattcaaaaccatagccgacgctccttacagttcgcctgttcattcacccatttgagtctttcttcattaggccaccccaattttaacttccattccttccacctcaatagggtgctcactcgctttcagaatttacagtctttatccttagccggttgcatatacctaaccgattcagccttggcaccactacagttttatggttcaaacttgcaagctattcatttcgattgttgtttttgtatcactgataatggattttccattgctgctactgcttgccccttactaacacgagttagtctttaccgatgcaatgttactgatgttgggttagcaaatttcgctaaagcttgctcgggtctaaaacaagtaaacctctcacactgctcatacatttctgaccatggattaaggacccttgttaatggatgtcatcaacttcaagcagtaaaaatatcattctgtagccgtataactggcattggcttcagaggttgttcatcaactttagcttatgtagaagccgagtcttgtgatctagagccacaaggcataggtggactagtgagtggaggtggtttagagtatttggatgtttcttctctaagctggcatgtaggcagagatggcttggtagctataggagcaggacttggctcgagtctgaaaatcttaaacctcaggctgtgcagaactgtgggcgacgagtcaatttcagcgatttcaaaagggtgtcccttacttcaagagtggaacttagcattgtgcaatgaggtaaggatctctggatgggtttctattggaatgaactgccataacttggagaaacttcatgtgaaccgatgtaggaacctatgtgataacgggttgatggctttgcgaaatgggtgcagaaggctctcggttttgtacatgagccgcggtgggaagatcacttctacagcaattgagatgttcaaatgttatagaggagatgttgttattaaggatgaagagattatgacaatgagtataggacttcaatattttatttgactatctcttttacaaacttgcttggcttgtgctttgctgcatatctctcactctttctaattaattataaattaattgtttaaacttgggatctactcaatctgttgttagatagatttgcattttttttttgggtaaataccattttggactctgtgttttacaaaagttatcaattggaccctctgttttgttaaatgacaaaatagaccctgtattttctaaaatggtacaaataggaccctgatttgattttttatcaaaataaaatttaattataatccgatctaaaagtattatcacaaaattgtttatattttttgtatatgttcgtatttagaattgttttcaagttgattatattaaaaaaaaaaagttgtcaaaaattaagctcaatgtcttatttttactattttggaaaatatagggtccatatagggtgcaatcagtaacttttatcaaatacagggtcccatttctttttcttgttaattaatttttataaatattgttcttccatgggattttggccaaataagtatttagataagagaaaattttggaaaggccaaaattcaccctaataggttaactctaggaaaaaaaaatagaataaattcatgaaaaatctcattcattttggtaaagggacaccaaaagaatttgattgttgagccgtacgaggtcgaaaattcttaagtacggttacaatactttgaatcaaaatgatttgttccctatacattcaacaatttcatgtcacattctttgaatctttgtaaaactgaatctcaattcatttagtgctaagaaacaaactttgaattgaactcaactgaaatatgaagagacatatttaactaacaccttacatgaaacatacttatatttggttttgttggacagatattacattaaatggaacaaaatataataaaacaaattgaaagcaatagaaaaaaaaaaaaatcatactacatctatcgatcatagttaatgcatttagtcaaataagattcgaaaagtgatatcgtcaatctcatattataatctcttagttaatctgtacgcttgaaatatcacaggataaaatattttttttcatagcggtattctttatagttacaacattatttttgtaaattttttaataatttacaatgtcgaaaatatatttaaagtttttttaacaagcataaactgaaatattatgaactat

SEQ ID NO: 295927 - DNA, 6243 bp, Cannabis indica
tagacaagcaattgataacatgaaccaaaacatacaaatgaatgaaaaatacttctgtttctttattgatattgaataaaatggattacattgaaatggagttttatttagggcataaaacccaacaacattgtcattatcatccatcactaattgtttaaaacactggtggaaaactatctggaacaccaaaaccctccaaaaaataaaatatttaacccggaaagcttttaaccacatcctcccttgtagcttgaacctatttcacaagaaaactcttgccaacccttactgtccaatttgcaaaaacaaggttgagtttgtcacccatgctcttcttgactgtcccaaggctaagtctgtatggaaacaatcttcactcaaaaagttttacattgaaaatcataattgcaacatcgaagaatattacttaagaggcttagatcatcttaataatgacaatttcactttgcttcttagtttaacttggcatatttggagcaggaggaacaatgcttgtaatatttcagaaaaaatatttcagaaaatataatgatttttaattgggcatattttattaaatatgtgattaggtgggcattagagtaggattataatcctacttaagctaattacgagtttattagtgaaatacaactagaggaacaaatgaaacgtaatttattaattacaaagattttatcagactatgggtgtatcatggataccattttcgaaataaaataatttttgggtttggcgaccgtgggaactcgacggagtggtcagaaatgtcacgacaataagagatgaattaaattggaattggaattataccagaatagtgtaggattaagtaattggtttagcgggattagttataatgaccaaaatacccctagggtggattttaggctttaaggttttatgaggggcaatttagtcttttcctagagttgggattttgtctctatgtgatttatatggtctgaaaaaggaataaatataatttagattgtatgcctaagtatttatttttttttgaaagaaaaacctagaaaactaagattaatggcataacaccatttctcctcctcttctcctcttcgactctaaggccagcacctgcaaggggagaattcttcaccaattcttcaagctttagcaaaattcaacctagtctaaggattctttaagctttaaggtaagtcataactccttttcctttgatttttcaagggttttgggttaggtttttcttgaattcgggtctgtggtgtttagtggagttcatagtttgattttaggtataatttagggttgttcaagtgtgttttagatgggttacttggctgtttaacttgttttgtggggaggattgagtttaagaactcaattttgatttctaacatggtgaaatgggtgttgtgatgaattgctatgagttgataatttaaatgtattatttttatggtattaaactattatggagtgtttgagtaggtatgaaggagttttggaggagaaaacctaaggttttcttgcctgcaagacttgattgaccgattgctactggtgtggcagaaccgattgactggttggtctgctagggaaaatctcgattttctttgagttaggtttttgactcgggatgtttttctgatcttggattaggacattttagtgatgtttgagttaattttgaacctatggatagttagaatttgtccgattatgaattagggtttgttttgaggattggataagtttttaatcgagttttgttatcgtgatataggactcgagattgtcgagcatggttccacttagatcggcccacacacccaatattggtttgaggtaagaaaagctttatgcattgctgctaagcatgttggtaagaaacaattattatcgtttgtgactcgattatgatcgaggtaatgatgaggaacgattattatcatttgtgactcgattatgattgatgtagtgatgaggaacgattattatcgtttgtgactcgattatgatcggggtaatgatgaggaacgattattatcatttgtgactcaattatgatcgaggtaatgatgatgaatgattattatcgtttgtgactcgattatgattgaggtaacgactattatcgtttgcaactcgattatgatagagaaaaaagataaaagatacggtcattagcgttaatgaaatgagtaattactcccttgaaaacgcagataggaaacttacttatcaggtgctttattgggcaacgatagtgacatacgtagctcgtagataacgagtggtaaggatgctttataaagcattaaagtagaattgtcttataagataattaattgattatgtgattatgtattgagtgaatatctgtttattatgatgatgaagttgttgactatgagttgctataattttatcataatgcgtaatatatgtgtttgtatagacgttaaattatatatgcatattaaatatgtaatgaatcatgagtatgtatattatgtcatgttgtgattacttgcatattatatcgctttttatttagtagcttctcttgctgagtctttgtgactcacgggtacttcgtggtgcaggtaaggaggatagaaactgagttcggtcatgagtcagaggtcttccagcgatgtacatatcagtcgtgatgtcttggcttccgagaaataggatcaaccctttggctatatttagaaatgtaaccttacttttgtaatagctgtttgagacttgttgtaagagaatttataaacaggggatctctgtattatggtatatttttgtataaaagttttattttaatttaatgaaaaagtttttaattaagccacacatttcctaaaataatagattagttagaaataagtttgtaaaaatacacacgtggcgtccttgtgtgtcagggcgttacaatgctcttttcaaccacaatactaacaatcttcttgatgtggaaggctatgtttgtagtttattgcaagactatcaagcagctcaaactcttaaaccatagacaagctttccagagaacatagcctcggattagaactcatcatgtcacaatgctccaacaacacattttctctagtatgaccaccataagctaaatgttgatgctgcctttgatttgaagcagcttagaataggattaggggcttcaattaagaattggcagaactatgcgattgtcgggctttccatttctaaatggggagattcaacacccctctttgctgaagctcaagccctcctagtagctcttaattggtgcactgctatcaagcttccccttagctccattaaatcagattgtttacaattggtcacaaagcttaacagcacttagaaggacaactcaactctgtctagccttgttgagctaatttgagaatccctatcacacttacttaatgcttctctctaccatatctctaggaatgataattgtgcagttcatcaaaatataagagatacattaagacacgataaggattcattttggagggtctaatttcttttccttattgtgtaattgtatctttgtttatttgtttccttctctttcgatacaattactttaaaaaaaaaaaaggaaattatattttaccttacgctattttagttcatttgatttcatgtgtgggctaatacttttagcattaatcttaacaatttgaggatttaatatttttgccacatattgacattattatgattatttgtaattaataataaaaataaaaaagtaaaaattgttttgtagacttaaaacgatgtcgttgtgtagagattgcggacccacatcaagcaaaggcagctaaagaatagcgaaaaccccgaacacttccaaatgcactccttctttaaccctattctctctccctctctctctctctgaatcggagatatgaaccttcgccggagatactgaaacggactgctctaccttcgtcgcgattccgatcatcccgatccctcagcctctgagattattctttcaacggttccacaaagatgtttctccttgactggttctacggcgtcttggcgtctcttggcctctggcagaaagaggctaagatcttgttcttaggtctcgataatgccggaaagaccaccttgcttcacatgttgaaagacgaggtttttcttttccctcacttctctttttgtttgatcaaatgttgtttttatcgatcacctacaattttctctgattcaaggacaaagatttattatttattatgattaatcttactgtagtttgttgcttagttaagtggccaaatacatcattctgattttccgggaaagtcggtgaagaagttgaattggggtttgaagatctataatttctgacccttatttgtttagttaaattaggggaaaagaacattatttcattcgtgtatatacttgtaaaatgagtaaaaatcaatacctttgccagattttttatgttatttgcaaattccgcttttgattgattaactatatgaatttttttctttaatgtggttttctatttcagagactggtacagcaccagcctacacagcacccaacatccgaggagttaagtattggcaaaatcaaattcaaggcctttgatttgggaggtcatcagatagctcgcagagtatggaaggattactatgccaaggtaaccctaaaatgccatatggtaaaaaaaaattattgttcaaattatgttgggaaaatcttgcctactctgcagttgggtctcctgtttctgaacatgtaattttcttctttctcaactcgatttgagtatatgttaacagcccccattttgtttgattgaattgattagatgtttgtcaatatataaaaccaccatgctcaagccaaatctaaagtgcataacggggatttatcccaaaactaaacaaaatccaaaacctatgttaacatggattttcgtaattgacagcatttgttcctggtttttcttgatcccctttatacaactgcgattgttttttcagaatcatatttttcttagtttttctgtatattcgagtgttgattaactgtaattgtcagccttagcttttaaatgccatttagctgaaactgtttgttaagagaagttgtgtaattagagttatttatgaatcttcttttgtttcataccctactgtcatcatggttatccctgctttcaggtagatgctgtggtatacttggtggatgcctatgataaggagagatttgcagaatcaaaaaaggaacttgatgcgcttctttcagatgaagccctcgcaaatgttccattccttatcttggggaacaaaatcgacataccttatgctgcatcagaggatgagttgcgataccatcttggcctgtccaatttcaccactggaaagggtaaggtaaacttatcagactcaaatgtccgtccattggaggtgttcatgtgcagcatagtacgtaaaatgggatatggcgatggttttaagtggctttctcaatacatcaattagtaagagagaggagggattgtgaaagaaaaagatgcactttgtcttttgaatcacaagggactgtgatttcattttagcactcccccaaatccttatttaggctcttagtgagagctttttagatcgaatgtattgtgttgttgattctgtgtggatatagaaaactactacttctgctgctgtccctgcattgtaaaatcgacttgtagccacaaatctcttttcttttttaccacaatatagctagcattgctatctttgtcatttcttgccatatttctattgggtaagagctagcaaaatgggattctgtgttgtcattaattttgattatggaaataggcaaatttcatttgcaggaatatgttggaaattgtactattctgccaatattttacccgatatggaaatttataaagagggctaagtattgttctagttgtttctataatgttccatacacgtagacaaagcaaaacaactatttaggtcaaatgtaatattgcgtaagcaatgtgctaatatagtcatccgtggacccttttgtcctacgaacttttcaaaatcattgtttgcaggccagaatgcttaaattgtgcatggtttattgttggatcacaaaactatcataatttatcgactcttatcttttaaaatatattactaaaattttacttttttttttttattt

SEQ ID NO: 295928 - DNA, 1436 bp, Cannabis indica
acaccaatttctgcacctaaaattttacacaaagtagctctttaatttctgttatttttacttagactaaaaagctttttcagcacgctgtgttgaagatagtgaaagacaaaatcataacagtttcctgtaaaccttttaaacaacctcaaataccattaccaatcacaaagaagaattgagaatgcaaatgccttaaactccttagcgttgaagatccataaagcaagccaattccacaatttctacagtatacgtaagtaaaacttataatatttctttccaactcactccttaaaaaattgcaaggacaaccatgttctttatatttttctccatttccattttctgtaggagctccatttggttctattcacacattacctttgaaaaggataaatctttaaattccttacttttgaaaatcattattaaacaaaattacataacttatcatgaaaaatgaacttggttgatgtattttttgctggaaaaaagactaatcttcccctccctctcctttaagggtgttttgtttaacggttttcaccttgtcttaaacagaatatcttcgcttcaaaacaagcattttgagcataaaatctcgaccaaaccatgtgataataacataaaatgcttttcaaagttttaagagaaataataacaatagagaagttgtgaaactatgaaataggtaacgagaaaatcagtaaagtgtagctagtatgtttactagatagttgacatttaacttaagaagtcaactaggtatatcgcaccttaaatgaacacgttagaagtcagtcactgcctgggctttggccatactcttttgtctaaagaagagtggggagggagtgacaaacaatggatgacctctactccaaatactgtagcaggcaaaatggatcagataaactgtcatgtaataccacaatcgaatattctggctggtttcagcacaacaagttttgtatatacatgagtaaatcttaagttaccaatctaccactcactgttcctatgtatggacgtagtatggttaattaacttcgttgtttcccagaatttactggatacctttccaacatacattggttagtaactaaaatgtttgagttttttggagcactttttcggtaataacattacaaatctttagacatctctactgtgtcagatttccaaccatgtaagactcttgaaccatcatcatctgattcaggtctgtaatgtctttaaagtgagcttaggttgttcgttgtactgtttatcatttactcttcttttaaattgttgcctttgtacctgagtagctaggaactagattcaaggatggttttggatttgattcagacagagcctgccaaaatctttttgcacaaatacactttaagtctttttgctgtttcgcaatctggtttgtaaagaagaaa

SEQ ID NO: 295929 - DNA, 2670 bp, Cannabis indica
attgcattttcccttataaaataattgtataacctctgagcatttggccaactttaattatgtaagagaagcagagagtataattagaaagctaaggttacttgcttactttgtaatacataggcatagcttagcaattggcaagtctagatgcagataatacttaaaaaaaaaaaaacactcaccatgaaattggtagcatatattttactactctgatattctttatttgaactatgattaatcggtatagaattattcatttgttatcattttatagctcccatgtaattcctttccagcaaaggctttatatttattcattggcagtacattcttacataatgcgtgttagtctttcatatcgtctaggctaatattgctgttctttcagatgaggaggacaagatcatagttgcagcccatgaaattcatggaaacaaatgggcagctattgctaggctcctttcaggaagaacagacaatgctataaaaaatcattggaattccaccctaaggcgcagatgtttggagcgtgataaagtaaagttggaacctggcaatgctgtagaagatgttagctttgacagaaccaaagcctcatctgaagaaaccatgtcatgtggtgatgtcaattcattcaagtccatggaaggaagagatccctcctatgtggagcatacagttgatcataatgaagtcaagttgcaagaaggttatcttagtcacgaagtactagaaccacctacactatttcggcctgtgccacgtgttagtgcattcagtgtatataatacattagatggacaacaaccactatcatccaatcaaaggcccattccaatgcaaggaccactggttcaactagcaaaatcagatgttcaaattttcaaattgcttgaagcagaacatggtgggaactcagtgcctcatcaatgtggctatggttgttgcaagatgaaaaatggtataaattcggaaaactcgttgttgggcccagattttgtcgatttttcagagcctccagcaatttcaagttttgatctggctgcaattgctaccgacatcagcaaccttgcttggcttaaaagtgggttggagaatagtagtgttagagcaatggatgatgcagcgggtagaattatatctaatggatctcaaacacaaatggaacgctttgaagagagtagaaccagtgatcacttgcttttcgaagaaagaagggggaacttgatgggcatgaaaaccaatgtgctatcaacttaggactggtaaataattcctttacgagcaaaaaaaggttgaaagtcatgactttatgattgaataaccggatgttcgagggagttggaattttgaagatgcaggaagacctaaaacctttttataaggtatcgagactcatacttaattgccaagagtttaggaaggttttgaccaagcctgaataactaaatattagtgtttggcctacttttttcaagataaagaacataggattaatggttccctgatgtgttgtggtggtcagtctgatgactatgaacatgtatagttacccaaaaaaaaataaaaaaaatcataatctacattagttagcttttcagttgtaaggtctggtattgaatattgattctgtgttttaattaattatttttgcatgtatgtataaactttcttcattccataagacttgaatgtttttgttcaactgagtaaagttagatgagattcttacacacacaatacaaatattaaacaatgtcgttggttttttttttctttgtcgttttttagtcctttggctgcaattatttgagcaaaattgctacatcctatgacaaattttagtatgtcttctgaaagtaaagtaatattatatttcaaaacaattctgaggcaccaaattaataagggaatctttttctctttcctttcttgattcacgtagtagatgttattgctctcaattaaattatcttgttagaatatagaccaataatatcattactcataacagtcaaattggtatttgctaaggtttccttacatattgccaaaaaagttaggagttaaacgtattttaaaaaaaaaaaataaaaaaaaaaataaagaagattcaaccgcaaattactctaaaagttatattagagaaagtgttgttttttttttaaaaaaattacattacaatttaaatttaaactcaatacaaatttaataaaaaatattttttctaatttctattatcattttttactcaatccacatatcttaaacaaatatcttattattattatttttattatataatattaagtattagatactgagagtactacttttgctcacacaagtgaaggcatttttatagcttttgatttttaatcaaatagtaataattaatttagttataatgaggtatctcataccaaattaataactcttttgtcgtatgtttgttaaaaaataataataataatcaacccactcacctaaggcagtaaggcaattgcccttaggcagggtcggccctgacttttagtgggtcatagaaaaaaacattattttgggtccttatttaaaaaaaaatatggtagttttcaaaatcagtaaaaaaaaatggtataattttaaaaggtaaatattttttttgggcccctgggataggtg

SEQ ID NO: 295930 - DNA, 6431 bp, Cannabis indica
gttttttgtttttttttttttttttcattttttaggtatttagtaattttatttttattagtttttgctgttgttattatgcttgatttctatttttcgtaaataattaatttattgtttatttatctttctgtgctttgatcagaatttgggcagattgtatgttagggtttgtttgtatattacggattttttttttttttttttcattttatgcttactgcgttaggaggtgacgcagtttcctttgagttattattgtttcccaaggattacgcaaatatgacgcctcaatcgatggatatagtaattcctgcttaaagaattatggaaattattttactttaattctaggaggttttaaattttatttttagtgttatgattaggtttattcatttgtttgtatttatcctgtagatgtagctgtgaggaatttagggaattttctatttctttttgtttctttttttttttttttttactttttttatttttgcagatagagcctatcttgagtggaaatctgcctcctgggtttgattcaagtcaatgccgcagtgtgtgagtgttgtatagacattttctttctcttttttcctttttcttttcttatgtttttctttttttaggaaatgagtgttcttctaggagcgttttgttgttaagtagttagttttttagattaaaaatatgtatatacatttaatatagttccttaaagtaattgccaaccttgatgctcaagggcatatcatatatttacatattttatagatacttttaaaaatattttttatgttatcaacatctccccaatttatgttgtgtccgtatatttcagtttggctttcgagttcatctgtgttaaatttatgaaaaatgtaggtacgtaggtaacatccacccacaggtcactgacacagatcttcagcaagtattttctactgctggtcccttggaaggatgcaagcttatcaggaaagataaggtgatgctgtttgtgcttattttttcttttgtgtttgattaacaagttagcaacaattttataatcttgcagttgctgtgaagattctttgctctgcgcaagttgctgtgtctatgttctcattttctattgtttatatttagttgaggcttttgcggcctcagctttttgatagtttgcatttgactcatttacatggctcttacttttatgcagtcatcttatggtttcgttgactacttcgatcgtagatcagcagcttttgctattataactcttaatggcaggcatctgtaagtacagatcttaactggtttttttgccgactttattttgtaaaaattattagtcatttgactctaagctaacatgttatttcttcctcattttcttcttttctttcttttttctaggtacggccagcctattaaagttaattgggcatatgcaagcagtcagagagaagatacatcaggtttgaaaggaacctgaattttttattacaatgtttaactttatccctttctttaaatcaatatggtcttccttttttcttttaatctatattcttcaaaaattttgcatacaggtcattttaatatttttgttggtgatcttagtcccgaggttactgatgctacactgttcgcttgcttttctgtttatcccagttgttcgtaagtatcgtttctgctgtttactctattagtttttctactagtttttagatttttgagaaatactttaattcacctatatgatagaaacagatgcttgagtaagctaacattgggacatattaattaaaatttcagagatgcaaaggttatgtgggatcagaaaactgggcgatccaggggttttggatttgttgcctttcgtaaccaacaggtagttgaatttacaatttattttttgggagttactgttaaactttaacttgttattggacgtttatcttttgaatcatatcatgaattctttgtttttttgcaggatgctcaaagtgcaataaacgacttaaatggtgagatgaattcatttttgtgtgtgaaagcagtagatgtactagttttattatttatcgttcagacataacgtcaagtgttagtttaatttctctcaccctccaaaaaatacccaacggtttgttggacagttttagacctgtgaatgagattttcttctgagaagaaatatagttaagaaacttttgtacaacaagctgacttctgcatctcaagattttttttaatttgtttttgtccattaaaactttatcaggggcctctcctttctttaagacttgttagatctttactcattctgtgtgtaatcatgacgttttatcaatggattgatgtttagattttaaccatttatttgctggaacatttcaggaaaatggcttggaagtaggcagatcaggtgtaactgggccacaaaaggttctacaaccagcgaggacaagcagatctctgattctaagagtgttgtggagctaaccaatggctcatcaggtgagccttttcgaacctcttatgacactcgtgagttctgttgtgggtttggacttaggatttgatatttttatctcctattttcttccattgcccataattgttggagaagtttcttgggtatagcaattaatttgtcaaagattagattccatcagctgtaatctattgaggcccttgtttgataatacttttggctacatactccctattttctcttacaatttaacattttggaaaattttgtgacattgcccccacccttgtctttaattatatttgtgcttttcatgttctcagaagatggtcaggagatagctagtgaggatgctccggagaacaatccccagtatacaaccgtgtatgttggcaatcttgctccagaggtatgtattgacgatttctgttatgatcattaaatttattgtggtcatgtaatcatatataagagttgcattagaagacttttaaacgaagagttttaggaaccatagtgtgaaattgttcagatgacaagtcagtttgcgtctttggaagtgctgttaaaaagaatctgatttaagtttggataaacaagtccaaggattatgtgtaagaaatgttttagatgaaactattatcaaatgggttagtctggcatcatgtgatagtaaaacaccaccgcctcactttcctttcttttaacaggacattttgaaagatggattttcttgtaaaagtgatttattaaacaatcttccatatttgttgtttcaatgcaagttttagttgagtttcttccagattttcctaaatgtatagttacaactttttgaaggtcacttcagttgacctccaccgtcacttccatgcccttggtgctggaactattgaagatgttagagtgcaacgagataaagggtttgggtttgtgagattcactacacatgctgaagcagcaatggctatccagctgggtaatgctcgtatgttgtatggcaaaaccattaaggtatgctctataatttttaggcatcttcagagatggaacttagttttgttttgaacttggttggtctgttgggatcactagttcttatgtgttgtgatttacaaatggcattatgatgtataagtatttgtcatgtactctacgtatgctcattgtcataaatcttactgttacagtgctcatgggggagcaaaccgactccaccagggacaaactctgctcctcttcccccgccagcagctgcaagtatgccagttttctccgcagctgaccttgcggcctatggaagacaaatgacattaagcaaaatgggtggtgctcaagcgcttatgcatccccaaaaccagcacgctctcaaggcagccatgggaatgggtgcaggaggtagtcaggctatatacgatgctggctatccgaatgtagctacaacccagcagctcatgtattaccaccagtaatttcatgcaggaaaggtagtcggcttgatgaaataagttgctcagatttgactgtaggataatatattatgatttttcctctagtttttctttcctttttttttaactgtttttttttagattgctgtatttgtattacaaatatacctcatctgagtgcgtgaacaggttgtgtgtttctattttccctgttgggattgtgacttattggagctttggctaaaattattactgaatctctgaatgtgccataactgaagaaactctcaaataaataaaatatactagtaataaattctatgggtttctcttctgtaaatcgtacatggttttctttctctatcaataaaaataaatatactagtaatgtggaatcttcacacgaatttttgacgtcgtgcatgtttgaattggttttctagagcgacaaaaaaaactacccactacccaccaatttcgagctcttagcatttctcattaacaagtctattttgcaacgtccagccaataattttctccataaaaatcattgaatgttttctttgattaataaaatcattaaaatttataatctccatctatacaaatgtttttctttttcttttctgaaaataacgcgagtaagatacataaaaagctagaccagaccctcttctatttcaacttaaatttcacatcgaaaaatggtaattggtgttaagtgcagtgctgtcaaacatggccccattgtggacaaaagcgaaacgtctttgtcgacctataagtgctctgtttcttgttcatacgatttacctgctaccctttatttttggatacaataaaactcaaccaaattacctaaacaatctactgatatataaacgacaaaaaaccaaaagggtagcaatagtttactattttgcttcgatagctcgaacttttagctttctggtccataaagtggtcgttttccgatcaacaccagactcagttcatttctgttttttaaccattgatgccataaaccagtagaaataaagactccttttcataacagatgtaatatattaatttctttttattaacaaaaagggcaagtaattctcattacagtgcaaaattttcttatctctctcgtttttttttttttagtttttctttggtaggatttagttagccgcataaagctgattgattctcgtattatgtttatacaatattgtaaccggtttagaaagtgactaaagttcataatggccttttggtttcttcttcttctactaaatggcaacgataccagttgagaagatttcgcctttgccataagacgatgatgatgatgatgaagctgatacatcaacacctcttctggcctctgatctgcactgtttttctttcctttcatcactcaaaatttgacttgcacgacactctggactacaaaacgctttctctcctctgttaaaaacccaaagagaataataaatcagttgagctcatattcaatcaattttcttactattagtactaaagtgttatcactataagattttagaatatgaatttggtttgtattgttagttctttacctgtacatatatatgtccttgccgtggagtgttttccggcacaaatgacaacaactgagaaaatccgaggtgggaaatgaacaaaattcttcaccggagatcgctgacggcgaatcaaaaatacccttttggttactacaccgacccagatcgattttcaggtgattttttcttccatattcaacaccatcgtaatagactttggtaaacgttttgtcattcggtaaccgacaagtgacgtaagtgtaactctcttcgtctaattcttcgcaagctctgaacttgtccccgttactgactatattcaccggaattggattcgaccgatttaaattcaagctgcaaatcgcgtacttggctggaaaatctcttccactgtcgacggaggatttttccaaagcagctacaattcccaacccaactccaccaagatcgtagtttttcaaaccacgaggagattgcatcttgagatctaatgggcttctcggactagtcccgatttcaatggagccggcgcggtggccgggaacaagaagctcggaaagttttccgatcattggtctagctcttttggtcaagttaaccatataaattgaacggaaaaaaaccaattaagaagaaatggaattgggaatgagaaagaaaacgttttgtgtttatattttctttttgttactctgaaatgggttttaagggtcttaaagctttgtgagtctaatttatgatgaagtgaaagagtgggtgggatttaagcccatggtttgtttttgctttggaattatatgagtcatgatttgttcaagttagaccaattaatcatttaattgctttttcttttctcaaaaaaaaaaaacactaatttctttttgcaataaaattattttaaaagaggtcagttatcaa

SEQ ID NO: 295931 - DNA, 1362 bp, Cannabis indica
ataaaggcatggaagtactttgtgttatcatctcgtttctgcagccaattgatcttacttctctgtcttaggaaattaaaatacatcttctcatgacagataaagttgctagtttttgtcttctcttgttcctggtacaaatgatccctagggttctcttgggccttcattctagcttcaaggaacctgtctttagcttgctggtagtttttccccacatctcctattgtctcatgattaaatttcttgaggctatgtttcaatctcataagcttgagataaattccatttaaaccaggtgttgtcatcggtttctcctaactagataaaactagcctcttgaagtcagggtgatcaacccaaaaattgtaacatcgaaagagttttatccctattttcacttcagctcttgttgaaaaaacacaagaacagtgatatgaagttgtctccttgccaaaatgagcagtagaattagcaaacatgtcatgccaatcctcattaacaaaagcatggacaatttttgaataaattctactaactccatcttggttgttagtccaagtaaaagttgaactagtgctcttgagaggttcaacatgagcttgggaaatgcagtcattagagtcagccatgtcaccaagacaaaaggggttacctcctgatctatcttcagtgttaaacaccgcattaaaatcccttagactgagctagggttttactcgatgtttcaaattcgatagatccctccaaagattctttctctcatctatggtattaaaaccataaacaaaagttatgcaacaagctttagtatggccaaacattttaacataactatgaaccagttgtggggtttcagtaatgactataatttatgacaaaatcttttctccaaacaattaggatacgatcttcaatagtaggacttgagaaatactcccaattaacaaacttattctccatcatctctttaactttattctcctttaactttgtttcaactaaggctctacaccaaatttattgaaacttcagaaatccaaaactgatcttgtttctcctttttattaacacctctaacattctagcaaaaaatattgcaattatccatgactaaatgagatagtacctaattcagcatcttctttaggaccctctattctaatctggccctgttccaaatcttctaaggcttgaagctattaccagtagcttgcccctcctcagttgtttcaaaaatgactctaatataattttgagggctttttttttgggagtaatccagtgttgggttttgtgccctaaataaaatccatttaaatataattagatttactaattaataaagattagaaattattt

SEQ ID NO: 295932 - DNA, 3423 bp, Cannabis indica
gggagttttatttgcaccccataaaattataaatacaccctattattaaaaaaaaatataaacttaatttttataaattactcttaatttttttttttaaattttttcttcacattattttatattaatttcaatacttattttgattttattttcataattttttctaactcatgtatatatatttttatttttattttttttaaaaaaattcatataattttttatttttattttttgtcataatatttaaattagaatttaattttgtttgatagttatattttttaggaatatgaattagaaaaaaatgttaaaaaaatttactacaattaaagatataaattttatataaaataaaaattattaaaatggagtgtgtttagaaatttttgggctcgtttggtacgccgtattgtattgtgttgtattatattatattgtatgggctcgtttggtacgctgtattgtaatatattgtattgtataatgttggattgtgttgtattgtattgtattagtattatttaatacaatataacgtttggtatcgactttattaattgattgtgtaaagttataatatatttttaatacactcgatcccaacaccaactatgagtccgagattggtgttgaccccaaatttttagtaaatattataatacaagctaatacgaaacatttattatgtattaaataatacaacatacattgtattaaaaattttggtcgtaataattaatacaatacattgcttaatccaaacatagtgttttttattatttaatacaatacaacttaccaaatgagccctttggggtgaataaaatttcccataatagaatttaacttcaaatttctcttgcttgaaagttaatatcttctacgatataaacagtgaagagtaaaatagtcacgtttggtacactatgtcatattgtattgagttgtatagtattatgttatattatattatattagtataatttaatataatactatgtttagtattgacttgcattaattacttaagtaaactaatattatctttattaaaaattcaacccaaatcccgaccttggccttggaccgagtccggatccaagtctagaacgggttcgggttcaaagtccgagtctgagtctagagttcaaagccaaggttcgagtttctaaatattataacagaaactaatacaaattatttgttatgttaaataattcgattcgtattgtattaaaattaatacaatacgaaattttatccaaatatagtttttcttgctatttaatacaataaaactcttatgtgggccaccaaactagcccttaatcaattgaatacttgcaccccaatttatggcaaaatatgggaacggaatatgagagggtaggtacagcaaaatccactactccaacactgcagaaataagtagcttgttagtacgaatgtatttttaatgtagcaaaagctgaatttaaaacaagcatactccatcttagtaggattccaagtttgttttaaaatcatacccatctcagtgaattttatatctatctaccctcttcaaacaaatataaacaggtctctagaccgaaatagaaaaggcaggatgccaatgaatttgacaaaatttaccacagacagcaacggtccctgtttaaatttgttgtgaaatgtcattgatgctggctttggattgccaccaggacctctgataaacccactgcatcaaattatagtattcaaggtaaaacgtctataaggttccattaataagcaaaagaaactcaatttaatcaaatcaaacaaagacttggcactcactgtggcaagtaatgtcaacataggtgtatgtcattgtcaagtttgtatgtgatttatgcgtgcatatattattactctttattcaatatgcagtaactatttaaccaaaagaagaataaataagaatacttcttgcactcacataagtgatgcagagatcaacggagtcctcctaacatcataaacggcgatcagacccctgtataaatcatcaccccctttgtacgatacagctaaccgctccccagaagcatcccatgttattctatcaatcccctgactgaaagagaaaataaaatgaaagtgggacagaagataaatcgcaagatatgtcgcatatcaatgtttgatatctataatctgtaagtgcatcgcattactgtacaagacatacaagacactgacaagtaacacctaaacctttaagtttggtctcaaagttatttttatatagaggtttctgtgtatacatatttatatatataaacatgtaaacttattcccaaattatatattttacctatttgtcagtgatattatctcaggcagctcaacaggtaatagatgtgcatctgcataaaacaatcattcagcaagaagattcatcatatgggtgcaaaatagaaacaatatttcacaacagcaataaggaacccgagaggcagtgagcaccatgagagtgataggaatttcctgttaaatatggataaatggtagcaaaatgagagcttggttctctcccaaagatgtattaaacctgacaacatactcaacacccttctctcctcagtacagccttttattctaatagctactagttctaatcccctgttcctgctcttccaagcgtagacacaagtgagaggtggcttatcctacactctaattgataacatatagattccccacaccattcaagaggcactgattgattctcgttggaaagaggctgtagaaaatgagatgaatgccttggtgaaaaacagtacttggacaatcacaaatctacctcctgggaagagattcatgggtcgcaaatgagtctttaccaactaaacataaatctgatggtcgcattgagagatttaaagcttgccttgttgctaaaggcttcactacttagtttgacaaaattgattatcaagaaaagtttgtacccattactaaactaaatacggtacacgtactgttatctcttgctgctaataaaaactggtctctacaccaactcaatgtgaaaatgcattcctgttatatggacattccaccgattcgcaaactcaaaaaatctttatatggccttaacagtctccccgaaggtttgttaaatttaccaagtccattcagaatggctgctacactcaatgtcaaacaaatcatacgtaattcgtctaattctcgtcagataagaggatatctatctgtttatatggatgagataatactgatgggtgattattaggagatggaaagattaaaagacttcttatctaaggaattcgagattaaagatcttgggctgttagatattttcttgacatggaaattgaccgagctggtggcattaggaaaaattaatgtgcatcctatgat

SEQ ID NO: 295933 - DNA, 2304 bp, Cannabis indica
aagcgggttggggtctaccagtgctgtattttgtgactctatttagccgcttaggtcggccaatggaaaaggacttgtaatagtgttttgtaattatttttgggatcccggctattgtaactttttgtttgtaaattttaaattattacaagtttattttcatttcgtttgttattaaagtttagcttccgcattaattttattagtaattccatttacaggattagggtttcttaagtatcttgggtagcgtgcctaatagttagggcgttacagaatctctcaacaactttgaggaaatatctcacccatattaaatatatgtaactatatttaaaattcaaatttaattaaatatttatcttttgaatgaattaattaatcaaaaaaataaatctagtggtgcccatcattatccatatgcacctatcaatgtataataacacagtgctaggtgcaaccattcacttaactagtctgtttacccaaaaaattgcttaatggggtggatgctatttttgacttgtaccataatggaaataatctcggtcctcacatcccaggatagggcattgataccttcacactagggccacctatgtaagcaccaagatctagcaaagtcattcttatgttctatccttcatgtagacatcctagagcttaacctaggaccaacattagtgttgggggcctaggttgacatcctctgcgtcgtcttgcatcagttttggttcccaacacattcccaatcttcttatggggaatcttcttagccattgttataggatagatgagacacattcccaatctaagtttcacactttggagacaagtctagaaaaaatggcacctaggcactataaagccctaatgggcgctaaggttagcagttagtcgatctagggacaccgtgactggggattaggtttttagggacatcgttggaccctgattcctcaaatccatcacggaacaatgcctagatttaatatttcatcaatgacatctttaaggatttcattttccaactataggcaccaaggttgacatttcaacctgggcaatgatttcgttttattgggcgaagcccatgcaaatttgaaaaaactgaaatctgttgagtaattttcacccaaaaaatatcaacgagaaatttgttttagatgtttttccccacctgagtgccaagtgcatgccaccataggcacccaggtttacatatttcaacttaaggttttttggaacacttttctgaagaaatttcccaagaatttacattatttcttcccagtatggagatacaagtgcttttgagaagcaaacaataccatctaggccctagataaaaagctgggcacccagcataccaagggttgatgccatgggcgccaaggtttacataaccacatgttcctaatttatgatccaattgtgattttgtctcaacattattctcattttactctcaaaacaacatacgagacatagaattaggagaaaatgtcatcctattggtggttcagctcccatgtaccaccagacacaccactaggcacccaggttgacattttacttggggctcattgttacatccatcaaaacgacagttctatttaggttattggtcttattttgccccaaaaataagatttaatgcttctgcaaagagaaatctcttgtatatgtgtacattgcaagtccaccaacacccatgtacactagtgatctcccggtcgtcacctagttgtcactagtgattaccttggcataacatgtgcatatcaagtaaaatttccaaagagaatccatcgaagtcaaagaacaaactaagaatatctatcacatcacttaacatctccaaatatgaagaaaaaccaaaaagtgcaagttctgggcgtccatgttaacatttgcggcaacctggttgccccaagtcagtttactgatttttttagtagtgcacaccgctcagtaaaatgaccataactcactcaaattttgttcaaatgaaagcgcttttcaagaaagatctaagtgtgtctcacacccttaccacgattttgacgtttgaggcatcaaaaactacttgcgtgttagagtaaaatttttcggtaaattttttgagaatttttatgttattttattgtaatttaatttgacctccttgttggaatatgttttactaggatcttagatttactaacaagtatgttgtttaacaccctaaatatgaacttctaaaacgataataaattaaacacatataaagtttagaaaaaccatacattgggtgcagcggaa

SEQ ID NO: 295934 - DNA, 4093 bp, Cannabis indica
tgtataaggagcttataaaacaatatattacataattatgtatatatagatataaatattttactttagcatagatatattatatagttgacatgtttaagaaagttgttttatatatatatatttaaaagaaaaggttaccttagtttgagggtaggtaaaacggttggtgagatttagtaagaaaaattaataaatatttatatataaaaagacaaaaataaataaataaatagagggagtggcttgcatatcgcaatataacaccactctattattattatttttccttaaataaccaaattatacctaaacaacactacagaccttttcaacaccaacaatagaaaaaatagaaaaaagatcatacttgattttttttttaatttttttctaattattataattatctaaacatagttatgtcctcctcgttgtccttaatggatttagccgcaataattacagattaattcggagaatatataatcttctttacttatgttttttctcttctccccaccctaaaaatattcttgcaataaggtactttctcttcatattttctcttacattttcaccctttttttcttatgtttttgagttttattcaactttttgatcctctataactatttattcatgagttttgggttctgggttttgctatggtttttggtttttctaactttgtttataatttttttgtgtatgattttaggtggagcttaaacttttaagggctatatatatgtatatgtattaagatatattatctttgtctttatttttattatctcaaaatacattgagcaatatttcaagaaaaagtaatcatgtgtgataccatgtctggacctcttgaacgccccattaagccaggtatgatttcataactttttctcttatttttttttaattcttaattgttcatatttgattatatatacacacttatatagaactcatatatagctatatatacaatgacaaatacaatcaacacaattatgatgtcatgaacaacaaaaagtaatagattttctagaaataattcatatttttttattgaattactaattcataaaaaaaatgaaatgtgaacattagagacaacaaaaaaaatttgtattcatggttaggccatcataaattaatctatagcaaaactaatactaactatatattaatgttgttcttgatttaagctgtggaagattttattcattctatttagattgtttaattaaggttgaaaaagattgtgaataataaggttaggagttgtttgccaacatttgtagcttcatatttccttttctttttttcctacttctaccaagaaaaaaaaatgatttttatgggatattttacaacaagaacttgccattctttggtgctatattactatattatatgaaatgaaaatttggttaagaaaaatgtccaaaaccatctcattgtttaatgtacttaattttgtccaaaatcttgaccatttgccttaagtttcttaattttgttcatagtttttcttgatgagttttcgtgttaatacacaggtttggaagagagctacgacgatgagaagaagacaagacttggatcgttgaagaagaaggcgatcaatgcctcgaccaagttcaggaattctttgacaaagagaggaagaaggaatagtagggttatgtcagtcacctttgatgatgacattgatgctgatgaattgctagctgtggatgcatttcgccaagcacttatcttggatgagctattgccctccaaacatgatgatcatcacatgatgctaaggtcatcatatttcaatgataatgattatcacagtaaatatcattttagattatgtgttttacaaaaattaccaactagaccttctgttttgttaaatgacaatttaaatcttacatttttcaaaataatataaaataataatctggcatagaggtgttatgagcagactggtttatattttgcatctagaaattggcttcaaatattttaaaacgtgttaggtcatatttgtcatttaacataacagaaggttcgatcaattacttctataaaattcaaggcgcagtcttaggtttgtatgttttataattgaaatgcaatctaatgtttatgagtagttgataattgcagattcttaagagccagaaaatttgacattgaaaagaccaagcaaatgtggactgatatgctgcaatggaggaaggattttggtgctgacactatcatggaggtagccatggattcttcttatccaaaacatgtcttttttgtttggagaagtgaaaccattcattaaactttgttccttttgcctattttcttcttaaaggaatttgaatttgatgagatagatgaagttctgaattactatccacaaggacatcatggagttgataaggatggaaggcctgtttacatcgaaagactcggacaggttgattcgactaagcttatgcaagttacaacaatggatcggtatgtgaagtaccatgttagagaatttgagagaacctttgctgtcaagttacctgcatgttctattgcagcaaagaagcacattgatcagagtactaccattttggatgtccaaggagtggtatgtcattctctttatctcaatattattattcacttcaagtttaaggcatgtatagagcaattttgagaaggattttggagtttttttagggtaactttggccaaaaaaaatcatgtctaaatattccttttgaactatgatcgttagtgaaataagtcatccgttaaattatgagtaattttacccccgaactatgatcgttattgaaaaggggcatataaaagtttcgggagtaaaattgctaattatttgccagaagtttaatgacgtttgatgaaagtcccattttttacaggagaaattttttaaactaactatttgaaatattaaaatttacaaaataatctcacttagtttactctatgcaaccatgatggttggacaatgtaaatctatggtcgttttgcgaccataatggccgtttatggctacacagtgtaatttatagaccataaaagattattttgctaatacaaatttttgtcaaataattacattttaatactttgatccattcttactctgaaaaaatgctacattcttgtgtaggggctcaaaaacttcaacaaagcggcgagggatctaatccagcgccttcaaaagatcgacggtgacaattatcctgaggtacttgatcgacggtgataatctacatttttgttttcttatcatgttttctatgctgtttgataatgaaaaatctcttgttatgaacagacattgaaccgtatgttcatcatcaatgctggttcaggatttaggctattgtggagcactgttaagtcattccttgacccgaaaaccactgcaaaaatccatgtgagaatcctctttctcattttggttttacatattacattattgaagattaaacaattttgtattctatgcaaaccaggttcttggtaacaagtaccaaagcaagttgcttgagataattgatgcaaagtaagtttttagcttagactagtttaaatattttttcgagtttttcaaaattttctgttttctcacattgctggtttacaattctacaccagtgaattgccagagtttctaggtggttcttgtacttgtgctgacaagggaggctgcatgcgttcggacaagggcccgtggaatgatcccgaaatattcaaggtgatttgtagtacgaattctcttcttgttaagtttgtgttagtgttgaattgaagatgattgagttttttattttgatgagttagatggttcaaaatggggaaggaaaatgcaccggacgagttctttcgggcattgaggagaagagaatctctgaggatgagaaatcaagctcaaaggtactaaaaaacttcttaacacgagttaagggtaaatactattttggaccttgtgttttgcaaaaaattacaaattggaccttctgttttgttaaatgataaaacggaccctgtatttttaaaattatacaaataggatcct

SEQ ID NO: 295935 - DNA, 4699 bp, Cannabis indica
ttaaacaacatacttgtgagtagatctaagatcctggtaaaataaattccaacacacattagttgcattagtccccttatgcatcattccagaccgaaagaaatcactcacagcttcacaaaagtcatacccaactgacttccaatagttcttaagaaagagaacaaacataccatcaagtcgaggtgccttcatactccccatcctaaacagagtttgctttattacctcgagctcaggaagcctaaccaaatcatcttgttctataggggagagatggtcctagataagatagtctaaactctccaacgggccaaaattagaccccgagaagattccaccaaggaaactagtgaactcttccccaatttcatcacacgaagagacccaacaaccattcttattcaagatactttcaatagcattccttcggtatctaactgtgacagagatgaaaaagaattttgagcatttatcaccatccttaatccaagagactctagatctctgctgctaaaataatgcctttcttctcagcacctcattcaggtcaaccctcactctctgttcttgagtccacctataagatcctatctccatacattggatgtcatgtagttgcgtttccaggcgtctaatgttagagtcaaatttgtcaaatttctccttattccatttccgcaaagccagcctagtagcacccactttcctgaaaaccctcgccagggcccaatcatgataggtagacttccaagcatggtcaacaaccaaattactataggaatctctcatccactaggcttcaaaacaaaattgacatttaaaagaggcctcaaaaaccccaaaaaatacacataacaacatgtcctccgagtaacaggtatgacgtgattgaatagctgcctttgggaaaggttgaagccattcttcattcacgattaccttgtccaaagaaaatttaatatgagttgaaacctccctatggttgtcccaagttaaattgtcacctttaatgggtaagttaatcaagccatgggagtttatcggctcaaaaataaatggcaagaattggtcctttcctttcgccccgacacgtttcgaagaattcagcacaaaattaacatccctaagaagcatccatgggccaccaaacttaacgccaagagccaaaatattcgaccataaccttttcttttcatgaaaatatgatttgccatatacacatgacaacaaccaaggatgattagccggatcggagtacacaataccagaaatataatttttggacaaataaatattctaaaaaataaatcttgttttacaggctaacaaaattccacgcacatcccacaataggaacaacaatattattataaaagtgtaaattttttataagatgtaccaatgaagtagctttcactttcaattcagtcaaaaagatgaaatttgaatagcactgccaaatgaggctttttagttcaagaactgtagaggtcttccccaaccctctacagttccaagcaatacccgtcatgattcctgtggaggagatacaaaatcctcttccacaggggaaacaccggcaagtgtcgatccaacaagcgagccttcatcattagtcaacacaacttctctccaaggggcgtagatatcagcaattcaagcccttttcttctaagttgtgagcctagaagattaaccccgagagataggcttatccacttggtaagagtcatcttcggagtggttagccatattgacatcaatctcatctgagcactcaaaaggttcttcagaagatgagttgcgctcatggtgttggtcttgagatggttcgactgtccttcccaaatccacaggaaagtctcttctaacccctaggcagcttttcatccctgcttttggaatagagcataatgagagagaaagatgatcaggcttacaaagtttaaaaggcatggttctctcattaacctctaaagaaattgaagctccaatatccatgcattatgcctttctttttttaatgttactggatgcaaaatcaccaccatcaatgggctatccacctaagtccaaagggatgtcattgctattaaagttcatcccattaagcttatttagctcatcgacatataattctttggcttaaaataattgagtcaaggccctcttttcattaccaccacatttttcattaccaccacatgaggcatcacgacccacgacagaacttgaatgcatacatgggcttccatggaattgagagcagcccagcccacaagcctttttaaataactcgagccccaacccactaagtctcacacttttaccaacgatactcccttcttcatcacaaagttgaaaccgaccttcccctaaaccaggataatgtgcaggctcctttccatttgcagattattgaaaacaccatttagactaggaatagctcctgaagccaacttcaacaccttggggacccaaatttttcttgaaactgcagctaacttttgagaagactgagcagtccttttcactttcattctcgaactaggggccaaagttggaccagcaatagttgaagcacgactagccacaaccattgtgtatcttgtcgccggtgccagagatgtaatagcttgatgatattgcctctaataggtgccagtctattgggcgtcgactcacgagactcacccgagaaacaaaagaggaagcaggagaacgtcgtgagccaaggaccgtacattaggaacaggatacccaaatggttcgagaccgagacggggtctttcagcgagcagtctcgtctttaatgaccgagtctcccataacaatagcaaaagttactcaatttctcatatttaaattgaagccacactttgtcaccatttagtttctttaggaaacaccaggggaaaagaggatttacagtggagaacacaatcttaactctaagccatttggcccatgacactggtctttcctcatcaaaatccactctcagtacattaccaccgagggagcccaagattaaagcattgttatgagaaaaatattccaatggtagttgatggatttggatccagaaagaagtttcactagcaacacaactcacatggttcagatcaggcttccagtctttaagagtgagacgctcaccattgatgcaccaagaattattctccaggacccaaaccttatccacctctttttcaaaaccaaatttgaaggaaaaggacctgttagacttaggggagaaactagacaccataacaggtctcttccaaactttagcagtagaagccttaacatccatcacaaacacaggtttctaggaaaccacaaagccaacaacacaaaatttcacaattttagacacagtagttgtacaggggtccaatcatacagtggtgtcaataaaggccacacacttattgctcgcagcctcgggactaacattaactaaatccatgacaccccaaccaccaaccaacctaaccaaaggaaacaaaaaataaaactccacgtgcaacacacaccaaccacctaggaccaactaccaactcacgacagccacaaacaaagaaaacacatgccaagaaaggaataaagcatgggaaatggaagggaagaaaaccaatgaaaagtcaaaccagagaaaaaacaaaacaccacaaaaatcacaccaacaaccacaagaaagacacacagaaataggacctaaacaaatacacagagtacaccaacacacaagacactcctagaccagagagtgagaaatggtagatgacatctctcttgtaaacttatttttttaatataaatgagacacaggacacccattttgatttagtctaatgtaatacagttttttatttagatgtattttgaatgaagcaatatgtattcacatagagattatttatatgagtatgattgtgtttgaatttaaatactactgacttgacaatgaacaaaagatcttttttcctctattatttttattttgctacatcttcgtttcatttttaaatagagatctaatttgacgcaaatttttatatctagttttatttacagtagatgaagttatttctacaggaaaaatttattagtatcttagtaaaattataaatgtactttaatatattaaaaaaaatcactcttaataattcttttaaaaaaattgcattaatttatgttaattttaataattatcttaacttttttttttttaaaaaaaaaaaatcaagtatatttcttatttttttttaataaaatttcatataattttttattttatattttttgtcttaatatctgttttgaccaaaaatagtttatcattaataaaaaaatcagtcaaaaatttattttttgagaaccttttatcccttattcattcttgatctttgttccgtcttatcatggcccaaaaagagcctccattctcttacactacctcattttatttatataactagaaaatgaaatcgtgttttacgcgattgtttaaatatataaaaaaactatagaaatttttttgggtaggagtgtcatttttacttttattgtaggagctctttcttttttcaacatatacaaaaattatatttttattctttttatgacaatgtataatgtagttataacagatattcaattttttaaaataatttataatattaaaaaaata

SEQ ID NO: 295936 - DNA, 2461 bp, Cannabis indica
ttttcttattggaagctcggttgtagacgacaatggtccccataatagttcaaacaatgttgcttgtaagactcaattaattgattttaattaatcaattataattctaaaattagactatgtctagtttatgaattttcacaaagctagggcataattgtgaagtaaagagattctagggttcatttgttaattaagagactttattaagtctaattaataaatttgttaaatggaaattttacttgataattaattttgattattaaataaatagttttggcatttaagttgttgaattggaaaaatggtatttttgagaaaataagataaatagttaaaaagaaaaattgcaaagtgggggcccccatccatgaccggccacttatgccctatcttataatttatttatcatttttataatgctaaataattcaaacctaaacctagtttgattcctatgaatagaaagtgatggcctcaaattaatagatgattaacacacttcccttcagtcaaaattttgagccatcttctctatcttattcgaacccttcctctctctttctctcttcaatatttcaaaccctatagtgatagagtaagttcccacacatatcaaatggtactcaatcatagtgtgtaaggctgtgaagaatccaattcaagggatggagaatcgggctcagatcttggtgatactctgctacagaaagaatacaagggtcagagatctaagcggaaggagtcatttaattccgctgcacccaatgtaaggtttctcaaactttatatgtgtttaaattacattttttttagaaattcatagttaggatgttaaacaacatacatggcagtattctagatccttgtaaaacataatccaacaatcttaactaccatcaaagaatcagcagatgtctttgcatggtgccaaagagatatgaccagattatgtccacatgtcattactcatgttttgaacgttaattaagatatgtctctagtacagcaaaagagaggcccctttgatcaagtgaagtcagaagccttggaaaaagtgttggataaaatgctctcaaacacctttatatgagatgtgtattacttggaatggctggctaatccagtttttgtaccaaaacaaaacaggatgtggcgaagatgcattgatttcatagatctagaaaaaccttgtccaaaaagattgcttcctgttgcctaagattgatgaaatggttgactcatattttggatattatcagatcaaaatgcatgtggcagaccaagaatgtactaactttagaatcaacaagggtgtatgcagctacttagtcttgcccttcgaattaaaaatctcaggagcaacatatcagcatattgtagaccggatttttaaaaacctcctaggaaagaatatggaagtctatgtggatgatacgtaagtcaaatctaagacaagcgagggtcatgcaaaagatctaaaagaatattttgaggtggtaagaaagtaggggatgaagcttaatgccaagaaatgcacatttggcatcaaattgggcaagttttaaggattcatagtaagttaacgaggaatagaggtgagcctagagaaaataaaagccttgttagatatgccttcccaaaaaagacataaagacatacaaagcctgactggaaaaataattgccttgagccgcttcctttcctactccattgacaagtgtattccatttctcaatatcttaaagaaaagttaaaaatttaaatgatctaaagtatgcgaggaataattcaaaagattgaaagaacatatgggcaaacgaccagtgctgtctaaacaagttcacgaggaagacctatacttgtacttattcggctccaaaagtgcagttagcataactttagtccaggagaaggaaaaggtgcaacacccggtgtattatgttagtaaacatatgacaggggctgaaatttgataccctttgatcgaaaagttagctttctacctccggattgcgtcgagaaagttgaggtcgtatttcgaaggacacgcaatcaaagttttcacaaaccaccaacttcgacaagaccctctatagatgatatacattgaatagggattaatttacttttacacccttcaatgtattttatccttaaaagacatagctacacacaaatgatattccaggaaactaatgtaattacagaaatgagtactcaaccatttatctctgttaagccaagctcgaaggaaatcattattgacttgcatatccggatagaagctatacattctttatctatgattagcgctcccaatcaattgaactacgatgtccttaacctatatgtcacgagaagaaccatttggtcgactttaatgaatagattaaagaacacaaataatgcaactgaactagaacttaaccatctcaggattgacatcatttgatct

SEQ ID NO: 295937 - DNA, 4416 bp, Cannabis indica
atacatttatccttaataacatgacccgtagactataaagatttaactttaaaactatgttaaaaccttcttgttatttatttattaagtaattaattgttatataattaattctgcagtttatttattacaaaaaagattaatctactagttaataaaatctgcattaacagaaagaaatgggtagatttaaatatatcaaactaaatacaagtaaagaaattatacccataatttttgccaaggatttggtggctaaatattgctggcattaatagtctccttggtggaagatcagtatgaagagttgagctctgacgaggctggtccggcacgatgaatatgtggatgaggtgtggctatggctttcctacagaaagagaatagatacaatagatatgttggaaagaagtaaatggaataaaaagaaagggaattgaagggtaaaattggtttaaaaatttatgagtagaatataaagcaaatattttaagaggtggtgtactaaaagaggaggtacaccatttaagagtggtatgtcaatttcctttttttttttttctctctatttagtattttagaggtgtcatgttttttgtttatttttggatgagtttattatgaaactagtttctgttattattcttattgtttcttttagttaactttgttataagctttgggtgtggtttagatactggcgaaacaaaacataaaattaatgaagtagatattgagaagagtaaagcttagacaaagaaggctcatagaaaaagaaagctaagactaagctaaataataagggttcttttaatgcatgtgcttttgtttctaattggaaaatttggcttagtatacttaaatgtaaaacatggtattttaatatactaaccaattagaaatagtatatctatacttttaatatattttctcccaaaatacctttacatttcaaaaaaacttttctccccaactctctcattctccagcgttgaaccccgacctagaacccctaccgtcaaacacacagatccagaatcccggtcgcaagctctgtcgttgtcttctctcatgacctatctcattttttgcattttttcttctcgttttctagttttttacaatattttgtgatatttagcgatatatttgcaatgacagaccaaatctgaggttagggatgaagtttagcgatgattattgatatttagtgatgttttgcgtatttagtgatgtttaacaatgatattagcgatgtatttgtgatatgagactaaaaacacacatcacatcgatactcattgtgaaaacttgagtgtgattttgcgacatttagcgatattgtgaattagagacatttagcgatgttttgggatatcatcaaaaacaaaaacaaaaatacaaaaaataagcgagttgagagcttcggcgatggatagggattttgtgagttttggggtggttgagctcatggattttggggttttagggtggagagaacaagacttagttagagtgagagagtgagagagttaaagagaggttttttttgaaatgcaagggtatttttgggaggaaaaaatattaaaagtataagtatcctatttttagtcgggtggtatattaaaagatcatgctttacatttaagcatgctaagtcaaattttccctataatattcttattcttaatttttttaatttcttttcagtttctattattattatttattttttggttgtcatttcttttgatatggctatactttttaattgattttagtttaatattttataaatttattagtttatataatttaaatataagatcttgttgttgttaatgctagtattgtgtaaggcaactgttaaatattcttttaaattatgtgctttatttgtttatatttagtagtttttgtgtttcatttaatttaacgttttatgcgctttttattttactttatttttgttcattttttattcaaacttatatgaagttagaattttcgttaaattagttatacttgtggtcttacttaattgtactatcagttttagttaagatttggtaaaatgttactttattatatttgttaaataataatagagcatcaactaatattaatcaaagattaataaataataattatgttctcaatttatcaaaattaccatcttatggcataaaaataaatgagtaaagcatattatcttgcaataatggttacaaatttttacgctccactttgtacacctttaataccatcgatctatacacaaagaggagaaaatagagcttgggtatgatgaacactactctaatattctctccacacacacttagccatacacttcttccctcaaccatctaataagtcaaaactcttatttaaggagtaaaatgggcctattggatctagatgtctaatgtgagagaattaattatcttgacccaatgggctgaccaaagatgttttagagtgtgtccatgggccctagacatgttagtgagttatgtccatcccattatggcccaatggtaacaccatgcattactgagtatatagttatcattaaatgttaatgccagcactgagtgagcaacacttaattatataagtccacataaaatattctagcattatcccacttggactacataattatacatatatatgtgctctcattatgcaatagtgtcaacagacaaaaatctcaagaaatactaatgtctataaaactaattatgcatcatattgtatcgacatgatacaaatataatacatatgagacatttgagattcataaaatatgatgataactactaatctcgatctactcgaacataacacatagactaagccactggcttgcatcaacaagtgtgcatgcacaacatcaaaaagttatccaaaatatgcatgtattcaacaaccaatagcaatcgttaacatgtctatcatacatgaaaataatgaccccacttatcaaatacatctttagctcccaacaatcaaaacaaaaaataacttcttagtacatacgttcaggtaacccgtatcagtatagttatttacatgttatctgtaagtgcgtgttattatactaatagaggatcctacaactttctcactacatatagaacgtcatcactattaatggagtaataatactcctcaagttccaagagaaagacatgagtgtgatatttatcacataagttcagtaagttcacaatagaatcaagtactcttaacattgaaataaaatatcgcaattgtaatgtataatcaatgtcctcgtaacacgtcacacattatatttttacaaatgagaaagctcttagtgtccacacaatacctaaccacaaaataactctttttaccattatagtacatgtacaagagaggaagttgtaggtgttcattttgatttgacacttaattacaaaatagctcctcctataatcatcaatgcttataagtagattttatcatccatgtagccttttcaattgatatcattagaaccaactactatatgacatgatgttaatttgtcgattgctaacacatccttggtaccataaggatgaaaactcaagtaccaatccagcatgcttgtaacatatatcataataggaatgcatacacttgagtaagccctaggctgccttcgataagcatatatatatttatgtgtatatgggacaatttcaaaattgatatctcgttattatttatacgcatggactttaggccttttataacacaccatttagatatttaaaaaatatcaataaaatcgaaatattaatcacaacaatagttagtcaatgcaaactaagagataatttagtctaccgttgatcccatcacgaagaatttaaatatttagaccatataatgtttaccaaggattcttcctcttctaaagattatcaaacaacggcttaattcgtctccaaaatagatcagatttataaaatatgagaaacatactatatcaagtgacagtataaacataccattgctctattgatctctcatatagtgttgactaatgataatgtttcgaattgaccattttaagaattacagtaatcactatcttgatgtcctgcctcaaaatagatttgacctattgaactcgggtgtccatgttagttaccttctcaaggcttaatcaagaaatcaaataagaccagatctttaaataagaatttagttctcacatccttatatattgattttcaaatagttgccattttattattcaataatagtgcaaacaaataaatctattgttagagtggagactagctataggctttaatgttgagtaaaatccacttataaccagtcccttttacatacaaaaatccacatcagtattttacaacagaaaacaaacaa

SEQ ID NO: 295938 - DNA, 4131 bp, Cannabis indica
tttattttttatttctttctcaaacttggcagctaagaaagtattttttacatttttaatatatacaacttaaaatattgtgatgtatatatatagctgtagatgttatgaaagtcaaataacaaaaattaatactattcaatactaaaaaaattaacaataacttacagtatccacaataaaaattttatatttcaatttattatttttaacattattgtaaattactcaaaaagtttcaaaaatttacgtttaaaaacaccaaaatataattacttgaataataatgcagtagttgagaaaaacaaatgttgaactattcgttggtcaactatgattgcaagattattaagattaatataataattaaagtaatatctaaaaacagaatatcgttacttatctgtttttattctttgaaagtattaataataattaatcaacttgttcatctacgtaaacaagtctacttattgaattgaatttgtaagagtctataaatatatatatatattctgatacaaaacttgtctcttaattaaattcattatcattgtaaatacaatatataacaatgtattataaagttgcaaaggcatcggagtacctggcaatcaccggagctggaatcaacgatgtaaaactcttgaaaaaggcatggattttaccaggtcaatcatgtacagtcttcgatttgtctccggtcaattacaccttcgaagtccaagccatgagcgccgagaagctccctttcatcctccccgccatcttcaccatcggtcctcgcatggacgacatgaagagtcttgaactttatgccaagctcatgtcgacccacgacaggctctctaaccacgttaaagagcttgtccagggagtcatcgagggcgagacacgtgttcttgctgcctcgatgactatggaacagatctttagaggtactaaagagtttaaaagagaagtgtttgataaagttcaactcgaacttaatcaatttgggcttttaatttacaacgctaatgtgaaacaactcgttgatgtgccgggacacgagtatttctcttatttagggcaaaagactcagatggaagcggcgaatcaggctaagattgatgtgtctgaggctaagatgaaaggagagattggatctaaactcagacaaggtcaaacggttcagaatgcggccaagatcgacgcggagacaaagattttgtcgacgcaaaggcaaggagaaggtatgaaggaagagattaaggttaggagtgaagtgaaggtgtttgagaatgcgagagaggctgaggtggctgaggctaacgctgagctggctatgaagaaggccgcgttaactagggatgcacaagtggcggaggttgaggcggccaagacggtggcaattagggaagctgagcttcaaaaagaagttgagagaatgaatgctttgacaatgactgagaaactcaaggctgagttcctcaccaaagctagtgttgaatatgacattaaggttggtataatatgatttcttacatttttttctttctttttcttttaatataatttttgccacatatgattggaacttaataattttctatatttttttaccaataatattaccataaagctgattaaaaattcattgtccttgtcttcctaatctttggcgttgggttattttgtgttgaatgatattagcaacttattatatctcatttccaaatacaagtatatatataactaagttttcagtttcttttgatatataagggcatctccgatggagttagttgcccaattggctccatttaacacacttttaattttttaatcaattacaatttttttttgttatttttgtaattaaaaataaaaagagcattggtttggtgccaatatttaaatcttttctttacttatctctcttgccacgttatacattatggtctaccacttttttgtcaattataaaaacaacctccattagagttggcctaatgaagttagcaatgtgttacatgtgacatgtattttcactttatagagtattattattaagtactatgtttaagaattttttataataattattaaaagtaaaataaaccagacccaaattgaattgtacgaacaatataagacaccccatcaaagtattaggtagcattggtaattttgatttctgagctttaattttctttttacttattgggtaaataatgacataagtatctatagttttgcgtttgtaaacggcataaatttcatgattttttagcagcataaatatcaatgtttataaaactgtaattttcttttagtttcatcaatacagactctgttattattttaaacacgacacatatgaaacccaagttctaaattatttgctctggacgaaaatatataatatcagttatttcactaaaaaaaattattaaatttatgctgctatttatccttaacattttttataaatgatcattaattggtccttaatgaagaaaaaaaaactcaaaattttgattctcattaattggtttttgttattataaaggtgcaagaagcaaattgggagctgtacaagaagcaaaaagaagcagaagcaattttttacgaaaagcagaaagaggcagaggcgaaaaaggcgatagccgaagccgagctatacgcacggcaacaagcggcggagggagaattgtatgcaaagaagaaagaggcagagggactcattgctttgggttcagctcaagccacatatgtaaccactcttctacaatctcttggaggtaactaccatgctttgagagactatctcatgattaacaatggtatgtttcaagacattgccaagatcaatgctgatgctgttcgtggtcttcaacccaagattagtgtctggactaacggtaacggtaatgaaggagatcataataataaggctatgaaagaggttgctggagtttatcaaatgttaccaccgttatttaagacagttcaagaacagactggaatgttaccaccatcttggatgggaaccttgtccaatgattctcttaaagactaatcttgataactttattatctctttttgggattttatatatttgttttgttcaagagttttttgtttgttgttttgtaatttcatggcatagtgtttgatatgcttttaaaaatgatgtaaagggattattatattatataataaatgttttgaagggcgacaaaagagtatcgcccctaaagaagcttgaacttttcttttaatcggtatgtatagtattaggagggagaaatgtgactcctaaaaatattaggcgcaacaaattactattaggagcaataaaaatcacccttaataaattgaaaattatccattggccaagagcgggaattttgccacctatactatgcgacaaaagttactcctaatatcctgccacttgacacaatcaaagtattaagggcgacaaaaatacttttgcatttaaagcccaaatcttcttccctgaccattcccttccctttgagtctctttagtttgttgtcatgagtattttaatagaatcaaaataactattgatttggtttgaaagtaatataatgagtattgttatttaacattttaaagtctctaacactatattgatacccaataattagctagaagtttcatatattatttaatacaaaatttgtagaatcagatattaaaatacactaatagctttatatgatttttatagtgtttggcacttaaagtttctcttagcatttctcttttggttttggtgctactgttgtgggtggtgtggtaggtacatgaaatttgtgggtgtcgtgctaattcaaaaattttgttacataattatattttctataaaataaatatattataaaaataaaaaatatgtagcaaagtactaaaagaataaaagtgagtgattaatgcataaattaatataaaagtacttacaatttgtatctaataaacacaacaatacagagtaaaaaaattaaaagacctaaaaataaatttgagtatatgtatatttaatttattaataatttcattcatatataataataaattgatgatttgagtatatactttttactaatatattatta

SEQ ID NO: 295939 - DNA, 5454 bp, Cannabis indica
tttgcttcttggtatgaatgatggtagatctgacaaggcaagtagacaaagatcagatagtcccttctcgtttccgcgccagaagagatctgtgaggccgagagtatacctttctattgacttagactctgaatagagtgtggatccttgctttaattaaaggagaatgttatccacggtcttattttgcctggagatattatattatctgcctctttgcaactccaagttttgtatttaggcaagtaagaagaaaaggttgatatataataagcctttccattttgaaaaaagataatatagttgaaggtaaaaggacaacaaaaggaggacctgtgctggtacctgcaaaatttctcattgaaccggtaagctatggcgtgtcgtgtgtgtttgtgtgtgtttatatgttcgctcactcagttcagtgcttcccctttcctttctaatgtcgatccgccatttttcgtcgtctctttcagttgtcaacgaggattgcaggtccagcggcggattttgtacaggattttaaatctggaagaaaacacatctgtgtttatggaatgaaatgaatgccttcggatttatcgggggaacctcataaagtaatacccaactatcttacttttttttttttaatttcatttttgtttctgttcttcctattttggtctcggttttatggtgagagaaatagccgcctgtaaattgttcagttcagccaaatgaaatctcagatttagatatttaatatctaatgatattactattcttttcagatgaatatatatttgttataatgaattatttcagcacaattgcaacatgaataacctttgatttatcagctacaatacaaccatacaaacccaatcaaatgaaatagtagaaagtcaattatttcatttaagcatgaattaagtttagaaataaaccagtttttgcataatattattagccattaaagaagattacacacattctaaacttggggactcattgtattaaaatgcattttcataccattccaatttcgtgctgttattatgtttgtcatagcactcacaacaacggcattttttttttttacctaaatgtgataataaaaaagagtttctatcactcaaacaaatgtaacttgcatgtattttttaaacttattttaataatatacaaataatataaacaatattttatttgtatatataataaaataaatattagaaaataaaaataatattaatttaatgatgttgaaaaaaaaatataaaaaaaattgatgcatatgatgtaaggtaaaaatgtgttgtaaaatagagaaaataagacttagaaatgttctgaagatacataaatttggttaatagataaccacttgaggttagtctcaagtggccataaagggtatgtggagtgttttaagattgaatttcaagttgtacaatataatgtatccaaaattatgcaatgtaattatatagaagcgtcaaaaaaaaaaattaatgcttagagatcagatagaaacgaaacaaatttaaaacaatttgctttgctttttgtttttcggttcctagtttatttttcagattatttcttagaaaatatattcagattattctatttttttttccctttggatcaaaatataagtaggaatcttagctgggactaatttatgaaaacgatctttgaacaattaagaatattctagagctgcataattgtgatgaccttataactttactgcagtttttgatggttgtattattaattgaagaattttcaagtgtgtgagatagaaacaaagttggaacatgtaaatcaaagttgtgggtagatttacaagggaatggttcttatctttggttagtagccaaaacttatatataacaagaattttcttaaaagtgaaaataatccaacttctgcaagatcaaaaaaaatctaggtctgtcatttaacacaaatgaataatgtcctgaaaaaatacataggcatgtgagttggtgcagtatcatgtccatacatgttctctcaagtatgtagggttctcatatgatgaattggttggtagcagaaaaatattcggacagaagtcgattcggttatgtcatagtacttgattattcttctgttgcagcaacagctttagaatgccttgcactctcacaacctgggcaattgtgtaagctctcgtgaatgtaaatgtcgcagtcaaggcagaaatgctgcttgcatttcgggcaagaaacacgaggaccgggtttatttcctgtgtcaatacagagcatatttagcaagacgatttgtcgagggatataaaatattaagatcaacataaaggtgtcgatcttagtaaggaataccattgtttcttagtttcaagaaacagacaattcaaacttttcccacattttaaaaaacatatctaatcctcaaacgagtcatgacagtaagataataagagatattaacttagtttgcacccaaatggttaacactagaagaaaacacatattcactaaatatgcaagtaccattttactgcacaaaatcttatactttctccattttactagattcgtttatttggaactggccccaaaatcttattgtattttcggcattggccccaaagtttttgagtctgagaggatctgaaccactagactaacccatggcttgggttatcatggagcaaataattctaaaagtacacatctttatttgttatttgccatgtatagtaacttaccagcattttggagagtctcttggcagccaaagcatgatcttggtaattttagatatggatcatttagtagtgatggagaaacctcatcaaacggtacaataggaaagagatgatgataagatcttgccaaatggggagaagaaatgagcgtcaatccacacgttcgacactctgtaggtaaatcacatatgcgcgctttgcatctaggacaagtgtatccgcctccagcctttgcttccttgtgacaagaacatatggcaatggagctctctgccgctctttgtgggaagcccattttgattaaattagcaattgcaaattctgctatggcaggaggtggaggtgcatgctccagtattaattctttgaaatgtgactacaaaataatgagcaaatgaaaattagcagaattacataaaaaaaagttcaaaaacaactgtattgtgatacaacaagtagtactcactcccaaaagctagtctaagagaggagggtgcccaagtagttatatactacaaaccaatcccatacttagtcaatgtgagatcccaacaatacactcccttttgtgctggcgtccactgcagcccactttttgatggcctaatccacaggtcgccctttcaaaagcacttgagcccgaaagccagtctaagaaagtagggcacccaagtagttatatgctactacccaatcccatacttgtcactgtgagatcctaacatattcattgtcttatggctattgtgttctcaaagttgcagtaagaaagatggacattctaagatctctacaataatcagaaacctgtttctttttctaattctagcttataattaatggtaaaatatgtacatgaactgaaataatacacacacttaacagctgatcaaaactcacctcatccaatgcaaccgagtaagaaccaccagtttcttggcagagatatttgcatataaaaatttctgcagaaagaccaataactgaacaccttattttagatttcttacatgtctgaatggtctccattatatctcctggatcacatgtacttaatgctgaatataagacaagcacttctcgatgaccatatgagggaacttgattcagatacccgtgaacaaggtccagtgcattctgtatcgatgaatctcctgagcaatcaagttttcccatcaaagccttcacatgagactcaggactgccaccaagatctgttaagcaattagctaccccatctttaatggtcactagaccaatttgactaagaggattttgatcaaaaaactctctaatgaatgcctcaacatgttttactactacagcccttcgactcggtcgaaaatccatttctgtagctgcctaatgacaatgccagcaatgaaaaaccagttttagaatatatgcacatcaatgacaacaagaaagattaaccaacaaaacaataatgaaaaaaataagcccccacaatgttttaacacatttaattagtttgaactaaaaaatgaatgtctaacaacctaatcaacgataaaactaaacattaattgtccaatcaaacaagttgttcatctctccgaagatcatagctaatccatttgacctaaaaaatgaatgtctaacaacctaataaacgataaaactaaacatttcatacaagttgttcatctcttcgaagatcatagctaatccatttgacctaacaaaatgaatatctaacaacctaataaactataaaactaaacattaattatccaatcaaataagttgtttatctctccgaatatcatagctaatccatgtgcagttacattggccgtccaacaaacgaattatcaatgtaaatctggataaggaacttgctacgatcgttgaaaaatcaataattagttctgataacctatcaatttcaactttacttgtgttccacatttcataacatatcaatttcagtatattccatgaaagattattcattgaatttcttttacatgtttgaacaatttaataatacctaacaacatttctcaaaaaaaaactctcttacccagataccaaatcaacagaaaccacaaaacccatgaatcaaaaaagcataaaaaacgaagggcttaccttagagagatcaataacaagaaaaaggtaacgaatgagtcccttctggattcgaacagcagaggccgtacgaaggcggcggcggtactgggaatggtaaagggatttatatcgatgggacgaaggagaccagactcatcctcttgaagcgattcccatgacctctcatcgtcgtaggttctctcccaggcgtcacggccaaggccatttccgtcgtcttcatcatcatcgtcgtctgcttctccattcaatcttcttccctctccattgttcatactcttaacaacaataataatcaataagaataatgggacataaataaagttaattaatttatgatcagtgtaacaccaaaaccaaaattgtgggaaagattcttcaaaaatgttatggaaagagtctgtctttgtaagcctcactccactccgacattcatcaagtcatttcaagtatatatgtatttactcctttggaaacacaatgtctaatttattgaaagtaattataacattattaattatattgtaaatgtgtaattagagataattttacaaaaatataaaaaataataaaaatattttttt

SEQ ID NO: 295940 - DNA, 3791 bp, Cannabis indica
ttttaaaattgtacaaaatagtaccgtaaactaacttttttatcaaaataaatgtcaataataacccaatctatagttgttatgataaaattaggtaaattttctacatcagatccagttaaaaacatattaaaaattaaatttaaaatactattttatactatagatctaatttaacattttataaaataaagggcccactcataatttttgtataatacactaagtcaaaatagcattaaccctaaaataaacaaataaataaatagggtttgattttaatgaaaacaactcatagagtcatgccattttcttacattgtataatcaaaacggataaacaaaagacaaatgtcaattatgccttacatagttgagatcaaaccattaaataaatactaaaatattattatttgtatttaattagtaattaaactttttacaatatatatatttatataaattagtatactataaataccaactgtcattgcatgcatgcatgcccaatgcaagtttagtaagactcgaagaaaaataaaatattaacaaattcccaccagttgtaaataaataaaaatggaaaaatccaagaaattataaataaaataaaatattaaatatgaataagaataagaaatagacaaaatccaaaaaataaaaaacgaaaaatatcaataataataataacaattctcagccgtttctcaactatcataaacgtaaaatatatattattatagctcaaataataaaagagtataatttgaagtatacatatttttaataaatatttaaatttaattgtttgtaataataatactactacatgacgtgacaatctatacttgttataaatttttaattttatttaaaaattaatttaaacatttaaataaaaaataatacattataataaaagttttacaaatataacttattattatcgtgaaatttaaatatttatttacaaccgaaacttaaatatatttagggccgactctatactaatttaaactttacgtaaaaataaaaattaaagcctaatgaaaaaatgaggttgttaagatttgatcacgaacatattaaatattactctaatcaaattactgttgagttgcaacatatatttattattatgagtattattttttattttactattaactatattttaattttttttcaaaataggaacctgagcggtagaaaatttaaggcggccgccttttttcatctcagctcaagaatacatttacgccacaaattaccctctaattaaaattacacccttcaaaaaaaatataattcaataaataataaatacacacaaattccaagaaactaattataataataataaaaacaaattctcagcaatttctcaaaaccgattcttctttcatctcccttatatataacttagtacacattcaactcactcactcactcaactcaatccaaacctttctcaaaaaacgacaccgtttccccataaaaaaccactcaaaacaaacactttcccaaaccaaaaccaaaacaaaaacacccacgcgccacgcgcctccgcaccaaccttctccaaagatgaagaaccttcctcctcctccgccaccgccgccgctgcgtttcatggtgatgacgtacccagctcaaggccacataaacccatctctccaattcgccaaacgcctcgccaccaccttcggcgctgacgtcaccttcatcatacccctctccgcctaccgcaaaatgaccaaatcttcgggttcggatccggatccaaaccccgggtcgggtttgagtttcgctccgttttcgatagacggttacgaagacggttacaaacgcggcggtgatatgaaacactacacgtctgagatgagacgttgcggatctaaagtcatatcagatctcgtcgtttcgagtcgaaacgacgatcgaccttactgttgcttcgtctacactcttctccttccttgggccgccgcggccgccgccgatctcggaattaagccggtgatgttgtggattcaggcggcgacggttttcgatttgtattattattatttcaatgggtttggagaagttattagggagattatgggaaaacgacaatctgattccaaaacgacacttcctggattgtcgtttgagtttaaacgacaggattttccatcgtttatggatgctgaggatgtttattactttattattaatcattttgaagaacagttttcgatgatttcgagtagagatcataaaaaatcgtcaatattggtcaatacttttgatgagttggaatctgaagctttgcgagcggttagcgatattagtggtcagaaattgattgggattggaccgttgattccgtcggcttttactgacgggattgacccttttgacaattcttttggtggcgatatttttcacgagggagaaaacgacaaagagagtgttttggagtggttgaattcaaaggctaaaacgacggttgtttatgtgtcgtttgggagtattttggatttgagtaaacaacaaatggaggaaattgctaaagggttgttatcttttggtcaacctttcttgtgggttataaagtcaaaggttgaaagctataacgtttgcgataatgaattagtcgagtttagagaagagttggttaagctgggaatgatagttccttggtgttctcaattggagattttgagtaacgagtcagttgggtgtttcgtgactcattgtggttggaactcgacgctagagagcatggtttgtggggttccgatggtagctttcccgaaatggtcagatcaaaggacaaatgctaagctaatcgaggaagagtggaaaattggggtgagagtaaaaccgaacgaggatgaaattgttgagggcgaagaaattaagaggtgtttggagacggttatgaggaaagaaaataatgaaatggaaaggaacggaaagaaatggaaggatttggctaaagaagctgtgaaagaaggtggttcttcttataaaaatcttcaatcttttgtggcaaaaatgaatagtatatcttaatttaatttaaagtaatttatttatgtatattttgtgagatttttaatttctaaattatatgatcgtgtgagatatgtttcattctccaaccttaaatatttcaaattttaattgattgtctagtaaaagtacatacttaaatatcatctgtatatattatatattgatttttttttgtgtaatatataatatattttatgtgaaaacaatgacttttgttaaagaaaaaactactaattaaccaaattttcaaacttaataatgataacatttgatcaatagcattatcctatacatagaaagagttatattcttaattttcttcttcttcttttttatttcaaaaacaaaaaagaaattcttcattttcttgtaaatggtaatgccgacactctaaattttcttctttaaatttaacgttttattaatttgggtacatattatttataaagctttaaaacacacttatatatgattaaacaaataaagagtgtttttatatatagaggcataatatatctaattatttcacatctcctcacattgaaaaggtctcaaattataatttctctatataataataataataataataatgtagagttatatatagtgatattatcttaattaaggtacgtacacatgtaagatggggtgccgagaatgggatgaagaaattgttcaggatgtgtttaatgaagatgaggcagctgttatcttgggcattcc

SEQ ID NO: 295941 - DNA, 2118 bp, Cannabis indica
attaaatttatatatattaaaaattatttatataataaaaaatattgaaaatattatatatatttattaaatttttttgtatgttgaatttgcaacacttgattattttgtgtatttattttcatgatattttgttctattttattacttagaaatattgttgttttaattatttgaaatttttggctacattacactcgtaagaataatatgtttatgaaatattaaacttaaataaaaggtgatacttagtttttacgtatttttcttcatttttttaaattaatattgaaatttaggtgtgtaattggatattcaataaaaaccgatgattagattggattttgatatctaattggattggatcggatgatgattttccaaattcaattactaattggattggatcggatgaggggaaaaatgttggattagatcggatgcccactcctagtacatcccgtaatagcttctacagagggcctcaaatactaaaaaatattaaggaattcgaatatacaaacatatgataacatttttctcattgcgaaggatcactagccagtgttttgaagctttcaatagagttcaaagttccttaggtacgtaactaagtagtatttcattaaaggccttatggagctaaactaaatgttgcctaagaataaaatatgcaaaactttcatcaaacaccatcttacaattaagaatagtttataactcagacttagattgacgtctttataataatactaaataaaagtacaagcatgaacatctatgtagaacgcagttatacaaataactaaatggaaagagcaagagaaagaaaataagaaacctcttatctccttaatttaggccttttgctaaggctgctactcaaatttctctggtcaggcgctctagcatttccaaaagccttaatcttagtccttgctctttcttgttcactgtctgaatcatctcctttttccctatttgcataacttgcttccctctccaattcttcttaggtttttccttcgtcttcctctgattcttcttcagaggctttctcatcgtcattctgattctaccaatgactccttatcgtcttcttcatcttcagaactcgagtcagactgcatatcagaaggtacataacctttgtctgattcttcaaatttatcagaatcagaatcactaacatctgtgtttaaaaattcccatccaccatcttctatgaactgctcaagatcatcaatattggttttcagtataggacgccatctgagatttaatctactttcataatacttaagatcagttgtgttaagccactctttgatgccatccaaagatgttgaaggaatagaatcaattataaatacacctagcttgaaatctttaaatattgcggtcatatcgaaattcttctgccaaggccacctttctcgagattgactgtttcaatctcggtaagagtgattaccacaaatggtatctctatcagctcaaccaagcagcttaaagttgtgactatgaaagctgaggccttgtgaggtactccatgaaagccaagctctctcggttgtccccacaaatcattaactctgttcacaaagttctggaggtccatattagttttgttttttcaagccctctcccgttactcttcctcgatctcatctagattataggcgaatctcttcccacctcctaaagtttggaccttatccatcacctatgcatagaattgcacatcttttgtctttttgtttcctaccataatatgattatgtaaataaaatacaactgagtgatcatttccttctctgctagctggaaaatggcatgtttaatgctgccaaacataacgtctactttttcatttgcccttgaagtagaataacgaaaatcattggtatgggcttcaagagagtcacagacccataggagctcttggagctgtttggtatgcatgtttcattttctcattttatgggaataagtttaacactacttagagagttatgaaaggaatgataaacctagaaaagcaacattaccgtgtttggttgacattggaatggaatgtgactattttatttttatataataataataatttttttt

SEQ ID NO: 295942 - DNA, 5205 bp, Cannabis indica
tttcatacagtgaatgggaaatgaaaaaaaaaatacagtaaaacttaaaaacaattttttcagtaaaaacatagagaaaaaatatattgttaacaatttttattcactcaaattacataataaactatgaataatcaaggaaatgagaaatcagattgtaccttcaccatcgtcgtcctccatcatacgactggtttttagggacctctactgctctatcttcaacatttagggatttagcttaggaatgaggatcaaaaggggtccatattcacaaaatcgactggattttaatgcatacacagttttcgtctttgattttgagggatttaggttcgatttcgtgattagggttttgggtgtggataatggttcgatttcgtgttttgctttctgaaataaattatgaaactttattttgtttctttgttattccttttgttttaataaaaacagtttaattattttgttttaaatttgttttatttatgttttttaaggttctattaatttattttatttattagttttatatttcagagaaaattaaaaagaaaaggggaattaaatatggtgtgtccacgtgtcatgttagttatactaacgcactaagtatgaacggacaaacaactttgtcgaccttaggtgttttcaccgcaaatttttgaggttgaggactaatcggcatcaacctcaagtttttggggtctttcgccgcattatccctattaattaattatacattttacaacattaattacttagttaaaaggcttgttcataaaatattaaatctaatttaatttatgtgtaatctaatttaatttatatttacactacgaaatgaattaacaaatttaaaattcatacttgtgtggatatcgaatattaatttacttgcaaaaataattaatataatttacatttatttatatatcttttgaaaattataaatatataattaatattttaaaaaataattattgtggaaagaagaagacactacaagaattttgatttttactgatgatgaaaaggcacaactcgtcgggagctttttgccgacgaagaaactcgtcggcaaaacctactggcaataactggtcaggaaaagagtttttgccaatgaaataagtactttcatcggcaatagaagttgtaccagcgagtttgatcacgggcgtagatcccaccgctgccatttcttggtcagttgaagagtttttcgacgagtttttccaatgaagtaagtcgttggtaaaacattagcgccctttttaatttctcgccaaagttttgccgatgcattatttttccggcaaaagaatttatcagttttttcaaaagatatattttttttgtcggtgcaattaacttcgccgacaaaagcttttttatttttgaaaattttagaatgaaatataatatatatatataataaaattaaaattaaattaaaactgaaccaattttctttttattaataatattgttatctaaatttctacactatgacgtggcatttatctaggtgacatgtgtaacatatttcataatctaggcatatgattccactcctagtaggtcgtacaaattgttacgatgctcaaagtcacacatacatatagtaggatgtctgagcagatcatggatagacatccgactagcttcactaagtaggtaggtcgcatgcaccggcaagagaatgcgagttagtaagttttaagatgtatctcgtatatctctaagcttgcgaatcacggtacaatccctacattaataatgggatagattcctatcttcagagaataaaggcaatcagcctaagttttttattttcttcattgcaactgtgaaaataaagtagtttcctattttatttctcattgatttagagaaaccaatttcatgtaattaatccctataaatagtggattcatcttactatgcaaggacatgaaaaatatttcaacagagaacactcaagagaaaaatcacgatctaagagtaaattgctcagagatcattgtaagagcttttgagagagaataagttattcttggtcacaagttaatacaacaaaaagaagagtaggctattaccaactataaggggtcgaacctctataaatctaatattttctttactttaaataatttatttttcgttatttaattattctcaaaagctttattttgactcactatcgttggctaaaagcgtgaccaatattttggtgctttcattgagagcaaaaacacaagttttttttaagtctttttcaagacataagatggttgtgcaaacacgaaggggaaatcagactgatacaactgatcaaatggtgatggatccgagcgtgcagacacctgcaaacctaagagatccacccaggatggcccccactcaaattaattctcagccaccaacaagtccacaaactgtaggtcaaggggtgactacccctctggctgggttcactccaggcgtgtaagaaactggaaataccagtactgcaactgagtagactattcctggaacttggatcccatccaccacaaattctcaaaggccagtcagagatacaccgaactacagaatttgtgagatgcattggggctagtgcaaggccacaataacactcttcactataactaccaagatatccaagcagctataattttgcttttgataaacaaagatgccagtttgaatagtggatggatcaagagatgaatatcatgagagcccagcaagcagcaattgataatcgttccaggcaggccaccgtactaattagaagagtctatcaggtcagctgccaacaaccagtgacggatgctaatatatccacggggccacagaatgggtcagaagagcgtttggctaaacaccaccaacaaacccaagtaggtggaccatccaatacaaggacacaagttcaaaatgggaccaattggtagatgggaaaattttaccaacccgtcccttgggagggaatgatcagtttaatactcatactcaaacagagatatcaggccaaccctttgctcaaaacagttaaacacaaaggcctttcaggacatcagtatttgattgattaagtaccatgcatgacctcaaaaatgatttgaattgcagtagaggattggacagacatgatattccttctactgtacagtttatacaaataactatgtaccagacccagttcaaagagatcctcatgtcaggcaacaggcaggtcaagttgatccattagtgcaagcacaaatagatcatcttaagagcctcgtcaaggcctgactggcccaaaactcatagatttggaacttgaccagactagagaattgccattctcaccataaatcaatgctctcaacctagtgcctaaattcaaaatgccaacatggaaaatatatacaggcaaagaagattcattgtctcacattaaatactttgaaatgtaaacggacttacaagcggtgagaggtaatctacggtgcaaaatcttcctagctactttagcgaaggccgcctagcagtggtacttcaaattagctacggggaagtttaattcgtggaactctttcatgtaaaaatttcatgcatagttctcctcttcttggaaactaccatctcacttggaggacctagtagaagtgaagcaaataccaggagaaccctttagagctagcatcagtagatctatgacttaagctacaaaggtgaaagaagtgactgaggaaggaaggttggccgcaatctaggaggtattgaacccctaggggaataatggaaagacattaaaagacttattgtggggtcaatggctgaattctttgaccgggtagatggatttataaagctcaaagaagcatttcagcgtgtggacacagctggacaaaagaaaaatcaacaacacaccactatagccaatacatctgtccagccagaccaaaattcacaaaatcatagcagctcgaactaaggtagaaaaaggtcaaataatggcaacatgcaaggtaatagaaagaaaagcaagtttagtggcaactccgaacaatattctcgagaaaatgcctcaaagttcaatgcatttactatcctaacagaagatatagagagatctttgcaaccacccagtttgtgctgccatataaaaaacctcctcctatgaagaaagacatgagcaaaagggataccactaagttctgtcattttcatgcggattgcggtcagacacaaatgaatacaataacttgaagcaagaaatagatttcctcatcagaaataaccttgaaatttaaaatcttgaagaatatataaaaaaaaatttagaaacccatgaatggttgaatatgaataatttcaggccaaaagtgatacgaaattagagaatcagaaagtctaagcatatgttagtcaaagctaaaagccctaatgtcatatactctatgattggtcaagaaaagttcaagaacatggaaattttgaagcaaaaaattcagaaaaaaaaaatgaatgtactcaacaaatgttgcataaaaaagaggaaaagacaacttactcattgtttaaagctttctgaaatttctcggagggtatcaagaatggagtttccaacaagctttcttcaaagatgtgagaataaaaaaagagaaattccttgctctgttttctaagagtaaaaatggctaataaaatcccctaaaagcttataacctcttttatagacttttgaaaggagtaagtaattgatttaaaaattcaaatattttaatttttccccctaaattgaacattagtactcattacacatggtacagacatcacgcatgcagtgtcattcaaccgtcaatgcgtgattcgagagggaaatttgaaattatatgcatattagggactaaaatttgtatcctaatctaaaaatatacataatttgtaaaatgggataacttttacttaaacccaattttacccccctcatttttaaactgactctctcttcctcccttttctctctagcgtttgaaatcgcaccacccatgaatccccactcgaacgatgaacccaccaaacccaccaccccacggagggaatccactaccccacggagggaacccattcactgagcacacgacgagcaaggtaaattttttcccctttcggttttttaatttttttcttattgattatggtgaa

SEQ ID NO: 295943 - DNA, 3049 bp, Cannabis indica
tcacaaggcatacagagagacacagtatagaagatagagaaaagagaaaaaagctccccaaataccaaaaaaagccccaaattattatttttattattattattattttaatttttttaaaaaaaataaaaaaaaaaaatgaagcgattaatgagccggcttttttttttcttgggaacatcgctaacaatatatctgagtatctccacagctcacctcaccgaagagtttttttacttcttttaattttaattttattttgaatggacaaatataccctcgcgaatttcttttatatttttcataaaaatttaacgttggtcccaacacttactaccagtatctctttctggctttgttctgacgtgacggaattgactaggactattttttttttcttttttcaagtgcgctcctttactacaaattttttttacttgatttctctcttttacccttgttttgaattctaattacgaatttaccattttgctttttgggtaaataatattcggacttccactcgtgggtccctattactaagactctctgttgttgttgcggtgacctatcaaagtctgaccattcttttttttttttactttttttatttgatttttttgaaattattttccgtcatagtttgaaacatttcttcttttagttaattgaaatttcagtccaaaatgcaatttatgttcatatgaatgaaatggaagaggttcttttttatatataatatactaaaatggaggagttacttttctttaatatgtatattatctagtgggatgtgctttatagtttatttattttattatttaagaaaattagatgttgtgtttggttgcaacctcgcaagaatctttacatttgtactgtaattagaatagtttttttggttggtacgtattgtattattgtaataaatatgtatattccacgatttaagagttaccaaataaatataataaacaatatttatatatattgtacaccaaatcaaatcttggcgatgatcatgagagccacgaacaattatcctcacgcgttatctgtcttctacaaatataaataatagtgtttaatatccaaaactgacaattaggtaaaaactacgtaacactaataacaactttttataaatatatatataagacataatattaactacattttaacaattgaactaatgaaacagattctagttatacaaatctatatttagatggttttttctaaagtttgagtcaaaggtcaaaaaggtaccaccccaacgtaatttcttgttaaatccaaaagtttaatgtaatttgtaataacaaggtatagttcaaaatctaatccaggtcgaatctaatttagatatagtaaaaattcaactgtacaattacaatgaatgatcagagtttatataaactttagattaaacattggtatacaattaaaaatacatcaaaaccatagaaacacacgtcagtttttgtttttaatgacttcaaatttaattcaaaacttaaaaacaagaaaatattaactttcacactaagtctatttctgtgcttgattcattgattttgacagtaattttatttctcattataaataattcttattttttgtcttttgtaaggtgattataaataatgttaaatctaagaatattaaacaaaaaggatgctgaaatgaggacttgcaatgatactaaaactttattttagttgcaagaaatgatgctagatgattatttatttgtgatggttcgaagaaaacttgataatacccaaaacaatgtgatgtgatggccaatcaaaacatgattttatttttaaaggcaaaatctgataataaaattatgtctaacgatgatcttgcgatggtcccattaaatttttattttaatttaagaggataaaaactaatgctaatgttgtccaacgctgatgttgtccaacgatagttagcgatagttccatcaaaatttgattttattcaacttttaaaattaacttttgatacgtaaaaccatcaaaatgcacccactattagcattttctttacttaataagctgaatatgattggaccatcaaaaataacatcgttttaacattatgtttctaaattcaagttcattaaatcatcgttgagcatcgtatttttgtttcttaatcattgttttgatagaatcatcgcaagaccatcgatggcctttttttttgtctaaaagtccatcgtcgcttgacaatcatagaaccatccaaatgcattttgcctcttgaatcattttttgacaattatagaactattggtgggctttggatgttgatttggaatccacatgtctattgtcagaaaccgccgcggataatatatatatttatatatataacacttcttaatgagaattactcattgatggttacgaagccatttaaatataaatactaattttaaaaatattaaactattagatttttatccaatgacgaatagtaaaagagaaatttaaatttttgtacttaatttagctacttaattaaaaaaaatgtcaaaaatcattactttttacactatattaaaaatgtatctatataaaaaatacttaagtcaaatttaacctcttatatatatttataatatatatatatatgtgtgtgttttgaatggtcgttcatgcttgatggaaagaaatgttttccattttaatttttttgattcatatttttgaggttattatattcattcaacattaacatcttttatgcatcaaaataattatttcatatatatatatacatattcttattagtattgtatacatatatacatgtatatacgactatctttttatctgtatatatttatatataatactcattcatataataattttattgcataatattaagtagaatattctactatctatatatttattatgtttttatgcaaagattatatacgtgtatatatatttatgcatgaattttgttcttcgtgttgggttttatgccctaaataaaactctttacaatctgattagttatc

SEQ ID NO: 295944 - DNA, 2039 bp, Cannabis indica
gtaaaataatttccaacagatgcgttaggcgggttgactatgttttgcgtgccatgatcgcccacttggggatcatagggctcgttattattgttattcctcgacgtttgagatcgtgccctcaaaatttcattgaggagatcacgaagatcacccctatgaacatgatatcttcctcctcgtcccgtctcgatagatcctgacctggtataagcacttgtggaagaagagtgagacttgatatcatttacctcaattcgcggctgagcctggctttgcaaattacgccgctcatgatcttcctcctgcggtatctcctctctaacgcaaccagcgttacgagcgactagttctctattttgcatagaattaagcgtaggctggttcaagtcgagaccctcctattcaatttcctgttccctgcgaacatgattattattaatacgttcagttcatcgcctagtagttgttacctggaggttttctgaacacgtgttaggaatcgaggtggacatcaagtcttgacccttccgataactttggcatgtaaagcccgcatttgctcttgcaaggttgtatactgagccgtagttaattgaataattccttcagacaccacggctggtgtgattggtgggaagtgtcctatggtggccgctggtgttgaagtttctccggcatgattggcggtttccagaaggttgaggggagtgacagtagttcatcccacacccccattgattgtgtcaacgggatttgctccattgcctgggaatggaagattcatcgttccaacgttgaaagaacttgtgttgttgtttccgttcgtctgatttctagtcatttcaattttcctctgaaatcaacaataaaaatctttcccacagatagcaccaaatgttgctagaggaattttaacaacaccaaataaaaatgaagatataattatttaatgaaaatacacgagtactcaacttagaatggcgagtattcaaatagcaggcacacagacaaaccggaaaaagtaataaatacagtgaacacaaaggaattatagtggttcagtcagatcgtccactgttgcaaggatttttttttgtccgtcctcattcatattatatcactcctttatatacaaagcaagtgtcatttggattacatagaacttaattgattatcaagtcgttttacaatgaatatattaccattaaattaagaaaaatataaatggagtaaatgaagaacactttcaaaccgatttactaaatacagcaacgtatgcgacctttatggtgcaagttgtctgttcatattctcgcacaagctcgcgggcctagcgtgaccgtaggactaatgagtctccatgttaagatatttgcgtcctattcaagtcgcatatatgaataccttgttagcgttcatatataactcaggacgtgtgagtccttatcgggtcatcgagcacgttaggtcattcggactagttcgctaagtaaagaattgatttatactaattcgcaggggaagcctttattgacaccgcatatatcttggtatatacgagtcttgaacacgaccttcttggtcttgcatcatgcaaaacgtaataatgtaacttaattctatcaaggtcacatcatctcaacaatttgggtcaagcgaggtttatccttgagtggtctccttctgacagctcaacaatcctcaaggaaagtgagttcacgtgtcatctttacaggagtttgggctcgagtttctagatagaatttttacactgtaacactttgtaaccactcattattaaacgtttgcttacttaacatgaaaccaataaatataactaaacgcatacatgaaacaattagattagatattcttaataatctaaaggtcgttacataagcattatgaaatcaaatatcaatttctatagagtaatgataaactaaaataatgttgaaaaaaatctaaaaaatagaaaattacaatcctagatttataaaaacatcacatcatcttgcttaacaatagaataaaaa

SEQ ID NO: 295945 - DNA, 2140 bp, Cannabis indica
tcttccaacatcctttgagttattcaaatgtttttcagattcagccgtacaattttcaattggttccatctattatgagctaagtcgaaaaaataaatacctgacatttatgaatgagtgtcctgatgtcagtctgccactttccccttggcccgaaagcaatgtatttgttaactaatttatgattttggtaatactaaatttctgtatcttccacaatgtaggtacaaaaagcttctatctagtgttgacttgaccaaagattttttctatagctacacatatcccataatgcaaagtttacaaaagaatgtgttgtcatctggcgaggatggaatgccttatgataatatgtttgtatggaattcttatctgacacaatctattcggtcaagatgcaataattccatttggacaatagcattagttcatgggcattttgagcaggtacgctactctacttttctttactttttgggtttaaagtacatttgatgccttagaaccaatgctgttatgctgttgacattttctaaattacaataatataatctgaatatgatatttgtcctcatcatcaataacagatcaggctatcagtctttggtagggacttcagtgtttctttggtggctagacgctctcggcattttgcagggacacggtgtgttcttctattgtgtaaaatattagatgttttcataggtgcaaagaaagcttttttctcataggttgttgatcttccatctttatatatatgtcatataggttctaagattaatttagtcaatatgttgatctcttaaaaaatatgttgtctttcaactacttttgagggaatcaatcgtatcatgtttgttaggaggcctcgtggccctcatggccatgggaagtgtcaccacaccccccctggtcatggagagaaagttggccccccattcgttatggtcattcaaactcaatggctcttccatttgtcagggactccaatgttattggagttttagaacaaagcacaaggtgtttatgctctaacaaaaggtggcagttcaattaaaatttgtgagagaacaagattgtttggttacgagatagctataactatagatgctgctgtatgggtgtataaaaccatgagagaattgcagaagaaaatggagcagcagaggcataacttcaagaaatctttccgaaacaatcagctgtttttttggaaaccttccaaaatgccaggggagtttttctcaaagtttcagtgctaaagtgaaataagatgaagatggttgtcatcctagaggaaagacatgcaatgggatggaaggactttgtatacttgaggatagacatgcaaagggatggaatgactttgtatactgcttgaacggactagtagggaagaagaaagggaggactcatgacaacaagttgggtcaaaaagaagagatggaaggaagaagagagaacaattatcaatcatgggccaacgtggtgaagcaatagatgaagccacgagtaaataagttggaaggaggaaacaaagaaacaagacaaattagaggaagtggaagggagaaaagaattccagatagccatgggattaaaagcgatgctaagttaggaagataagacttcttgccggaaattaatgtctattcgattagtagactgaagcaaccaaatttttatgagtacctgcgagcaaaactgaattcgaaagattggagaatggctgtgattatgatgagggactgtagaaaatagtgattcgaattgtgtgtatatttcatagaatagtacatatttatatacaaagctaggagactaggaaataggaaactaccaacaaaataggaaactactaaatacaagttaccctaattcttttacacctaatatacagctaatactctaacactccccctcaagctggagcatagatgttaatcatgcccagcttgttacaaagatagtctatccgcaccccattcaaagcttttgtaaaaatatctcctagttgttctccggttttcacatatcctgtggagatcagaccttgttgaattttctcacgaacaaaatgacaatcgatctcaatgtgcttagttcgctcgtggaatacgggattcgaggcaatatgaag

SEQ ID NO: 295946 - DNA, 1863 bp, Cannabis indica
aaggtaaaaataaaagaggacaatacaaaaaggatattgactgtaatttcctcttttattatcttcttcagataacatgtgaatactattcatttttcttttaatattttgaaaatatgataataatagtggaataccacatatattttacatttattgatttatgaatgtattaaagaaagtgcaatacaataacaaaaatcaactatacatacaaagtgtagtcattcttttcaactaattatgatgaaacatgcctcatgcatgtttgtttgtttgggtttgttagtgtggaaactagcttgcatcacaaaaagacatgctgaaacggtccccataaccaatcctcattgggatgagagaagcggataacaataataactatatcctctcataccctttacgtaaccatatcttttgcatatttataatatataaaaaatgacaatataatcttctaaaaataataataataataatataataataatactatgcaagagagctatatatatatacactatctaagtaagtattatccccaagaaatagggagaatatacattagctttaacatggcatcaaatgcactcactagaggatcacataccatcaactccatggttctcaacctcaagtaagtattattaatttacttattaattatattatgtattagctagaaaatttgatatctaaaataatcatttttattttaatatcatgttatgtgacgtacttattattaggccgtttggaagaaaaacaagttatcacaagaactcgattcgagagacgatgaagatggagaaggaagaagtaagtaatgtgaggcatattaatggaggtcatgatcatgatcattgtgatgaagtgagcaaaaatgatgggaatgaatggattcctgatgtgcgtactgggatttattaccctaaaggacatgagaaagttatggaagatgttcctcccaaggctgggaaagatatcaattggatgtcatatagtgacaacattcattaagtttaatatatttaaatatattatatttatatatatacttaattgttattaagagaattatctgataacaactcttgcagataaatcaaaatattggacaaattaattcctattagtgctaaattctgcttttgaaaaaagaaaaagaagagttgattgtaaggttgtgttcacagttaaaaaaaatgatgaatatgaagatcctcatctatattttatcacttttctaataacacgttttgaaatccgcatgaaacaagttggtttgaattctacttaaatgtgtttggatcattttcggtggatatggtgaacccgtttgttaaatggatcatttttaagttgacagagatttaacctaaggaagaaaaaaaacccttttaaaggcggtttttaagccctttcagcgtcggttttggcaaaattcgctaccgacgctaattaaggcgacgctaaagggtttttaaaaatcgatgccatttatactcctatggcgtcggttattagctaggaactgacgccataggggtatatatggcgtcagttcctagctaataaccgacgtcataggtggcgtagcaccgacgccaaaaacgagcatttttcagttcttttaattttatataatttattttaattaaatatttattaatttatatattattttatttaatttaaattacatatttattttttaaaaggtaaattaaatattatttatattaattttaaaattgactaaaatacataatttcacttcataaaagtaattaaatattacacaaatattaatgtaaaattagtccaaaatattaataagttaataaatataactacaagtta

SEQ ID NO: 295947 - DNA, 6602 bp, Cannabis indica
aaggttttggttcaaattcatacacaatactctcctatttcactagtcttggttcaggccttgctagggaacaacctcatgattttgaaaattttgatcatttccaggtttatgatcaagtctttgaactagccaatgcttcttcaagtcagtcacttgttgcttcaacctcttcccaatcatctcagtagcctattcctgctacaatacctattcctatcactcaccctatggtgactcgagcaaaagttggaatatttacatactgccaagtcaaataaaagtcgacgcattgaacactgcagaactagatagtgttgaagctgctctttaacatcctggttggaacaaatccatggacactgaaagaaacaaaacttgggatttgcttccaccctctcctctgtaaaatttgattggtaataagtgggtatctagagaaaagctcaatgcagatggaacatttcagaggtttaagacttgtctagtggccaaaggcttccattagagacccagtattgactatggtgagacttttagtccagtaatcaaagctgccacagttcaaagtgtgctaaaaattacaatttttaaaggttgagaacttagacaattagatataaataatgttttcctaaatggtgtgcttgaggaagatgtgttcgtggtttaatcacaagggtttaaagagaaaggaaaagaagattttttgcgttaactcaacaagtccttatatagcataaaacaagcacatagaacttggtttgaaaggatgaagagcacactacagaggtgagaattcaagaattctatgtttgacacctcgcttattttctacaaatttagaaaagtaactgtcttggtcctaatctatgttgatgatataattgtcacaagaaatgatctaaacaaaatgcaagggtttattatagaagtgaatagacagtttgcattaaaatatttggggcccttacactacttccttggcaatgaggtgtttagagatgagtatggttcttacctaactcaactaaacacattaaggatattatgaagaaagtgaatatgggaaacatgaaattttatccaacaccattgactttaggaaaacctatgtcaatcaaagatggagagcttatgcaaaatccaaccctctaaaggtaattattggtgcattttagtatctatgtcacactaggccaaatatagcctatgatatgaacaaacttagccaattcctacagttacctactacagtacactagagtggagtaaaaagggtcttgagatatttacagggaacaaagcaattaggtttgcatattagctgtagtagtaggttaactatcaacgacttctctaatgcgaattgggcctgttggccagatgacaagtgctctattaaaggtcattgtaattatttttgggatacacttgtgtcttagtcatccaagaaacaaccagttgtctcaagatcaagtatagaattcgaatatagagccttggctcatgtggctgaaaaaaattctatggattgaatccatactcaaagaaattgatttcccactctcagttgtcttagttacctggtgtgataacatgagcgcaagtgcactgtcttaaaatcttatctttcatatcagaaccaaacacattgagattgacatacattatgtgcgagacaaagtgttggagaagaaattggcagttagatacattccctcacatgaccaagtagctgactatttgacaaagggattgtcacactcacgatttacttttctaatggacaagcttggtgtgataatctcacccttttgtttgagggaagatgttaaggaaaagaaaatttactaacaaatcctttgaaggtacacacaccagtatttccctgtaccaggattgtactagttcgagtgattgaagatatttagtgttgatgtgtacattctattataaaatgagtatgtaatcattagggaatctttattatcagaatattctcttgggatttgtgggggacagctgtaagagtcgttaggccactaattgtgtaatgatgaaatcctcagcctataaatgaattactatggctctttattgaaatgagccgagttttatcaaaattattttttttttctaaattttatttctttatggttgttttaggtttaaaatagcgtgatattcttcctacaacactcgagaagcttggaaattgcttgaatcttgttttgactaacttctaatttttattgtttttttttgtttggccaaaaaatatatgtataagtatttattttttgagttttattagtaaaataaactttttagattgtttttttttttaaaaaaaaaaccttatttttgtttttaattctcggccaaaagttaaaaaataattgtaagaaattagaaaaatatttaaagtgaatgaagatcaatttttaaaagcatcatattgtttttcttcactctatttcttattttttctatgttattaattcatttatgttaatgaatattttgattatgactatgaaactagattatttttctaggatattctggattcacttgaacttacactatttgtttattgcaagttgttatgattttttttgctcttcattatgatttattcaatttttatttgatatttgtggatgtttgaacaccaatctacatgaattgatagttttaatttaagatatgagatatgtgagagttaattatagtacctttatagttagtgtagaaataaagatttttattcttaatgcctttgttagaacttatcacaaaaatataaaaaaaaactcatatatgggttgagatatatatacatatatatatatatatttatttgtacgaatataaattattttcataaatccgctaactacaatgtaggaaaaagaataataaaatttgtatcaatgatataatagagcggattaattttttttttttttgataaatcagatgattttattgtttcataactatcccttataacctatacattaccatttataaatggccacagtatgttctacttacaacttcacaaagctcacaaaacttcaaaccaattcctgcccacctttttaatctttttaattctaacatttgtaattctacttttgacattgtatttcactatctattacaaaatgaatggaaaaacagagagaaagagaattggagaggaagagtgtttttctcattagtctgaaaatgacgggatacaattatttatatcatctgaactgatatgatgaagtaacagaaattagtttcaaaaaactgtacaaacaaacacatttaactaactaactaactaactaacatagcacaggatcttaactaactcatctcttcttattttgatacttcccctcaaaatggaacatgaatgtctaggagtcccatcttatctttaagtagtttgaactgtgcaggaaataaaggctttgttagtatgtctgcaatctgatctttgctagaaacatgtaaagttctgatgattccttcttgtatcttctcacgcacaatgtgacaatttatttcgatgtattttcccctctcgtgctacacaaggtttgctgcaatatgttgtacatctttattgtcacgatgtagagttgttggccctttatgatcaacctgtagctcttttagtatagaaaaaagccacactatttcacaggtagtaatagccctagcacggtactctacttcagcagattaccttgatatggtatgttgtttcttgcttttctaagacactatagaagtcccaaggaaaatgtaaaaaccagtatcagaccttctagtatcggggcatgctgccaatcagaatctgcataaggttcaagtttaacataataccctgtataagagtagctttcacatactgtaataacctttgagctgctgtcatatgaataactttgggaacagctagaaattgactaagcttgttaatagaaaaagatataataagtctagttatggttaggtattgaagcttaccaaccattttcctgtatagtgtagggtaagcaagtccttctttgctgtcttgggataatttgaggttagcatccatgggagtacttactggtttactccctaggtagccaagatcctcaaagagttgaagagcataccctctttgtgatacaaaaatcttttagcttgaacttgttgtttagtctactcttcaaggcttctagttcttgtgtatgattgcttaccaaaatgacatcatcaacatacacacgaagtagaatgaaaccctcaccaaaatgcttgattaataaagaatgatcagtggcagaatggtgaaatccttcatgctctaagattgtagaaaacttctcaaaccattgtcgagaagcttgtttcaaatcatataatgacttgtttaatttgcatattgcattgggtggtaactcccttttaggactatacccttgaggtatagtcatatacacatcctcatgtaaattaccatgcaaaaatgcattattaacatcaagttggtgtagaatccacccttttacaccagcaagagcaagaactagtttcaaagtaaccaacttggtgattggggcaaaagtttcagagtaatccacccctcttattgattgtaccatttgcaactagccttgctttaaacctctcaactgacccatcaacattaaattttatcttgtaaacctatttgcatccattcacatgatgatgcaaaggaaggctcataatggtccaagtattgttggcttctagagcctcaatttcattgtccatggaataatcccacacaggaatgccatgagcctagaaatttttttttggttcttgcaaagtagaaatgaccagtataagagcacgaaactttagagataacttggagtagtcaatgacagctgatagtggatgctctgtgacaaaattatgatcctgaggaaaaacaccagaagtgaatttagttaaaaaatagtgataatcagtaaaataagaaggcttatgatgagttctagtaggtttagtccttgaagaagaattagaaacaatatggtctagagttgaatgtttagaaataggattagaagtactggtagattcaacatcaagagatacaacagtaggtataaactcaaaaaaatggtgatgaaaatcagggaaggtagcaaattgcagaaaggaataagatattcatgaaaaattgcatccctgctgtagaaaacacgattagtattgagatccataaatttatatgctttcataccagtgggataaccaagaaaaagaaaggtgcagcccttggagaaaattttgttcttgatgagctaagtgtagaaacaaatgctaaacaaccaaaagccttcaagtgttcatagttgggaggcttaccatgtaatatctcataaggggttttgtgttgaagaatgggtgagggagtcctatttatgagataagtggcagcggccacacagtcattccaattacacaaaggaatataagactgaaaaagtaaagccctagccacattaagtaagtgttggtattttctttcagcagcataatattttattgtggtctttgaacacaagaatagtaatgcataataccaagttctttgaaaaaaatgggaaactgaagctcttttgcattgtcggatcgaattcctttaacagtcatgttaaactgagttttaatcatttgcaaaaaatgaggtataacagactgtgtatcagatttttgtttaatgaattcgacccaagtaaaccttgagcaatcatccacaatggtgatgaagtatttgtagccttcagtggtcatggtaatgtatggcccccatatgtcaatatgcaataaatcaaagcaattgacaacaacattgtggttggatataaaagataattttctttgtttagcatagtgacacacataacaataaaaattaggagtaggatagtgtcaaaattgtaagcttttattaagaggatgttgtttaatacatgaaggatggcctaaacaataatgccatacagtattatcaataattttagaatcactaataacaaaaaacatatcaggaggaatggaattatgagataaatttagatagtacaaatctccgtttcgatcacccatcccaatcgttcgagttctcatattgtcctgtattgtacaatgcttaagagaaaaattgaaatggcaatcaatagattttattagtgcaaaaacagataataaaatgtacttaaattcaagagcatgaagaacatttttaagaacaatatcaaaagaaagttgaattgttccaacacaagtaacagtgacatgagcatcattaggcaaatttatagtggaataagatgtacttttttgaatatttgtgagcaaagataggtcagggcacacatgatgtgtagcacctgtattaattatccatctgttatgcaaaataggaaagttcttactagaaaactgagataccatgggctgaacatgattagaaggagttttgggggttcttgactcttttgagacaaaagattcatcaattgttgatactgatttgtgat

SEQ ID NO: 295948 - DNA, 3371 bp, Cannabis indica
atctttttttttttggggatttgggtgggattcaattagctgaacttgagacattttacttgcttttgggaacatagctatatttgttttgcgatcctctttgaattccatgctgtgaattgtgattttgtgttcaacctaatttgttattgttggtattgaattaattgatttatttatctaacaaagcttgattatacgagaagaccttaaatgaaataggaaaagtatgattgtgccttctattttcattaagtgatgtaagttgtagttggctaatggctttaaatgattgtttattatggttaaacataaatttgaagaagaccggtggagcattacgctttagtaggatgcttatatttattgatttattatgatcatatttacatttggtaatatcgactattccctttgtggacataaatgtctttcatcccaatttgttatttgatatacaaagtctaattaagacactatgtcacgggcatctatgaattgcaacactttttgaaggcttttgtcagtcatttgcactacaattcattatttttgagtataatgaaaattggacttattttgacttttttttttttttacggtgggatagcaggacttatttatcggctatgtgtatattgttgacgtgattagtaatgcctaacctaatattagcaatttaacgctggaaataggatgcagattcagaatgttacacttgcatggttctatggaatagagtacatgtgaaagagaaaaaaacatttactaaatgttatcgttgtcgcctaagtgatgattttacaacactaatattgttaatttgttgttgaatgtttatccatatgcttagcaacgtactctttcgtttaggttcaacaatgaaataagtaacaactgactgtcatctcttctggttcttagtttactgtgatggggcaattggtatggagatcaaaatgtgaaactcaacccatgtatgataaactaaattttgaatgaccaaggaatttatgtttcaagtgggtcattgtttaattgatgataatgctaactacccaacactgagtttcatattaatctaagcactctttaactctattccctccaagtctaactacattaatgacatgttagcatataaattcctggggctgtagctgctttcctcgtatacagttggagagttgcagttaagctagatgttactaattatgaaactaatatattttgttccttacatttcatcggaaatccggtgaatcatgtgtgatacattcatttgtaaaattaggaagaataccttcaattttgtgcttatctataactgaaatttttctttgctttgcttcagtaatcttttttggctaagaaagagttatgaagttgaatatcttccatgtattgcttttcaggtgatatacatggtcaatattcagatcttttgaggctttttgagtatggtggattacctcctaaatccaactatttattcttgggggattatgtcgatcgaggaaaacagagtctagaaacaatatgtctactccttgcttataaaataaagtaccctgagaattttttcctcttgagaggaaatcatgaatgtgcttcaataaatcgtatttatggattttatgatgagtgtaagagaagattcaatataaggatctggaaaacatttacagattgttttaactgcttacccgtggcagccttaattgatgagaagatcctctgtatgcatggtggtctttctccagaccttactaatttggatcaaataagaaatctgaaccgaccaactgatgtgccagatacaggattgctatgtgatcttttatggtctgatccaagtaaagatgttcaaggttggggaatgaatgacaggggagtttcatatacttttggtgctgataaagtcagtgaatttcttcagaagcatgatttggatctcatttgtcgtgctcaccaggtaaatatcctttggtaatttcattttgcaattacccatatgttgtaaaacagactttcttttgagagtgattttacacagtactttattttttgtaataaatctttgcacaatgacattatataaggttttgttatcaccaaatactctttagtttatgttttttgccatgtgataatgctctgtactcgtaaatctattttgcaggttgtggaggatggctatgaattctttgccaaccgacaacttgtaactatattttcagcaccaaattactgtggagaattcgataatgctggggcaatgatgagtgtagatgattcattgatgtgctctttccaaatattaaagccttcagataaaaaattaaagttaaactttggctgcacaaccacaaccaaacccggaaacccttcaacagcagtaaatgtttttgggagcacaactacagctaaacctggaagcagtccagcaggagtcaaggtaaatacactaaacttccactgattcagacttgagagggtcaaacccaaaagcgcattatgtattcaacctaaatttgagattagattctctgttcttcaacataagaagagtctaatttgtttaaaagtaccccaaatccaagagagatagctcaaatgatcagccatgctgtttgctcccacacgatttgaagttcgagtctctcctaggtacctacatagcaattgcttcagtttcttagtccctccaatattgatttggagctcgagtctcacctgggtacctacataacaattgctttagttttatatttagctcgggtgaggaaaatattcttcatagatgatccctcaaaaagaaaaaggtctataaagcagggtagaaaatatttgagtctaatgattagacttttaatttgagttacatttttcttttggcttgcagtccttccttggtgccaaagtatgagatttcgggttcttcgcaagcatagggagaggttttaccattagcccattttggctagtgaaatgaaatggtcaaggttcatgacaagagtttttaattttacttgtaacatgttaaaattataatttgtaaaattggaaaggtaaaatgtctttagaaacaaatgcaaagcttgtcttcccctaataaaaaaattgggctttaagatagaaaaggctctgtaatcttcttctatttttatcttccttctctgtacactactactactactatactagctgcttgctatctttgttgttgcaatggatttattgcatattactttgctttgggaccattaaaaacaaaaacaaaatgtcttgaaccttacttgtctgtacacttgttctcttcttagttggaaaaaaaaaaaaacaagtctcagtatatcttattaggatta

SEQ ID NO: 295949 - DNA, 2566 bp, Cannabis indica
ttaaaaaataaaaatggttacaaaacacatttttgttttctgtttttaaaaaacagaaaacaaaagtgattgcagaacacacttttattttctgtttttaaaatttgaaaacaaaagtggttgtagaacgcatttttgtttttcaaaaacaaaattttaaaaacaaaaaaatctacttttatttttctgtttttaaaattaaaaaacaaaagtgttaccaaacgcaaccttaattttgtacatgttaaagttagccgcaaaaatcctaattactttttttttttttttcactaaaccaactcgaccttaccaattttagcaacatgaaaaaaaggagagattattactccttaggcaattcccttatttaaacatatatatatgaactttaagctaagcttagctaacccttctcactctctctgccatggatcatcatcatcaacactgctctgaatcccctcaaaccctatccccaccgccaccttcatccacagatgacaccaccaccaccatcactactcccacctgctgcaaatgcggcgccaccgccgctttcaatgctccaccgccatggtctgaaatctctcccccaaactaccgtcctattcgagctccggcgataaacctccctccaaaccaatctcaacaagctataatcctcaccccagttccccaagcccaacgggtccccattgaaacgccgccgtttcaattccaaaccccttcgaagcgaatccaatcccctgaagacatccgtagattccatgaatccttctctggtaagaacttccttggtttcatcgtcgctctctctgaatctgtacgcggccgcaagatttctgatcctgttcaccatcaatccccaatcactgactccatcgtctctattcttgaaaccctaatccagtgggttgatgaaattcctcctactcagatgaaatcgcggtacgggaacgtttcgtacagggtttggcaggagcgattggtggaaaacagcgaaaacctaatgcttcgattcctccccgatgatctccgatcttcaacggtggagatcgttccttacttcactgatagttttgggaattctagccgtatcgactatggtactggtcacgagaccaattttgcggcgtggttgtattgcttagcgagattaggattgatcaaggaagaggattatgattcagtagtgatcagaatcttcgtaaagtacatggctttgatgaggaaattgcagacagtttattgtttggagcctgctggttctcatggggtttggggtttagacgattatcatttccttccttacatttttgggtcgtctcaattgattaaccacaagtacatgaaacccaaatcgattcataatgaggatatattggaaaatttctcccatgagtacctttatctttcttgcattgctttcgtgaagaaggtgaaaaagggtcccttttcagagcattctccattgttggatgatatcagtggagtccctaactggaacaaggtcaacagtggtttgcttaagatgtataaagttgaggttttggagaaagttcccattatgcagcatttcatctttggttccctcattaaatggtaacttatcacttctgctctgttctgttctgtttacagattttgttttccctaatttgtttttgagtttttggttgtttgagatgaaggaacatgtcttacaatacagtttttgcttattattagtttgttgctaattaataagcttatctttagttttattgtatgtgtgttgttgctcttatcatatcatcctttcatgtagtgtagagtataggttaggtcagatttactaatgagaagtggcctttaatggaatgaaacatggtgtgtcccctttcagtttttccctccatttgttttaccctatctaagacatgatttggagaatttcacccactattaaataggtgcggcaatacgggttttgacatgaatacaccacatgaaaaaaaaaaaaaaagagttaaatacgacacaacccgcttaccaagaattcaacataaaagttattcataataatataactacgtacaaatatttgttttagtaattctatgttgagttaaaaaaattctaaattaccaattaaatagttaggttccttcaaaaaaaaaaagttaagttccttgatagaagtcgattacaaacataatctcaactcaaccattgcattcattgacaatgaatagggacctacttgcatactaagtacccaatcacacattctatatatctcaaattctcattcacattctctatcttatatactaatttaacccattttttatttgtcagctgtttatgtctgtggattgtgattcattttttttttctttcttcatggttaaagtcgccatactgcaacaattttttttactgttccaatatttttatattaattattctaacattggattgggattgagatatcctttatacaaattcttctcgggacttttgttttcattaccaaattcatcgatgttgcttaccaaacaactcgattgaagtttcccaattg

SEQ ID NO: 295950 - DNA, 3927 bp, Cannabis indica
acatagttctcaagagcccaaagggacaccttcccattgagcgcactgattacttgtctcgagtcactctcgatgattacaaacttataccctaactcaatagctagcgaaacagccaaacaatatgccgctgcttctccacaaaacacatccgagaagtccaaacgagaagtatcaacccgaaccaccttacccaaatgattcctcgctacaactgcaatgcacatagtctcgaggcccactcttacatcacaattcagtttgatccaatcctgaggaggaggattccaagtctcccttgtgatcgggttaggaggaggcaataaggaattatgaaactctacaaacgaaataaaaatattatcaatacattttaccacatctggagggttattattgtgaaccacttcattgcgcattctccagatagtgtcaacaacaatcgaatcaaagagaaaaacatcctccgcacagatccccctatgcctaagatcccaaataaatttgacccagtcccatatatgaattccagtgtcacaaacagggtagataccccaaggagaagctcgccaaatgtgttgagccacctcacaggaaagaaataagtgctcaattgtttcctcccctaaaccacataaagggcatattaagctctcaatctaaaaccgtctaccaattactgatctcacagggagcgcattacagaggatgcacaaccaaagaactttgtgacgctccaagattttactattctaaagtttattccagagtgtcggagcaacagaacaatgaggcaccctttctaaggcctgggtcaggtaagccgatttacacgagaattgcccattgttttccaaggtccaaatccacttatcttccccgtgccccgagggcttaccaccttttaaaattgcagaaacagtctcttgatcaaaaagactgtttagcttttggccatcccaatccccacttgtcagcaggagatcagcgacacaccgattatcaggtaagacattaccttttggttttgggatgaaacctttacaatgaggtatccaaggatccctccatatactagtttctctaccatttgccactaatttacaagccccttttctcaaaattgcattggctttcacaacatttttccaaaaccaggagtcagaatctttgtacttgcaaccgagaaaatccttcccttttaaatactttgcttccaagatcttggagcataacgattgacacccatttagaattttccacccccactttgccagaaaagcgagttcatttcctttgttttccgaaatcctaaaccaccgagagacttaggaaggcaaagtttatcccatgctttaagatgaagaccatgatttcctttctcgaatccccaccaaaaatcccgaaccagaccatcaattctattaacaaggcgattagagagtttagtggtttgcatagcatataaaggtagagacaaacccaccgattttataagggtagctcgacccgccttggacaaggtctttgccttccagccttgcaatttagaagtgagatggtcaaggatgaaattaaagtccgcatccttttgtctagatctaaagaggggcagacctagatattttataacaccatcaggagtatcaatacccaacatatccttaatgccatttctcattccattaggggtatttttgctgaagaaaatagaagttttgagtttgttcacttgttgtccagactaggcacaaaacctctcaaggaaattccagtaattacgcacttcgttcaaattggcacgacccacaaggatgaggtcatcaacaaagaagatatgggacaggaccggaccttccctactcaatcgaacactatgaatgctcccttgactaagggcctcttccaaaagtcttgataacacttccgcagcgcaaatgaagaggtatggagataggggatcaccctgacgaaggccgcaagatggagaaattttgcccattgggcctccgttaaggcaaatgttgagcgtggtggtggagacacactgagtaacccaacttcggaacttgtgggggaacccaaaactatcaagaacacaatcaatgaatttccaactcagtttgtcataggctttaacaagatctattttaattgcaaagtatccctctttccctttcttccggttgaaagagtggattatttcctgcactatgacattgttgtcctgaatatttcttcccggaacaaacgcagcttgtgttgggaaaataattgaagggagtataggtttaattctatttgcaactattttagaaatcaccttataaatcacattgcacagggagataagcctaaagtgattaggacgtttcgggttatggttcttagggatgagcaccacattcgtcgaatttatacccttatgcatgtaccctttttcaaagaaatccgaaacaacatcacaaaagtcatctccaacagactcccaataatgcttaaaaaagagtactgacattccgtccggcccaggagctttatggttgctcatggaaaacagagtgttttttatttcatcctgggcaggacagagaatggccccctcctggtgctccatggaggtcctctcatggaacaggtgtctacactcgatagcccgacctatatcggagtaacccaaatgttatctttactcaaaacgctttcaatggcatttcttcttccccttatagcagccgagaggaataaaaatttagagcatttatcgccatccttaagccaagagattcttgcccgttgcttccaataactcgcctttctagccatagtttcattcagagaacgatgaacttcacattccttgctccaatctcgggcgccagcgggtaacctttgtaatctaccaagcctttgctctagatcttttatagtccagtcaagcttcccatactgggttcgatgccactgaattagagccactctggtcgcaccaatctttttaaagacgcgagctggggcccaagtatgattaatcgactcccaagcgttggcaaccaccaatttgcttctctcatccctagtccaaccctctacaaacttgaaaaatctcttgaatttggcttcatggcccccagtgataagacataacggcctatgatcagagttacaagtctgggaagagcagagaaaagctctagggaacaagtgaatccaatgtccattaactaaagctttatcaagagcagacttaacatgaccctgtccagaacgatgattatcccaagtcatcttgtcaccttggatgtgcatattaataaggcctctagagtcaacaaggttagatatgaaaggtataaaagggtccctccctgatgatccttctcgctcagtattactaagaacaaagtttgtatcaccaaaaatcaaccaaggaccaccaaacctatcccctaatgccatgagttcgtcccaatatttcctcttagcatgcaagtaaggaggtccatacacacacgagagaagccacggatgggtaggtgggtccgaataaaccagtccagtgatatggtttcgggagcattcaatacactcaaagctaaaaccaactttccaggccaaaataatacccccagcagttccaataggcggcacattaacattaaaataaatgtggagagattttaaatatgtaccagtggtgaggcatccacttttagttcagtcagaaaaacaaaatccggagaacgcactctgatcagggactttagctcccgaactgtagaggtctgccctaaccctctaaagttccaggctatgcctctcatggctcttgtggaggagatatgacattctcctccaccggggtatgagagtgaacagacaagctgtaaagcccgcttagttaatttggaaattagcagttgttta

SEQ ID NO: 295951 - DNA, 5222 bp, Cannabis indica
gaggttctactgtattaataaagtttttttttttctattattatcctaaaaaaaattaaaatagtgggaagagggcctatttgccgagtcaaagaaaagagacaaactaattgacattataaaattaataaatgtatttgacacatgtcataatttaattggggcagaaagacagacgctaactaacgtaagccgaagggtgtagatactcttaacgtgcgcataaacttgcagaagaaaaatgtaaagaggtagtgaaaaccaaaacaaaaaagagagagggaatattagatatagaaagaaagagagagaagcgagttggagttactgagtcgcgtcaaccgagttgaacactgaagaaaaacaaagattatctaaaacccaaaaaaagaaaaaaataaaaaaattaaaaaaattaagaaaaaaaagaaaaaaaagaaaaaaaccacaggaggggtgtggtgtgtgggtgtggggaggacttgggctttggtgcgtgggagtggaattaaccaaaagatggtgaacgagaaggagaagattattagtattagcccttctcttctttaccaccttcaccctctttcttcatctcttcctcaccttacccaaacttctctaaccctagaagaagaatcgtctgctcattcttctcttataacccactgttccaccattgaaaccaaaccttactccttttcctttccttcctttctttgttctctcctgcgattctttctctttctcttgttttgcttttctgggttttggccctttttccatattgtccgaagaaggttcacgatttccctttgcgcctccggcggtgacgcctggtgctcggattctcttcgacccagaaggtattttgtttgattttgatttaatggggatcttcttgtgtcggcgtcttgaattgtttctgggtttgctttcgtttatggttggtgtcattgtgttgtgtttatgttttggttgattttggatgaatttttgtttttcctttagggtttgatttttgtagtctaggtgtttttgtttttgtttgggtttgctcttatttatttatttttgtgttttttgctgtgcaattgatttattaagtaaaaattttgttcctttagtgaatgtaggatcgatgtcgaaccaattgctctcttaattttgggaaaagtggttctttcttggttagatgatgcattcttacacgatttaattcaatacctctcttttgctgctcggttccttttatggcgttaagaattttaatctgtctcgatttttatattgtagttttgcgttggctttgttaactacgattttatccagcttgaaggcatgattggaactagcatgatttgtccttgttaggaaagcaatgatttgcattagtctcttttaatctcatgaaaaaattcacaatctgtttcaactcttaaatgggtacacttgtttgtgattccctagttttttaacgtatactttgatcttgcttgaatacttgatttatggagggtcttttctttttatgtaatgtgcagagaagtagtattgttacaagaaccaagtatatagaattgtattcttctgatggaagagtttggtgttgcttctcggtttgagggtatcaatgttgctgtgaggaagaagaggagccaagcttgtcgccgccctcggcctgattcacagcctaatgcggaaattaatgatgattcacccatgtcttcaacaccaccttttgatgatgcaaataaggcatctagcgatgaaattgttggttgtgattcgaattcaaatgggaaagaatttagtcttaatcattatggttctacagtttctcattctaatggtgatgaagatgataacctccataaaatggatataaatgatggtgggtttaattcatattacagtaatgagcccggacgaaatgggtttaataacaagcgttcaagtgaaggtgtccttgcaccagcaaattggaaaagctcaaatgcaattaaagatggcgttgaatcagaattaagaaattgtgatgtaagtagtggttggaatggtgaaagctccacttctaagcagtcaggagatggatttggaaatgataataaggttaaaatggttaagctaaaggttaatggtgtgacacgtacaattcaagccaactctgcctctaatggtgtttcaggggttgttgaatcctctttaaagagttctcggcatgcagatgcatctaaactgcggcataagcaggtattaaagggttttcttatttgcttgagtgtagagtattggttgcatttgtaaagaattttcctttttatagaaagaaatcattttttgaattttatcaatgaaatcattgctgcaaaaaagagtattggttgctttctttgtaaaaaactttcctttcgatagaaagaaatcgtcttattaagtataaatgggttacaaaatcccatttttgtttcatcattgaacaattcctcatagatggacatggatccatacttaccatatacaaaatggcgattttgttagtatagctaacaatttcactatttggtaactgaaatctcaaattttatgtttttttgttttatcattgaataattccttgtatagggattcgtacttgccttataaaaatgacgcgtttattagattagctaacaatttaactatttggtaaccgaaatctcaaattttatgttttaagtaataatacctgtcgtaataatatttgcacaaattttcttgttaaaagccttttgtaaactctcagagtccagggtgatctttttttattatttatttatttttgcaggcaaataacggtgacatttcctgtacggataaaaagagtggcttgcaaggaataccttggaactcaagagctggttttacttttagtcttggtagggaggattctatgatgggaaaggtttctcgtaagaacacctctggaaaggaagaggagaagtcagtgcgcaagagcaagcgggttcctaaaaggcgactacttgatgaggagtttggtgatgatgtggatgatgaaattaggtacctggagaaacttaagacgtcgaagatagctgtagtttacaaagaagacgatgaggaattcagtaggaaacatagaaaactttccatggtttcaaatattgaaaatgttggtgcatcaaggccaggtggtaaagatgggaagaagaagtctagaatagatggagtaactggggacactgattacgaggatgaagcagattcagcttctgatggtgaaggtgatggtagtaagaagaggaagaagccaaggaaggaatccgtagattcattgttggacggcaggagggaaatgaccttgacaacgcgtcaacgagccctgcagtccagcaaagattcatcagcaacacctggtgctagctttatcgagtttccaaatggtttaccacctgctccatcaagaagtaagtttttaattacatgatttgaactgtgacctataattcttttgtaggatttgtcagctataaatttcaatatgttgattgcttttggtggctttagagcaaaaagagaagcttacagaggtggagcagcagctgaagaaagccgaggctgctcagagacggaagatgcaagtagagaaagctgctcgagaatctgaggttcgcatatctcattcatatttattttgacttgctttgtagatgtcaagtggctatggcattctgcttatttcaatcgaatctttcaggctgtagcaatcaagaaaatccttggacaagattctagcaggaaaaagaaggaagataaaataaagaagcgtcgggaggaattggcacaggtactgaaaccctttctgtagctcttgtgggttaacaaaactagcattagttaatacttatattattgttctaattctaacgcatagtatactgtctctctctgacaggagaagaatgctaatgctttgttgaatgcatcacacaccatcagatgggtgatgagtcctactgggactgtggtaaccttttcgaaggacatgggactccctagtattttcgaccccaagccttgcgggtaaaatatcacctatcttgtaaactcaagttcttttctctattatttatatatctagtttggctgtgtagttcaaatggtcaaagtatgaagtttgagttccttgctgtagttttctggcctctatatcttgttattatttattttaacctttattttttatgatgatgattattcagctaccctcctccgcgggaaaactgtgccggtccttcgtgtaaaaatccatacaagtacagggattccaagtcaaagcttcctctttgcagcctccagtgctacaaagctattcagggaaaggtgttgcctgaaactacctgctgatgcacctggctgttttcgtgcacatttttatgttaataatatatacccttcttaatatatatatctatttctatatggcactctgaatatggaggatggtgaggctgagccatctttgttgagttgcaactcttttaacatgtttttttttttgatcgatttctcagttgatgtaattagctttagctctagtttcttctatatataatatagttagatgaaataatgttctattattattattataattttttctagggagggttcttataaccctccgcggcactgattatgcatgtgtttatgagccaaaggaatattttaccttagtcactactattcctattcatttgattctctcaaacttgattgtattttctaacttctgattcttgattcttgttatcatagcacgcaatctatttaatattcgaagcttttaagagctgaggtttaacatgtgttatttttattttaattaaaaaaaaataattgaaaatatccaattttaatcaaatacttgttgaatatacaattttcaataacgtgtttattgattttatggttggtatgtagccaatcattttgttaatttaagggaatatctataaaacaaatactttcttcggaataaataatttggtcgaagggttgtgtgcaatataataaaataggaaatttaaggggcttctacaacaattttttttttcctactatctttttccattttttacaaatattttgataggagcatacaaagaacaatgaagcctcgaggttgtttgactttggtgccgtttaataatacttttgttttt

SEQ ID NO: 295952 - DNA, 1216 bp, Cannabis indica
ataatttataattagccacacacaatttttttatctttagtcacaaattatgttgtgactaaaaataagattttttgtagtgacatggtgaatgaatgaatatattttcggccataaattgtaggtcttgcaccagctacaaataaaagatcttaaatcgaattgtaagatgtgaatttattcaaaggaagtatcattagaaaaatcttgaaattatctaaatatgtcacgaagggctcaaaatcaaatttgtaggttaagatagtgaaaaacgagtcacaaagtaggagctcacaaaaggtgtgagaattcaatttaattttccatttctatgcacgaacttggacatgatcaaggaataaaagaggatgtgactggagagttgatattacaaggaagacagttctattcattttatagttagacaattcagattgtatataaaagcttttgattattaattaaagcagagaaaattcataaaacttgagagagatttctattgttttatgtggagtgtttttgtgtgtgttcattggagtttcttactgtgtgggatcatacgtcatttccaatagatggtatcagagcttggagatcaaaaatcacattcaaaggattcaacattcttaaagatcgatccaagaaacaatggggaatgccaagtatgatctagagaagtttataggagaaaatgacttcgtagtgtggcatgtcatgatgagacccctccttgttcaacagggtttacaagttgcattatttgaaaaaaggaatctaccagagggattgaatccaaaagaaaggatcgacattcttgtcaggctcatagtgcccaacatcacactaatatgtcaccatataattagttagtggttcgccatatataatttattatattaatgtgtatgaaccgattttaaaatacatcaataataatatttaggctattagtaatttttcctcctgaactttgacatgtagtaaatcgttccctctgaacttttttggccgttaaaaatttctcccgaactattgagattgttaaatttaagaacttttgtctaatttcatttaattttactgtttcagtgattgtttatgtactataccatgctctcgagactttgatatctacccaatcatgcccctcaaactttgatatgactaaatcatgccccttgaactttcatccatgttagaatttttttactaa

SEQ ID NO: 295953 - DNA, 8520 bp, Cannabis indica
acaagaaaacaacataaaagtaacatgaaaataacaacaaaaaataacatacatataacaaaaattaacaacaaatgaacaaaatttcaacataaaaagaccgtattttatgtaaataaaatcaaaaaaaatcgtaaaaatgtttaaaattccgtgaaaccgtatttttattgtttttttgttgtgcatttgtaaaattaacctaataaaaaatatgaattaccgttatttttattatatattctaatcatataatttaatttaaaatcatccgttagagatattatcgtgtaaatctaggacacgtgtacgaacataaagaaactgatgagaaccaaccaagggatgagagctgaggtgagcccagcccaacccaaaccaccagactcccgacgtttcacgaacactctccactcttctttcttttgtttcttttctctctattcacaacacaaacctctgtatttttatggtgtaattgttgggcttcattttcaaaaccaaatcaccaacaaagaacactaaacaaaaacaatactcaaacaaagatttactgtgagttttctaaattctcacgcaaagctaaacaagtctcttcctgtacttgattattactattttcctcttttttccaaaattctaggcaactgtaaataatcacactttctacatatatataattgcaactggaaaaatttggagtggagtggacggaggagtagagagctgtaaaaatggcttccaccgcttcctttgcttctggagtcagttttcatctctcttccaaccgttgtagtaaaactgctttctttgctcggccgcagctttctttgatctttcctccgaaacccaattcgtttcgggccttaaagtcgctgcaattgaagcgaaatggtgctttctcgaatgggtttcaaagagttggtcggagttcgaggcggcttgttgttcgttgtgatgcttcgactggaactggaagggtatgtacgttatgtgtattgctttatataccattttcttcttcttcttcttcctaagttattttgggttttcaattttactgaatttgtttttggtttgagaacaatggcagcagattactcaacaagagttcactgaaatggcttggcaagccattgtttcttgtccagaagtggcgaaagagaacaagcatcagatagtggagactgaacatctaatgaaggcccttttggagcagaagaatggtcttgctcgtaggattttctcaaaagttggggtcgacaatactcgtcttcttgagaccactgataaattcatccaacgccagcccaaggtagccattaatgcgttttgagttaatcctttcagatttatttatagccattcatatttgtgttgatacttacatttttcaatcactcgaaattgatgtaagaacctgattagttagttttgagttaatcctttcaggtttattaccattcatatttgtgttgatacttacatttttcaatcactctaaattgatgtaagaacctgattagttagttttgagttaatcctttcaggtttatttataaccattcatatttgtgttgatacttacatttttcaatcattctaaattgatgtaagaacctgattagttagttttgagttaatcctttcaggtttattgataaccattcatatttgtgttgatacttacatttttcaatcactctaaattgatgtaagaacatgattagttaaagctttgtttgtttgtgttatgtgtacaatccatttaggttctgggtgagtctgcgggttcaatgttaggtcgtgatttggaggccttaattcaacgtgccagagattacaagaaagagtatggtgactcatttgtgtctgtggagcatttggttcttggttttattcaagaccaacggtttgggaagcaattgctgaaagattttcaggtgtctactcaaagtttgaaaactgcaattgagtccataaggggtcgccaaacagtaatcgaccaaggtagtaatttgatctttcactacttttgtggcaatctaatgcagctgcataaccatcttgcctggcttactagatgcttcttaatgtataattctaaatgtttaactcttgtgactgagcattgcatgaacactgcctgactttattctattcatttatttgtgtgtatgttgttaggttgtgtaatttgttttctagttgtaaggaatgagcttttattttttatatttattaattttatatttgttgcagatcctgaagggaagtatgaagcattggaaaagtatggaaaagacttgacggccatggctaaagcaggaaaacttgatcctgtaataggaagagatgacgaaatacgcaggtgcattcagattctctctagaagaacaaagaacaatcctgttcttattggtgagccaggtgttggtaaaacagctatttctgaagggtaagttactccattttattctgaaggtgttagatagttgaattatctaatgattgtttgggatttcaaactttgttttgctaagtttggtttggtttctccaatttttactttgattctgactatatcttttctacaggctagctcaaagaattgtgcaaggtgatgtgccacaagctttgatgaaccgtaaggtgtgtgctatactagctgaagaatgtctgtcctttactatttacttttgtttatggctgccttttttagagtcattaccatgttctggtcataaaattttaattgaatttttgatgttgatccaactctgcttttttttttgtagcttatatcccttgacatgggtgcactcattgctggagcaaaatacaggggtgaatttgaagataggctaaaggcggttctcaaggaagtaacagattcagaaggacagattgttctttttattgatgagatccacacagttgttggtgcaggtatgatttgccttgtctctcttatattgatgagattaaagttttgtaggatggaatgacctctatgacggaagaataattcgtgtactgggactgttccatcgtttagtttttcaattgaataatggaatgataataattctaatagaatacaattcctttactcagtagaaataagtttccaatcctccaagaaatctttctccattcctgaagtaattaaaaattaaatacacttaacttctcacccttctatttctcgttcccaaattaaagtgtaaggtctgtgaaaggagatattgttttcatcaatacaccacttgttccattttactattacatcaaatcaaataacacaattttcatttcaatattgattccaacttttttccaaaaaattcaattattattccttattccattttattactacttttaatctatttcaccaaaccgaaagcaattttagttatatgtttggtgttaagctatcgttttctgtttcaggtgccacaaatggtgcaatggatgcgggcaatctcttgaagcctatgcttggacgaggggagttgcggtgcattggtgcaacaacactggatgaatatcgcaagtacattgagaaagatcctgcattggagcgtcgtttccagcaagtatatgtagatcaacctacagttgaagatacaatatcaatcctcaggggattacgcgagagatatgagttgcatcatggagtccgaatatctgatggtgcccttgttgaagctgctattctatcagatcgttatatcagtgggagatttttacctgacaaaggtaacacagtccactagagcagtcaattattatttttgttacctttactagaattgatccaactcaagaagattaagttcaagagtaccaacaaaatgaggtgtttggggacatggcaaatttgctcattttagaactttaagcagaagacacttaaaatttatttgttctttcagctacttaaatttatatagcagaagacacttaaaaatttaattgttctttcagctacttaaatttatatgattttttggtagttgtttgagatttatagcttcaccaatagtgatagctcaaacatcaagcatggggtttgctcccatatggtttgaggttcaagtccctgatgggtacttacatagcaattgttataatttcttggttgggttaggcgggaattaattttacaaaaagatttattgcctcacatctacatggcaaggaatgctaatatacatttgtgcttgcagctattgacttagttgatgaagcggctgctaaactgaaaatggagattacttcgaaacccactgctcttgatgagatcaatcgttcagtgctgaaacttgagatggaacggttatctcttacgaacgatacagataaagcttctaaagacaggttgagtcgccttgatgctgagttgtctctcttgaaagagaaacaagctcagttgactcagcaatgggagcatgaaaagtctgtgatgaccgggcttcagtcaatcaaagaagaggtatttaaatgttcttactgtcatgaatcttaagtttgttccattggttacatttcattattaatattagtacagagtgattatgttttttctattcaaattggaagatacaaagttttggagtttgaattaacaatccattttctcttgtgcagatcgacagggtaaaccttgaaatccagcaggccgaacgggagtatgatcttaaccgtgcagctgaactgaagtatgggagtctgaactcactgcagcgccaacttgcagctgcagaaaaagagttggatgagtatatgaaatcagggaagtctatgctcagagaggaagttactggaaatgatattgctgaaatagtcagtaaatggaccggtattcctgtttccaagcttcaacagtctgagagggaaaagctgcttcacttggaggaagagctgcataaacgtgtggttggtcagaaccctgcagtaactgccgttgctgaggccatccaacgatcacgagcaggtctatcagatcctcacaggccaattgctagtttcatgtttatggggccaactggtgttgggaagacagagctagctaaggcccttgcttcttacatgttcaatacagaagaagcacttgtgagaattgacatgagtgaatacatggaaaaacatgctgtgtcaagattgattggtgcgccacctggttatgtagggtacgaggaaggaggacagctgacagagactgttcgccggaggccttacgcagttattttgtttgatgagattgagaaggcacattctgatgtcttcaatgtcttccttcaaatattagatgatggcagagtaactgactcgcagggtcgcactgtgagtttcacaaacactgtcatcatcatgacatccaatgttggttcacagtacattctcaacacagatgatgacacctcaccaaaggagttggcctatgaaaccataaagcaacgggtaatggaagctgcaagatcagtctttcgccctgagtttatgaaccgtgtggatgagtacatagtattccaacccctggaccgcgaacagatcaacagcattgtgcgcttacaggtaaatcttctcctcatagaccagaaatttacttactatatttttatcttatgctgtggaaaatcttgaaccctctgctaactaagattgactatggctgttattgcagttggcacgagtgcaaaagaggattgcagatcgcaaaatgaagatcacagtaagcaatgcagctatcgagcttctcggtagccttggctatgatcctaactatggtgccagaccagtgaagcgagtgatacagcagtatgttgagaatgaacttgccaaaggcatactgagaggagattttaaggaagaagactgcgtggctatcgacacagaagtgacggccttcaccaatggccagctcccccagcacaagctagtcttccagaggcaagagcctgaaactgagcctcaagcttcagaaggccaagaggctttgtcaggaaccgtatgattgtctttgaatttcacatcttcacaataaattagcttttaacctaaattttggaacgtataacaatgcttcaatagatgtctttattattgtcaataaaaataaataaatatataattcaaatcagtgattgattcttactttaattcatcgttggcttcatttaaaatatatgtcaataccattctgaaaccacaactcatgcttttctctggtgtaatggggcaaaaagagtatggaggcttgctgctatggcaatatatcacaaatgagctgcaagaattatttgattgatgtatctgaaatcctctcaaagcaagatttgaagttttctttactgttttatagagcatctagtctgagaggaatgctgaggttcacaataaagttgcaaaactagctagaatttttcttgattttgctacttcttcaccatcaatccgaccacaatcaggtgggctttagctgaacaaaaatgctgctttattgaaaggagctgctggaattggtgcaactataatgaacagtttaggtagcattaactgattccaagaacttttaaatgcgagaagatggaagctttagttatattttgagcctgagtttgcaatggttagatgatgttcattttaggtgcattttatcgagactgattcgcttagtgggaatatgaagaattttactgatgtgatctctagtcagtagttgactgttcattgcttaccaacagataaatctatgcttgtgaacaatcaacttatgccaaacgtttgcaccataatcaatttttccagcttgaacaaagaataagtagaaagatttagctctaaacttaccatgtttcccaacattatttagagctttttcatcaacggagtttttaagtttcaaaagcttcttaaaataccaactcagtattatacttaaacgacatcgactaaaaagtttgaccctttaagtaaatggcattcatcgactagaagctttgacccttttacgtaaatattactattcatattttttatatataaaaaaagaatgtcatgaaattgttctatattactaatctcgtattctagaaagaactgatcctctttttacgtcagatgtatatgtatggtgtcgttttcataaaattcgtgtcgttttctcataaacgacggtaagaacaacaagcgttaatgaacttgtcttgtcgtttgggccatttcccatgccacgcaaaacataaaacatacgacgccgagggttctctttgaaacaagggcggtttctttgttcattattactttactggtgtctgtgtgtctttgccatcttccttctcaaatttcaattttggttaatcttaatcatcattaacgaacgaaaccaattatgggtaaggtaaagctattgttttttttcctttttctatatcttgtatatttttatttatccctctttacctattttttcttgaataaattgcagaaggagattcggacagagggaagttgaaggagaatgaggtcaaggagggagtagcttcaatagcattgttgccatgtgggtccatatctggccacttcatccaacttccccacaatatttgctatggcctccatggaactggtactctctcttttttgttattattatacacatacagttcctgtgttaatttataatttctctaaaaataaaaatctgtcatttttgcaactgggttttgtttaaatttcacatttttagactcaaagttagtgtatagggtagtatcaaggcatcagtgattgttttctgtatactgcaataactcagatacttggttttgatttgttagaactggaatgcgagagagagtgtagcaggggtgaggattaccgtctgatcaagctgacaatcatagattacaaagtaggaactttttctcttcattctttttgctttccctctaaaataataagcaagtcaaaatccttgcttggttaatttccaatcttttaacagagaaagaaagaacgagatgcttttgtggagtgtagaggtcatgatgctgctcggttaagtagcatagatcatgctcatgggtaagtaaagccaggcaccttttatgttttccatagaaagctatgataagtagttcatgacatatatttacacacccatttgatttgtgagcagttgggagaaagatattgttggtatggttgaagagaaacatgggaaaaacaagatagtagtttctttcaactgtgagacactgaaagctgagaaagcagcagaagaccatatcagaaacttcatgcctaaattagccggtcttgatgctgttggtacgttttgttctctctctctctgtgaaagttgttctcattgttcttccactgagttctttcttaatgacttgcagtaaacattgggcggatgagcattacagggtttggattttgaaagatgaggaacatgaatcaaagcagaatttacctgaactctaatgcatgttctttccctat

SEQ ID NO: 295954 - DNA, 2271 bp, Cannabis indica
taacccgtttaataaacgggtcgtcttcgggttgacacggctaacacgaaattgaccttttaatgacctattaaagttattttagtactttaatgtgttataaatgggttacaaacatgttgaatacttcataaacgtgttattgattgacatgtttaaacaaaatatacttataaacgagttacactggtcgtgtcgtgtcaatcggtttataaatgggtcgtgtttgggtttcatttttttgacacgattattaaacgggccgtgttcaggtcgagcatgtacctgttatacatgggtctcgacatgacacgaacacgacccgcgaacacgaattaccacccctaaacataggacaagcatcaatccaaacatggacttctatcaaactagtaacagacttaactagtgtgtgggctacaccattcacaacacgcaaaaaggcaaaacaagaaccaccaccaactgtagctaaaagaaaaataatctcatcaataagagatttaaacataatattagaattaggacaattcacccaattataaactattgaagaatctgtctccactctcaccacattgaaccccgaattggaagtccatagcaaacccacctgtaatgctaaaagctctgccaccaccacctggaactcgccaactctaccaatagcccacaccgcccacataacccgctcaacacctcgaatcacccccaaaacaagcaaagcctttccccaaggtgacaattatgtcaatggacaacatgaaattaccatcttaaggaggaaaccacctgctacgcccagcaacagccccgcccctcacacccctgctcaccctcccctgccttgcaccagcagcacagcccagaaacccataacccgaccctgtcacattaataaaactagcagaacgggacctcgattcctgaccctctcctgtcgcaccatccccttgaaactcctctaacgccacactcactaagccaactatcgcctctaacctcgattgcttttttccaaacaaaaccgagttctgattgtgccacagccacccccactacaccatggctattaaagcaaaactatcctgaccaagctcatcaaacaaccaaaccagcaacttcgataaatggccatttctaagctgacataagtgattccacatctgtaatctatgccacgtcggaatcaatgaagaacaaaacacaaaggcatgttccggtgtctctgtttcctcatcacatttgtgataaattggctaaatgggaactttccgtttaattagttgggaatttgttgtgatggctagataaaacattcaccatagaattttttttcatttatggcacccttaaattccaaagcccattccaccatttagacaaattcaatgatgaacacccaagcttttcactcgccaactctagagctaaagcacatccacttttaatagtatagcatccattcgagttgttatgccaacaccaccgatccacgctcacaccattcgctaaagggaaaccaagaatcacatctttataactaaaggcaaaaaatatcaagataaagcttgtatattctaagacccactctcaccaattaactctttggccatcacctcgacactaggagcagtcgtaataggacaaaacatcctaggctgaggtatccaaggatccttaaaaggaacaatactttgcccatactccactaacttcctcatccccttactcagtagctccaaccctgtaaagaccgcttagcttaaatttggaaattagcagataattagggtttaattacagaaattatttattaattctaaattattaatttatgaggttttatttgaattcagaatgcattttatatgtcgtatatagaaatttcataattttgcatgttcagtgcccgacaacatcggaacgcggtgtttggctattagaatcacatctttgtattttttttagtatagggggcgatatagttagacattgggaatgtcgggattttagaatttcccaaaatatcccttagtgacttttagttatgtttaggttcaggggcaaaatggtctttttagcaagatgtgttttgtcttttgtgggattttttgataggcattataatcagatttttatagattatgttggctgatatttttagtaaagcaaaggtgtcgtttggtaacacttttgttttctaattttttaatcacaaaatgaaatgttctttaaaaacaaaattgtgttctgtaaccacttttgttt

SEQ ID NO: 295955 - DNA, 2243 bp, Cannabis indica
ataataataaaaaaaatagtaaactatcaaaacattcattcaaaatcattcataccattgtatccccctgttaaaaactggtttacaaagtcatgaagtagttccaaaattttatcctttgatgacggtaatctaccatgattccatgcaattgttttagtaggaccccgatgaattttatgtggtttaatcatggcatcactagaaacagaagcaggtttcccattaaaaactgatttggagccatcctgccaaacaaaaccattagtactgctaaaacttcaattaaaatacctgtagaatgaaaactacataccatggaaagacgagtgaatgttccgataaaatgtgaatgtcggaccaagtttcgggctctagtaagttttcttttctcctcttccttctccataattgacttgagactgtctagagaagctttgttggcctcttcatcggtctatgtaaatgaaacttgttaacttcaaattacatagtggataaattttataatcaacaaattaaccaagaaaggtgattaagttagcaatgaaaactatgtcatgtctagtaacttctttaattttacaattacaccccaagaggactatgattttatttttaatatacctatctattaatgctcgttaacaacttgcagtgagcttggaaataatataatttgcagcaagaaatgatattattagtaccttagaaccttttagatgtgctttggaaaccaattctggatcttgacccaagaaaatgtaatgaaaaatctccaacaaaagcaagttatcttgacgaagataaccaccaaaatgctgggttattactataatcaagtccataacattctcgcggaacaaaagttctagaaatttatctcttaatgataggtagtgagtagcagttccgacaaccttctgctgcagtgaaatttcttgaatagccaaaagatttcggaataacgttagtatcagctgcaccaatttccagtcatcctctgtgaacgcatcactgagcaaaaaatgtaacacataaatgtaaatatcttttctgagttcttccaacaaccccaaaaggaaaaatattaatacatgaaatttaactcacccttccagatttaccaaaggattttccagaagtgatactataactgcgataatatcaccaaacataactgaagacttcaacccccacaaatactctatctgttgagctatatcatttgatgatggctcaattggcatagttaagaacaccaaaattttaactgaaatattgcaaaataaaaaagtattagattttagaaccagtgctgtttacaatttaaaaagaagaaaaaaaaaacatttctttttcaatttacctgcatttagaaccaaattacgatcgtcttgaaaattttcgattataggtatcaagtctttagatacaatattccatttacagacttgcttaaacacatctcgattctgtgggtcatcacgccttaaaaacctcatcaaatccttcaagttatctgctccaaaaaattaaccgagccatttccgcataaactaataccgcaaaaaaatagaccagtaatctctcaaaaatcaaagtgaaacaagcatatgtatacatatatatcgataaaatttatatagagaaagaggtaattaattacctaagcagtactccccctttgtgtaaccgatccgattaccatttcggtcctcttccaccgttccgagtccagcgcagatcaccgataacccttccatatccatacttactgacactttggagattgagaattagggattttcgccccaacaagagaaaaaatacttgtgtctagtctagggctttgtggcgccaatttagagctataatttcccgcgcgttttaagtttcagatgtatgttgcagcgtaaaatctactacggcagggagtaccgaaaactttcaggactaatgacgtggcacaatttcattgcccacatcctcagggcttgagcccatttagttttggacctccgatccaatactatcacaaatgtaaatctttttttttttttgagaaaaaacacaaatgtaaatcttttaaaaatgggaatttaacacaattatacaacaatatgcacttaattttaaaaatatcttaaaaaaaatattataacataatgataaactttattatgtatatacctaatctttcatatttgtaactgacattctcatcaaatttatacttactc

SEQ ID NO: 295956 - DNA, 3872 bp, Cannabis indica
attccaccaacagtttctttctctcttcctttttaatttctttatgttaaattctgttttaggaatgattatggatttgaacatgagctaatcttccatttaggaaagatgatgaatgtttgttaaagtttgccctagttaatgttaattgtcattcctgttcattttgattgtgtattatccttatttgtgttatttccatgttaaagcttgatcaccttttgcatgtctatgatctcaattcgaaacctgaaaagtgagaattgaaaatgctaaaatttggataacctaagtttttgtagaacgaaggtatttacatgacttttgtgacttttctttagattattgctacacccttccgtgattgccatgtacatgatgtccgtgaatacatattacacttctaaatacaacataaccaacatatttcatcaagaaaccatggccaaaaacacaatggaacacaatccacaaatgttgaaggcaagtttgagttcttagacctcaaacttacataaaatcttctacctccaaccaaattactttaaactagttctaacaagtccaaattaatcttaagaaaaacatccacccaaactaactaaaactcaagaaaaaccataaattaggttagggtttacctttggtacttggaggagctaggagctaaataccttgatcaattttagctaaaatggagcttgaaaattatgaaaacccactagtttttgctatagttttaggtcacgaaggagaggaagaagaaaggtaagttttggctttacttcacactttgactttggtttttcatttggattttcttttaatttcattccaagctgctagtcatcaaatgagatgagtcacaactccttaattccatcaaaataagtgactaatcaaagggcaaaaagattaaaatgcccatacttaagttaccttgtaactctaggggtaaaatagtctaattttgttatttcgctaaatcctggtattctaaaagtttcaatgatatttctccataaattacttgatagaaatttgtattcatgtgactaaaattgccgcccgatccatttccactgttaccgggtataaaaatataaaaacataaaaattcactgataacatgcatatcacacctaaaattcaataaaatctccgaattgagaaataataatcataacacctgttttttttatgaaaataaggtctataaagcataaaatgcatagataatcacataatcaaattagttagtgctaagtgtcccactaatctcatgtctaagtataacagtcattacacaaaccctgaatttggacaacgaactcaaagccagaccctggatccaaactctagacctcggacccaaaagactaacctcaaccccagacttggaccccaaactcagacctagacccagacccgagacctaagacccgaaaccgaaccctagacttgcacattgaccaggatcccaaacctaaacccgaatttggaccccatccctggccacaaacctcaaaccctaaaacccggactcagacccaaatcctaaacttggacattaaattctcgaccccagtcccacccagactcggagccagactcgacccagaccagaacccgtactcagaccccagccttggctttagaccagggccctagtatcgtacctcgacccagtttctcttagcttaatttcttattcctcgcataaataaaaaataaaaaagaaaaatcattatagaacacatttttattttttataaaatcaaaattttattattatttttgtgattaaaaattaaaaaaaactaccaaaggccattattaataattcagttgaaatatatttcattgctagaagaggacttctcaccactaataagtacatgatgagagggtcaatgtttattgtttagagaataatgaaaatgcacattaattaaggcacaaaaattacagctattacggagaaggaaatttaaataacataacaaaaaatgataagtaatattgttgttgttaattaattaagggattaagcacgaggcttggcgtttgcagcgaatgcgtaggaagacatgactgataacatggcagtgcatatgaatgcgatgagaaccaaactagctgatgcgtatcccattgagcagaacccatctaattccccatcttccaaatccaaaagttgaaattgttggctaaaatatgtcttcacatctttggttgcagcaaatccagctgctgttccagtggcaagcaggtatgatattatctgttcaatcaaaccgccgttatatatttaattatatatcttatgataacattttcactaagtttcagagatattgtaattacgtgtgtacatctatattaaaaagatgtacaactaaattaagaagattaatttcaaatgaattgaccttatcaccatagaagtctatcaaaaagtatcccttcacattagttatgaaaaggtagattgagaatcctaatcgccacagggaatataccaagccaaacacaatcacagaaagcatgtaactgtaggtcaaaaacaagtaaagatcagtgacattttgataaaatttaacttaagaaatatatacaagaaaatgttttgtacagatattcatatctgtacctgtaagcagatacattttgaacatttagagttgggctatcttcaattgtcttggaattagtggcaaggacaattaatgctataaagaggagaataacaatgaagagccataatccaagacacacaatccttgtaaccgtagacattggcactaacttttgtggttttccaacgggctcatagctaatattattactattaaccgcaggagtaccactctcttgatcagtactagccattgctcaacttatattgttcgtaatagaattactttatttataatattacttgctcctttatcagatttatgtatagagagagtcgacacacagatttatatatatatatatatcagttcaattgggcaggcttaatttaataagttgaaacattgtttttagtcagccttgttatcaagaacagcactatgatcaagttaattaaaatcatctcgttaatatagctggcccaaaattacggatttatcaagagaccaagccattatcctattgcgatcgatcgaaattagcctacaggtatatatttaataagatatatatctagattaaatttggcttcacgcgtttgtgtgtatatatgctggttattttttgtttttttaaatatatatcctgtaaaggaagagagccaaactttcatgcatgatatgtgtgtatatatatatttatgaaatgattggcgttgttaactagggaaaatagaattatgtaacattttttgtaggaacatatatgaaatgtcgataatgccaggtctcaacagctggggcgtgcattttctgacgcctactatcttcaagtcaaagaatataaaaatcaattaattcatcacttattttttaaaagtgtcgttgtttcagtattttttattgcgtttcgttttgctgaatgcgcccgtaggtgtgccaccagcaaaatcgtcacttatactatgccttaaaaccgtcaaggcccattcaaaaatcgtcactaacttctctccacatttctcacgcccacctactttttttctatttctcacatgtccaccaattcctccccaatttcccacaccctaaaacgaaaatcttaactctccaaaacctcacccacgcctccacaccatcgccctcctctctcgtcgtcttcctccctctctcgatctccctttcttctcatctctctcgtccatcgatctccacccacccctccttccgtcg

SEQ ID NO: 295957 - DNA, 4639 bp, Cannabis indica
cataaaacccaacacaaacaacctaattaattaagactgctacacatcaagaagaacggccttcgcttcagcaatagcaggagaaacattgccaacaattggcttaataatttctgctactagatggtttgattcattataaaccacaatccccaggttatgctttttccttgtactgtccaatgtcgcatctgtataaatccgaaaacaaccactcaagcacgacatcaaaacatgagatctaggatctatttaccaaactgttactggataaaccattctgctgagcatccaagtatttgagcaaaaaactgttgcaccaagcaaaaatctcatgaggaggaataaacagacggttataaaagacattattactctacttccataaagtccaaagaaaacataataatatatcaatagaagagttatcaaaagcattaattatgttctgtatgtaatgtataatatcaaagtgcttattatagttgtgaaagctagtaaaatttgatgtcttctaagctttcttgactctaaagtaatctagtaaaacatgtgttaccgtttctgattgaagtttgcataaatgacacaaaggggagcaaatgatatgcccctgagaaagcaacgcagccacaagaaaaacattagagacagccctctagataaagtgtttaactttaggaggaatcttagaattccatatcttagtccaagaagattttgaggttcgaaaggatgaagaagggaggtcacgtcctgagagagcaaggtgataggctaatttaacactaaacaaaccagagttctcctttgcccaaatttgatcatccttaccccttacccctgatattggaacatccaaaatttctctaataatacagtcatcaaaatgatctctaagcctatttaaactccatgagcctgattcatcaatgaaatatgaaagcttatcagagggaggttgaggatcctgagtaaaacatttaaatttagcaattgggattcaatgctcctctaatgttcttatgttctctccatcaccaactttccaaatcataccagaagctaacagatcccttcctcaaagtaaacttctctaagaatacgagggattattaccaggcttagcctccagaatagaggtattaggaaaataacggtctttgagagtaagactaagtagcaaattgggatgattgaggattctctaagccagcttagctagtatagctcggttaaaataggtaagagatctaaagcctaaacctcctacaaacttatattaacagatagtcctctagctcttccaatgaatctttttagaatcacccgaagttaccccaccaaaatctagccatcgcaacctcaatctccttacaaagcttaactgacaatttaaaataagccatgacataagctgggatggcttgcaccacagccttaaggagaatttcctttccagctctagagaaacacttggaatgcgaagaatgaaggacagaggaaactctatcctttagaaaagtgaaggagtgatgttttgaacgcgacagacattggggaagccctaaatatttaataataaaaggcatgtcttccaagttgaaagtggtaaagaaaaattttgaataccttgagggacattagggaagaacatgatagaggattaaacaaaatttataacttgacctgaagttttaaagtagatggaaaaaacatcactaagagcaacacaagagtgtctatccgcagtgcagaagataaggttgtcatctgcaaaaaagtaaatgagttaatgaaggagcactcctcgagataaagatgctcttcagaagattactatcttgcttagctctaagtagagatgataaccccttaacacaaatgataaaaagataaggggacaaaggatctccttgtctaagacccttagtcggttttatagatcctctaacaaccccaataatcagaaaagagatattagtggtagagatacattttatattaagagagaaaatgaagaggaaaattgaaatgaaacatgacattttctaggaaatgtcactcaaccctatcaaaagctttgaccatatccaacttgagggcagcccaacctaactttccttgtttcctagaattaatagcatgtacaacctcttgagcaagaagaataatgtcaaaaatgactctaccaaaaaaaaagcactttgggaaggtgaaataattctattgaaaactatctttaaacgacaagctagcactttggaaataaccttatacagtgtagtacataaactagtaggtctaaagtctagagcagagtgagcatgttacttcttaggaataaggataataagagtggaattaatagaagagacgtcagtaccattattaaggtaatctaggcctgcatcaataagtttcaaacctagggtcggccaattttttgatagaaataagcgttaagaccattaagacccgcaactttatcaccaaacaactgaaagagagccctcctgacctcatcagcactaaaaggctgccctaacacatcagaatcatgatcatcaaggggaggtcctagattttctaagatttgagcagtggactcagcatcacagccttcaaactgaaaaagactggaaaagtacgaagagataacaccacaaatactctcaaaaacattaataatgctaccattctcgtctttaagaaatttgatggtatttaccttttttctatgagaggcaaaacgatgaaagaatttggtatttttgtcaccagcattcagccaggtcaccctagaccattggcgcaatacacctcctctttatacaaaaaagtattcagatgagattggagattctaaatttggctaatggtattactgtccaaaggacaaaaactttggagctcagctatagccttattaagagcattgatcctagttttgaagagattgtttatcgaagcattccaagttttaatagagaaaatacaagaaaactgcttattcaaaaaatttgaaaaagcccatttattagtattattgagattatagcttaacagaaagataaaagtcagaattctcaagccaaatattttcaaattgaaatcttttactaacaaaatttgggcaagcattattatctaagttaagcagcaccttcaaggctcgatgatccgagccatgaaagagtagttgataaagaatagcactagggaacataacacaccaagtatttaaactaacagcccagtctagacgatcatatgtagaactatgcttccaagtgaatttattaccaatataagaaaaaggaaaaaggctaaacttatccaagaaataagcaaaagacttcatatcggtattagagtaaaaatgattgctagacttatcactatgaaaaagataactattaaaatcacccattataaaccaaggaagattaggggcatattaaaattctttatgaagaagattccaagtgagatgcttttgattatgcacaggagatccataaaaactagtaaaatgaaacaaatatcattaaagtttatattacaatctatatgattataggagaaatttaaaatatgaacataaacataagactttcacaaaagcataagtcccccccaaaaaaaaaatgcttcttgtggacttcaaagccaaaatcaaaacctaaagaagtcttaactctatccacttcatgggaaggcaactttgtatccatcaaaaaaagaactaaaggttgatgctccttaaccaacagagagagtcttctgaatgaatgggtactcccaagaccccgtgcattccagctgatgaggctcatttttctaggcaggtgtgcccaacatcacccgcctgttccaatgaaaaagaaaaagaaaaggaaacaccatccatgtccccagcacgggctcgtttaagcatggaccggagggaaccaccaactataatctggtgagagtaaaaagaagcacatttcacactagaggtagaggcaaaaccttgcctcgtacagaaaggtcaagttgaccaacaggattgtcactagaaggatgagcaattgtattagcccatagaaaagcctcctctctagtatttggaggagtgtcagtagaggattgggtattcaacaggccctctaaactgtctaaactaggctgattcacaaccagaacataatctatggtataagagatataagtggaagagttcagggtagaagcaaagctaacgttactaccatatgggttcaaagcagaaagattgggattaatgggtgtaagaatcatgacatctagagagggctggaatggaataagctgaggggcattaggcacactagtattgagaaatagaaaatgagggaaaagttgataacttggttggtaagcaatgtggaagatggattagaggtactaaatagcacctgcaacagctaaagaaggagatcgggatactgaaagggcatgggtttatcagtgactttttcttttcctcgaaggacaatggtaaaaggacaaggaagaagagttggagtttcatcacacttttgcagataagcatgacagtatttcctagtgtgatcaagttattagaatatttctaattaaggaaataaaataa

SEQ ID NO: 295958 - DNA, 5468 bp, Cannabis indica
acaatgtagtgttagaaacggatagtttagtgtgtatccaagcagtccaaagtaatatttttatgtcctcagagtttggtaaacgatctgcacacaagttggctcattgcttggcaagagactcttgtttctctacaggttgtgtgctttagttggaggattatttctctgaagtgcgtttgattattttgaacgaatttattaattaataaattttctgatttattcaaaagaaaaaataataataatttgttgtccattgccaaaaaaaaaatatatatatgttgtccgatattgaattgtcaaaacgacattgccatcctttcataattaaatatccgttgtcgtttaagttcacataaaatgagtgagaaggtaacaatgaaaaataaaaaactaacgcaaaatgagtgaccgattggtacaaagctcaacatattctaactccccagattttgattttcttgccatccaaacactctctccctagggttttgtatagatttcgcacgtttcttctactttccggtgtctaagctttgtactctgatttttttttttcttcgaggcggtttaaaagtatgcctggtgattcagagccccaagccccatttctttagggtttcgccggattttcagttcattcctccttcaatgatctctctgatgaacagcgatgacgaaattgatagaaaatcagatgccattgaagaacctgaagatgtgaaaggcgggaggatctcagaaggctgcgtcgatggcgctgaagatgagaagtattcaaattcaagttccaacgaggttagggtatcggcaatggagctcgattcgggagctgaagattttggttccagggtttctgatactggagaattagatgggattagggttaagggagatgtccgtaaggaaagtgacgatgaagaaatggaattgaaaaattcagagactaaggtggaaaactcgagtgccgatgaactcgaagctcgaaatgaagaaagcgagagcgaggatagccgaaaggagcatgcagatgatgatacacatggtggggcgggaaaaggtacagtttctcagtataattctctgttgtcggagttcgatgattttgtggctaatgagaatagtggacaattatcaacttcgagggcacagcgttatgggtttgaagttggtgatatggtttgggggaaggtgaaatcacatccatggtggccgggtcacatattcaacgaagcttttgcgacttctcaggtgcgtcgaaccaggagggagggtcatatattagtggctttcttcggtgatagtagctacgggtggttcgaccctgctgagcttattcctttcgattcgaatttcgcagagaaatcacggcaattgacttccaggagctttatcaaggccgtggaggaagcagtggatgaggtatgtcggaggcgtggtcttgctttggcttgtaaatgtagaaatccaaataactttcgtgcaacaaatgttcaaggctatttcgctgttgatgtgcctgattatgagccgcgtgctgtttattcagcgattcaaatcagaaaggctagagataattgcaggccatctgaaatcctctccttcgttaagcagttggcgttatcacctagcgatggtgatgagaagaatctgagttttgtgaagaataaggccactgttttttcttttcgtagggcagtatttgaggaatttgacgagacctatgctcaggcgtttaatgtgcagtccggacgttcttctcgtgaaccaccagctgttttgcagtctcgaggtactaatttacatggtttagagtcattgttgggaattattttgattgttcattccatcggatgttgtgttctggtgttttctaaaactgtttcgaaattcatgcttgtaagaagtaacatactgtacttgttgaaatgcttggcgctcattactttcaaataatcagtgtaccattctacactttcgtgtgggattaataagaatagagatcatattttatttaggtgagcatgtttttttttttttatctatacatgcattgatattctgtatgctatgtgcaatagatgaatttggagtaacatagagaagacatgaatatgttaattgcacttctattgatttaaacatcccagtacgaggactcataatgttgtggtgtaatgcatccaaccgtcagttttactgaatttgagataaatagttgggggttggaataccatgtattaattttcttttacaaaaacgatgtattggacttcatatttgaaggatcccttgatatgattattagtttttgtttaatatatttgttacctaagatttattcccccccgcccccaaaactaaagtagtagcaattaagttatctattcttatttgttaatcaagtattccccacttaagcaaagaaaatttctagagcagtgttaattgctttcttgtctgcaaatcatatttattagctgtgcattctatttttttagtcctgatggtgatgggtttgtcttctgaacagctcctttgagtggtccaatggtgattgcagaaactctcggtggcggtaccagtgccacaaaacataataaagttaaggacagttccaaaaaggacaggtacttgttcaagcgtagagatgaatctggtaacataaaaggccagaaaacgagccacgggcaagcaagttcctcagcccaatcagcttatgtggagggatcagtagcagttggagatgcggattatgtgttacagaagagagcttcacctgtttcttcaaagtctcagattccagaaaaacatgtacagactgggtctgttagcttgcccggtgcagattctagttcaaatgctagtgaatcggtaattgtagatcaagcaccagctaggagttctcttgccagcgaagatgtcattgaggatgaaaagccatcccttgataaagtgaaagaagaagtgaaagaggcttcaagatcagtgtctgataaagtagagattaccaaaaccactgcctccgtcgatttgtcaggaaatgggaccgtgccatgtatgatagatgatacatcacaatcctttaaggatgataatgagggcttggctgagtttaaacgtgaggagaatgtgaaaatcttaaaaccagatgaagatgttcaacaatcccagttgagtcttacaccgagagtggaaggaagccatggaatggaagttcaggatggtagtagtgttgaaggtctagcaagtgatgcaaagcgtgtgagtggaatgagtgcttctgttggggtgaaaaaggccaaagttaaacgtccattggaagaatcgaactctgagaactcaatgacagacggaaagaaaaagaaaaaaaagaaacaattaggctcagaaacaggattcagggacccacagaagaattcggtttccaaaaaaggttcctctggaaaaataggggtaaaatcaacccagattggtttggctgcaaaacaggagtcgaaggttaaacaatctaaaaagactgttagtaacaatttatctgattctgttggaaattccctactggttggcaacgttgaacttgaacttccagaacttttgagcgatttgcatgcccttgctctggatccttttcatggtacggaaagaaacagccctgcaattgtaaggaagttcttcctgagattccggtccctcgtttaccagaaaagcttagttctttcacccccatcagagactgaatctgttgaagtccgtctctctaaatcttctgttgctgttggagcttcggataataactcctctgagtacgttagagatctgccatcctcaaaaccagcaaaaccccctttccgatctgatgatcctactatagctggacgcaaacgggctccatcagatcgtcaagaggagattgcggtaaagaggtccaagaaaattaacgacattaaatccttggcagcggagaagaaggccaccccaaaatcttcagaagtgctacgtggggagggaaaagaatcagcggttccccttgtccgaagaaacaagccagattctgcaaaaagatttgaacctcctgcgaaggttgtccaacccactacgctggtgatgaagttccctccaaaaacatctctcccttcccaagcagaactcaaggcaagatttgcacgttttgggccgatggatcaggcaaatctaagggtattctggaaatctgccacgtgccgagttgtattcctttacaaatccgatgctcaagcagcttataaatatgccatatcaaacaactctctatttggaaacatcagtgtgaggttttacgtaaaggaagccgaaactcaaggaccggaagctcctgaattggggaagaaccaaggtgatgatgcttacagtgataccccacgagccgccaaggatcctgctgtcttacaacgaccagcggtgccacaactgcagccgcagccttctatccagctcaagtcctgtttgaagaagccgaccggtgatgagtcagggcagttaaccggaactagtggtggcaacaagggtgccaccccacgtgttaaatttgctttggctggtgaagagagtacgagtagggtagccgaccaatcggcagcagccagtaatagaaatatctccatcaacaatgctagttttgctgataatggtacacctgcttctactgttacaatggattttagtgtaagaaactttcaaaaggtcgttccttctccatctacctcatctattctcccacttccccctcaatttgcaaaagctccacttaataatttacgtcatactgaaattatggcacccagaaacactcctattgcaccaccacaaccacaactacaaccaccaccacacccgccccctgccattgacatttctcaacagatgttaaacctcttgacgaggtgtaacgatgtcgtgaccaatgtcacgagcttactgggctatgtgccttaccatcctctttgattaaaatcagttaaaatggaaaggaatttgcccaaaacacaaacccaagtaaagttccaagatttgaacaagttgagatgagtcaaatgatatgggagaagagagattgctttcgcagtgaaaagcatcatggtgactcgtgattgtgccccacatttgtttgaacgaaaaaagaaaaaatggggtgaagagctgtttgagaatcaatgtttagaggagccaattttttttaggatttcaggctcaaaaaatgatgtttaaaagtagatgattcacatgtaatttgatgtaatagtggcatagtgatgatgcatgtatctgctttcttttgtttcatatttttggtttattgacaaactgatatgcttgccttggtgggttggtgcgtatgcgttattctttttagggctatttacaaaaatatgggaaaataaggataagttttgatatatatggcataaaaacttaattacactaaa

SEQ ID NO: 295959 - DNA, 5562 bp, Cannabis indica
gctggatggttttatcttgaagtgcagacgaatcagtagctcgatctacgttgaaagccagaagagaaggttccactggtggttcattagccagaagaattgttccagatctggaatctacagttttttctttagacagattttccaacctctcgatctctaggatcttagggagatatttttccttttctaacccaagaatctccacaaaattgggatatccctttaccaaagcagatggagagtagttataagggcatgagataattcttcaactcttttagccttggtcttagctagttcctctttggtttcaatcagctcctcttccacctacctcttctcttccccaagttttagctgggcttccagctccgccttcaccttgctctcgactcttttagatcgtgctccacttaagaaagcttgactgaaaagttagattccactataggcatcttgtttttaagatcaatttcggcatccaccacaagatttcgaagactggtcagatgctcattactcttctccggggtatgaattttgatgattttctcatcaatcactccactcaatcgatctacttcttgtgaagcggcattgatcttcctctctaagtcgtgatttatcagctttggctcttccacctgactcttcagcactccgacccgagattgagatttttggtatttctctttatagtcatctatacttctgtactgcctcttggcttcatccttatagctggccacatcattgttgaggtttgcctcaacccttgccttgactcgctgctccactaacttgacaacttgggcttgggcttccttcagcgtagccatggcctcttccttctttgagttagaagcagctcactccctcctaagagtctctaactccatagacatcttggccatgagtgcagagcacctctccgccaataagttcccctggaagaatggaaagtgcttaaatacaagacaagtgttaaaaaaaagtcattgttaagtaaagttaaaaatacttaccccaacttggttgtgtcgaagacagtcaacaggaatgatcaaatcttcactggccaccatagcccatctctccagacaaagtctacagtaggtgttattggtttgatccagaagatctgctacaaatgtagctagatcactgccaatcctagttcaaagcctctctatgattgcctgacggtcaaagaccggaagggacgcttaagatctaactgccaaatcatccaactcaacattctacctagtggaaatcatagttgtgcgcttctgaacttcagccgcctcagcctcaaacttcttctgaaaaaattggctcgacacctccaactagatgcactccgcttttgataactctagtgggggacaggaaaactcatagaataatctgggagtggaggagaataatctcagattggttttgaatatttgtactggaagttggttgcattgtgggactcaaggtacgaagcttccttccaactacgagagctcttcctaggttctagcacaccttgaggctccacctccttttgcacgacaacctcttttcgctgcttctgacgagcagccaactcctggagagcttccttagctttcttcttgctctctctaccaaggttagaccctaacctttttttagtttttaaagacaagtccctcaacgtcttcttttttgtcttcctcatcaacatcaattggcaccttctacaaaggaaccactgaaagggtagttgttgtaattgctccttgagattgggtttccaccatgacctatgttggctaagattcaggaacagattcttgaatagaagcttccacaacaaccacagaagcctgagatctcggaacagatgccgaagcaggaacctgaggaacgacctcttacccttttgtcaaaggtgctagttccttagttcttgcccaggaacgacctcttacccttttggcagcttccgtagcctccgcagtcctgttggaaatgctccctatgaaattatttaggagacccatctggacagtttgaggattctgtgcaaaaaacatgaaagagttagtcacgcagaagcaatcaataaaaaatataccataaccaaatgaaaagctcaagtttggttctaaccattaacattattatacttggaatccccacaataaaatgaggagatatcctccctgcctaagaagctaccatactggaagaacccagtttacttcattaaaaggaatgggtctactctaacactctgcgtaggcgaaaggaaatgatttgtactcttgaccatctcatatatcctattgaggcatcgaatcatgagatatctatgatgatctaactccaagaagtatgggtcaaagccccttgatcaactcgattcaagtctgccagacttggatcacagattaaacggaagggagaattacctcttctagacgtacttgctcttagagtgcctccatccaaaaaaatcgccttaaagcaaacctcaagctctgtttcttcgctcatcgctccaaatgaagtcaggaccattcttccagccatctctggtttttttatggtttttcatgcttcatcaacaactatctctgtaataacctttttaagatctggagagtcaccatgaacgaagtatttgacgtgaaaggcatctatgctctgatgaggagcaagcaaacaaacttgcctaaggttggctgtagtaacaagcttttccacctacaagtattcaggaggaaagccctagtataaatcttgtctgacctccaagaaaggggtggctgttctagaaataaagaggcaaaatgatcctaattagagactaaaaagaaggatggggagaggaatcaaataagagcgtaagttcacttatttgcaatacaaaaatctaaagagagggttggaaccctcttcaacgggatacccatagtgaaaaactaattgtctcagaagtcgtgtgtgtgcctcatgaaactggttggatagatcaaagacttgaagtgcttctcaagctggtagaagactattttgctcttgttcttctacataggttgaggttttacttgataaaaatagaaaatctcttctagagtagggacctccatcttcttggcttttcaaagcacaaaccaacccgcaagcagcttttaaacttggggaatgaattggaaaggggaagtgcctactactgcaaataagttggcgacgtagctcttaagtagaaaatgggattccatctcaacataggcccaactccagacgtcgaagtcgtccgcacatttatagggtgactccctaaggacagagagcctattctagaacaaacttggaacactctggaggtgatggtttgtctcgtacttccagagattgtcataattccaaaaattatttgtgtactaatccatctcccaaggagaggaattgtacgcctctttgggagcagcaatttcttcctccaaaacttcaacttcctcgtgctggtcaacttttgccatggtagaagctggaaaagaataagaaagaaaacaaccaagcagttagacacccgtactaaagaagatagtagggacacgagtgagtcgtcccctaaaactacttggagaggtccacaccagaccttacacctagaagtaaacttctaaaagaatgttatatccatacgatcagaccgggaacacagagggccaatcgaaattacaaacaatgtatcaccccaaaccataagggtcctagacagaggaagaaattttagtcatccctattgctaaaatgtggatatttcaaatcaaatattcaaacaaaaagggcaaaattttgcagaacccagtcaagactacaaatgatatgtgcaaaatgtcctatttctacaaaacatttagaaccactccaaagcctaaaatcctattcatcaaaaattcaaggcaaacatgcaaagattgaaagagaattccaaaccctgacagtaattaaaattctagaaaggtaaaaggaacattactgaagaggagctggaaaaagacgaggaactcaaaaaaggccaaggagttggggatggaattctaactatactatcccgaaaatgagattatgtttagttaagcatattttattgaatatggaataatatgagtacttttggccataatgggtaagattataatcttactaagctaattgtgtaataattaggaattattataaggatgaataaataatagtaatttattaattacaaagattttattggaatatatgggtattatatataccatgttgagataatatatttttacgttcgacggccgtagaaacatgatagattggctaaggatgtcacaacgttaatagatggaatgttagttaaaccgagaagtatagttagtattgttttgctcggatgtttgaggtaagtggttatgaccattttacccctaactctagaggttacttagaagctaagtagggttaagtggtctttcccataaatttatttggtattgtctttagtgttttttctagagaagttgggctgggttgggatttatttttaattaattttattttagtttttcttgaagataaatcaaaacaccaaaaattacattttctctctccttcttcttctctcctagttcgaccctataagaaatcaagagccaagccaattttgccatttttttcttcagcttttcttcaaggaaaaatcagttaggaatcaactcagttggtaaagaagactaaggtaaacctacccattatttcctttctttgaattcttggtagaaagtttagtgttttagtgagttttgcatgattttggttttgtatgtttaagttattataagagcatgttcctaagcttgaattatcagttggtaagtggttttaaggcttgtgttgttgctgtttggttgggaattcaagtttgagttgatggaactcaagcttgaactcccatgatggttttgtaatgttgaggtgatttttggttctgagtgtttggacttgttctattgattttttaagactgatatgtgaagtttgtttgagtttggttaggtttggaaggagctgggttggtaaaactaggtttagccctttctgcagggaaaaatagttaaccgttttcccagggctaaacctagaaaacaacaaatcgtttggaaaaatggtgaaccatttggggtgttttccaactcctaggtttttgtgttttatcaatatttagggtattgtcatgttatttatcaatagagaaattttcgattttgagttcaagtcctagaatgggattaattgagttatttaccggtttactattgtcgtgacatagggcccgtgatcatcgagcattgttccactcaggttggcccgcacacctgagtttgaatttgaggtaaaaaaagtcaattgtaccgcattgcatggctagttgtgaaacggtaattaccgttaatacgaaagagttataactctattctaaaactgttgttaggtttcttacttatttattgtctcattaggcaatgatag

SEQ ID NO: 295960 - DNA, 5076 bp, Cannabis indica
accgacgccatagggggtacatatggcatcggttcatataaaccctttagcgtcgccctgatgagcgtcggtagcgaatttcacaaaaaccgacactgaaagggcttaaaaaccgtctctaaaggggatttttgtagtagtgttagttgtttttttaactaaagaaatggtttctcttcgaagttgcttgattttgatactatgaatctgaaaaacctattttagttgattgttactaagttgattttaggtaaaaatcttgactaatttaggcgattattacttgatttcttttgaattaggtaataattttaattataaatcaatcaagatacaatatttatttctgactaaaatacatctcaaaagtaatataaaatgaattcatataaacaattaccgtaagacttgatctcaaatcaagtctcaaaatctaagtcctttagatctttgtagccaagatcaccttgtttcttcatagctgaaattaaggagttacatttgaactctcttcaaacaatatggatcgacattccaccttcagcttctaaagatcttacgaacaatgacatgcaacaatacaaagatacatagaaaagatattgccctgacaaagcaagaatcactagaagattctatcaaagatgaagagagagttagttagaaaacagttaaccatcagattatatactaataactctcttaactaatcttaatagctcatcaatcgtgagaagacaactctccataattatttgccaaataattctgacctgtcaagaataaccaaaacaacaactaagaacaatataaattggatgcatctaacagctagttagatgattgacaaacataatttgccatacttagcaactggttcttacagaatccattgactagtgtgagtatgctcgcttctgagcttctccattttgggagatttggagtctagcaggtccatgtctccattgtcgatatgagaatattagcctggaattatcgtggcctcggtaatactaaggcgattcgtcggttggcagatctaaatcgagaacattctccaaaagttcttactctttccaaaactcgattagatgagaagaaattttttaaggtaatatcccaactttatttttatgactatgcttattgtcccccaattaatctctcttggggctttggtctatgttgagaaattgaggtaaaatgctctatcaagaatatttctaaaaatttgatcattcaaactgtctaatcagatcctctagaaaattcatggcatatttttgcctcttatggacctcccctgggcagtaataaggaaatattctagaataatgtggagaatctttgtctagaatcttccaatctaattattttaattggaaatttgaatggtaccttaagagttgatgaatgtattaactattccaacttgggcaacacttctcggtattattttgatcttcgtcgcatggtgaatcaggtgggattgattgatctcagttttttaggtccaaaagttacttggtgcaagaatactagaggacaagggtcgtccccttctttaaaaataactcaactggatagagcactagcttcaatggactggcgaatgctccttccccatgctattgtgaagcacttagtctccacagtttcagaccacaaacctattcttttggatactacaggtggaattagaggcaatggctcctttaaatataaaaatatgtgggctcgtgaccaaacatgctactgggtggtgaaacaagcttgggttggacatcttcattgagatcccatgcttaatttcaccaaaaattgaggaaaactaaagtggctttatccaaatggaataagcatcatttttttggatgtctctaagccagtgcaggttgctaaggaaaatctgttgaatgtgaaattgaagatcaatttaataggtctgatattgagcttgctaaagcgcatctcgatgaagctttacttaaagaagagatacattggaggcaaaaatccaaagtctcatggcttcaacatgggaataggtgctcaaaatttattatggcatctactgttataagatgtcgtaggaatcttatctaatttttcaaagatgctgatagaaggtggataaatttttcttaggaaataaacttcctatttttagaaaggttctccagtactttgaagagacaagccaatcatacacctattccctcaggattgtcctttccttatactctttcagattgatgatgaaattcggaagtccatcaactttatgggttgtgataaggcccttggccaaggtaggatgcatgtcgcgttttacatcaaccattggaaggaagttggagctagtgttgttgagattgttagacatttttccagttttatcacttgtcttctttcatcaatgacactagcagttccatactaaggatttccattagtttaatacactactgacttgttttattcatatcgtataatcttaattctcttgtacatccttacaagattatacattctccatatgaacaagaaatttttagatatttattaatttatatttacatttcatatattctctaatatattacccactaattacttacttttagggtataaatcccaacaatagagtcgctacaccaactatttaattgactgtgttttaagaagaatgcatgtttggaagacaaaattcctatctaaggttgggcacatttatttgattcaacctgtgggctcctcgctggctaactatgtcttatcctctgatgccatcctgagctttaccacgaagaagattgatcaagctctgagaaacttttggtggggagacgaactaggtaaaagaaaattacattcgattgcttggcatatcctatgttagccaaaagttgaaaaaggtcttaggctgaagaaaattgaaaccatgaacaaatcctttcttgtcaagtgggaatagaaggtctcgattgacaacaattgcttgtggagtaaaattatgaaggaaaaatacctaaatatgtcgactttcttcatctgcaaatcaaaaatttcgattctttactttgaaagtctattctaagatgcaatgaattactctctaaaggtatttgtaggaatattggcaatgacaattcctcatcaatctggtttcatcattaggtgtcgaatggggaactgatgccaattctgagactcaatggaacctttaggagtaatatgatatgtgacttcattgagaatcatcaatggaatgtcgagaaagtttgccattggtttctttcgaaggatgcgaagagaattctccatatagtgcatcctacttttgatcaagaagaaccgtggttgtggattgctgaaacttctggaagttctctataaagtcaatgtgtaaaatcattcgacattagtcggtccatcattcctccattttgatggaacctcattggaaatggattttggggctcgtatgaataatcagtacaaaaaattttggtggcagattcttagtgatgttctccttacccgatccaagcttagcaactgctttgatatttcctcgacaacttaccccttctacgattcgcgtgagaaaacttctatacattttctttgggattgttcttttgctttaactttatagtttggttgctcttggggtattcacactaatagatgcaaaagttaatagttggtaggagtggcttgaggtttttaaatccaatttcgtttcattttccccactggaatttttatcaatttctttatagtgttgctattatatttgaaaccgtctagagtattatgtatgacataattcatggagggtcttcccagccattctcagtaatcattgagcgtataaacatctaatttaatgagattactattgaggcagattcgcattccacttccaggcctgcttgggttcctcctacgcatggttggttggtgtgaatactgatattactattggcaaagagaattcctttagggctgcatttttttagatgtcaatgaaggtgttgttggtgctttctccaataaataaaatcataaaaaaccctttaaaaggggagcttattgctctaattcttgcggctgagcaagctggtgttcaaaaatttaaaaatattatcttttatagtgactcgtctcccattgttaaagcaattcaagagatggacatgcaagagattaatttcttcatttttgagttggttaaggtagtcactctgaagcttgattgttgtgaaattatttggatacctcaaatctataattctttggctcataatattgctcagtgggctaagaggaatgaatttgaaggaatgataagtgttgataatttggctacgactgcttggaggaaccttgggatggaggttgattgttaccatccactgatctaatgctcttgttctatcttggtttgttctgttgttgttttattttctggcttttgtgttctttttgtttcttgttgttggcccaagactttgcctttttatttgttatttgtaacatatatgaactttgttttttaattttatctatggctgcctcctattggaggtttactttactaaaaaaaaaaaagaaatcgacttttgcagcactcctaataaagcttaagaataattagcatttttgtctcttaaattttttacactaccaagttgcgtcctctatgctctattattattactatcggtttttaagattgatgcctatgctactgacacaaaatgaaatataataggcgtaagtccttaatagtcggcattacaattatgcgaccctttaaaatcaacatgataaaaaaaaactcaaatctaagatacatctaatcaaaaacaacaacaatccaaaaattacaatctcacaacaaacgtcaacaataacataatacaataataataagatatgagatgaaccactgcctcaccatcgcaccaccaccaccacgtgcttgagtgtgatagtcagtagtcccgtgatccgtaaggagaaatacgggtaagttgtgcaatcccacatcgcctggggaag

SEQ ID NO: 295961 - DNA, 11264 bp, Cannabis indica
ttagaatttattttatattttctatatttttttaacagttctgtttaaatttgacgaatttatttattattcaaatttgtgtgggggttggggttggaagattattacaaacttagattgaaaatgaaaccaggtgcttcattctatttcatattgactcaacacgctcctagcaatctctgatagtctttatttcttccaatcgtacagcctacatgatgttagttaaattaaattttattttctttttatgacattatccgagagtttattacttgagtttcaagcatgccgtgcatctggaggaggagctttgggaaagaattaagttgggtagcttctgtggttgaaaaatgttaaagagttaaattttttgtttttattattttttttgaggacaacttcggagatgataggataagttgaataataattatgaatcttttgtttttgggtttgtgtggttttaagttttattttccacctcttacatgttttattttgactcataaacgcaagttttcttagcaagaaaagtaatacatattgtacgcttaagcattgtcaatttactttatttttatcctcaagtgattgcatattgagtgatgaaattgattgtgcatatttatgtggatctgtaatatttttcatcacatgcagaaattttcttgatcactctgaatatggacatgcaatgtcagacgtcattgtgcgaaatgttactgctgataggtacatatgaatatgcaagtacaatttttctatatatatatttatatataaacatatgcatatatcgtttttctagatgactgtttggaacctgatttgaaagcttaggtagaactaacaatatttgcgcacccttgatttgctgaaagaaattaacactagaagaaatattgaaaatatgatacttacagtcttatcaaataatgttgtgattatacatttatggttgcttggctgttgcatatttcaaggtgcatatcagatgcaaacaattttttatttatttatgtaaaagaatgatggtattggtacctaagagacagaggatgccagaaaaatgaattatgaattataggagtctgagatccttcattctttgtttttcccatttgattgttttctttggaggatgatcaagtgggcatacacattagtaaattatatgcttttatgcatactggtaaagtaaaggaaacatatgcaatgaaatttactgtcttaaagtcttactttgcttgctgttcatatgtttccttggaatgttgtcaggtgtatactagatggtgaaatgttggtctgggacacatctttaaatcgctttgctgagtttggttcaaatcaagaaataggtcttcctttactttttgattcatactagcacttatgctacccttttcgtcatcataggagttggcaagaatatactctcagccttggtcttttgttgtggttttggcgagtagcggcattagtcattcgctttgaacatcgatgatggaaatgcgggctttcattatgtagtcttagtcgagttttatggcggctagccaatatttcccttttcgtcatcagatcaatcgaatttcacgacgggtagctaaggcgtctcgtttcatacataatcaattggtcacacactcactcaacaggaggcaccagaggaagttagtctctttacaagagagcttaaaacacatttagccggagtcctacatacattttcggtgaatgttcttgaatccatgcataagaatcattactgggaattgaatgtgagaatctctggtgcctcctgctatcgtgtgtgcgatacaatgatagaattcgtctgaaaatggacaccttggctactctttgcgaaacttggttaatccgacgacgccgtggggaaaccttggctagttaccacaaaactcagttgagatgttgtagtgaaagtattcgtgtagctacttgctgacgccgttgcaaaggaccagggccgagagtatattcctccaaactcctccaatgatagaagataccatgtactatttacataaatattgcttctttacagccaaggcagcaagggaagggtttgatagtgatcgacaggtttctttccgttattctatgtttacaaaacttcaaggttaaacctgttataattaattcttataattgttacttttctttgaatgcagttatgttgtatcctcaacgtatgagttattgaggatcttactctactttcattgttaaatgtgtatatgaggtggactgtatgataaaagaatacttatactagtctttttgggaccttgacatgagtatgactagatgttgcatttgatattctttatgtcggcgatactagtgtaattcatcagagcttgaaggaacgacacgagcttcttcaaaagattgtaaagcccttgaagggtcgccttgaattcttagtacctaatggtggaactcattatcctcctggtaaaggaaatctgtttatactattaagtccaatggtccatttatatgttatttaacctctatatacaagtgttatttcatttctataaaatatatgtttttaaataagttgatatccttttcagtagatatatgtttggtagattgtccacacataatagcaaagatttcctatgaacaacagaaacaaagaaagtcctttcgtatgctctcttctctttcctctttttgagagatggccatgcacacgaggggattccacgacccttttggtcatggattgcaccaaaaccccctggttttaggaagaaaaaaggtcactagcccactggttctagctggaaaattgtttttggtccttttgtggactagggactccataaatattggagcctttgaattgaatacaaggtgtttatgttcactttgtcaagggacgatggctcagttagaatatgtgaaagagctagacattttggatacaaaatttcagtaatcattgatgcagtggattggatgatcaacactatggaggaactgatgaagaaagacgggcaccaaaggctttgtttcaaaaggtcctttaggaacaactctgggagtttcatggagtggtttactaactaacattaagggagcttttttgaaactttttgttttgaaggataacaagatgaacatggtgattataccagaagatgaaaaggcaaatagttggtcaaaccttctagattgtctcaacggggtgatgaagaggaattctagtacgtctcatggcatcaaggggcagcagaataagaaggttaatggagggggtacatcgaaacaaaacttgtgggctgacgtagtcaaacaatcgactaaaccagtcccaaagtgtaagcataagaaggagaaaacaatggtgttctttccaaagattaaccttgccttcaaaccaaaaaccaattcccgacaaagagattcaatttgccaaagttattcgaagacatgcactctaaggggcaaccaagagacttgaggacagcaaggatccttacaagggataacactcatgcgacttgcaatgtgatattttataatatatcaagggagttggaaagtggcttgaggtcagtggtcagtcaatttttttgacgatagattaattatttggtgtagagatgggaacgaaagggatgaacagactaatatccaaagtatggcagtcccaggggctcaatctgaagtaactttttctcaatggagttgggatcttcaaagaaaagatattaagatcgaatgtcgtggctcttggattggtgttcaaggtttacccttgaatctttgtgatgtgagaacgttcaggaaaatcggtgctctttgtggcgggttacttgatgtggacaaagacactcttaaatcaaatgctctttcccatcttagactccaattaatgggcgatgaatatggttttgtccctgaatcactagctttataacatgaagactttgttattgatcataagctatttaaacttaatgatctaagttataagttccatggatactttaacacatgttgttatcaagatagtgtattggcaaaggaacaaaggatcaatggagaagtagaaaccattacaagtgagatggtgaagtgttggaggttgtgaatgaaggagagaggcgtgaagaagggcccccagtcgtggtcggtagtgaaacaaagatatcgacttaaataaattcccaagtgtctctagaaatcagggaggagtcggtgctggagcctggaggaagggcggctatttcatatagagagtcagacaattgaggaggctggcgttcttgttgctggaccggatttagaggagcatttactgtttgtagatgagatttttacttttaagaatgatagctgacctactatttatgattcactggtaaaaacgttctccaaaacagagacacgagaagtaaggaaggcggttagtcttcagtctattttcaagctgctattaaatagttttaatgtcccacatgtggtaaaaaatcttgagatgagtgcctttcgaaatattattggcacgtgtgtgcccgcaataaaggaaaacttaaatctaatgggcccgaatttggtaggccagagttttcttggtcacattaatactcttttgagtttaacaaatctgaaggtgggttgtgaaaattctttaatgggtcagatatttatacgttggactaattactatattggcccagaatttcaatcttaggaattctaacttaaaacttgcgagtagattgaacttggagggcatgatggaaaggaaggtgttagaagacatgactcctaaaaaaaaaaaggaacgagaacaggttttacaagaattcttcgaaggattgcttaaaactgttcgtccaaagatgcgtatcaatttcaaaagagcaattattaatttttgggaagagtttgagtttaaaggcaaggtgcaatctaatccaactcagtactgcatgtctctgaagatgatataacaaatgaagagaaaccaattagtgaacacaagctaatagtatatacaaggaaaaggaaagccataagccttgagagtgtagcgttgtcgaaaactctagaggagattcttacacatgaaggcgaggaagaagatgaccccataggtgaagaaattcttgattttagctctgatagtgattgctcagaagcagtagatgtggatttggaggaagaagacacaaaagaaaatgatgaaatcttgtgtaatatcaatgaactttggaaggagccaggtgatagaagggaatcagagccaggtagttcttcgcagcctcaatttgtgcatgctttggcggatctgggtatggagataattctcaatgaagaattaacttgtcagaggatggcaaaagacaagttaggaaggaaaagttgtagagaattaaaaaacctagcttttaacataaactatgataaaagtcagaaaaagaggggctttggagaaggaattaatgaagatactttcccggagttttagagggagtggaaataaggagaagatgaaagcaataaaggcgacgatttgtaaggtgaatccggatatggtgattctacaagaattgaaaaaggaaaatgtagacaaaaacttcattggaagtatttggaggtcttgttctaaagctcggatactcatcccagctattggaaggttgggaggtacttgtttaatttggggcacaaggagcatcacggttttggactctttagttggtgaattttttatttcaatcttgatataggctgaaggtaaaaagccgtggtgtatctcgggtgtttaagtgggatgagatggctggccttagcttaatttctggggagacatggtgtttaagtagggatttcaatgtggtgaggagagtccaagagaagctgagtagtagctcttatactaagagcatgaagatgtttgacgaagacaaagtgaaaagagcagtttttagttgtgattgcaacaaggtaccaagacccgatggtttcaatttggcttctttttagaagaattgggaggtcttgtaagataaattaatgcaaaatttccaatgtcttcgagaaggatggacgaattttaggaagtgttgatgaaactaacatttgcttaattccaaaaaagtttaacaattgtcaagttgaggattttagacagatcaacctcattacaagtgtctacaagatcgtagctaaagtccttgcctacagactcagggggttttaagtgaaacaattttggaaactcaatcggccattgtggaggaccgacagatacttggttcggtgttggttgccaatgaaacagtgcaggactacaaaagtagatgcatgagttggttggttttataaatagattttgaaaaggcgtatgatcggttagaaagattttctagacttgattatgttaaacaagtgctttggtgaaacatggagaaaatggattagatgatgtatatcatcgacatcattctctatattcattaacggtagaccaagaggaaactttaaaggctctaggggccttagacaaagtgatcctctctcacctttccatttcaatttggtagcagacgtcctttggaggatggtgatcaaggtagcaagcttaggtaacttctctggttttatagttgggaaaaagaagattcaagttactcatttacacttagcagatgatactcttttctcgtgaatgatgagacatctctttagaagtcgttttggttagttgaagcattttctgctatttcttggttaaaagtcaacttaaactagagccagtcgttgggactttgcatggttgagggggtagttgcacaatgtgcttctctagttggttgcgaagtgggaagtaggccactgaagtatttaggtatgcctttgggggacttgggggactcacctaggaaatggggtttttgggaactgatcttagacaagtgtgctaagaggctggagggatagaaattctcattcttatcaaggggaggtaggctaaccctcatccaatcagttcttgcttcacttctcacatattttgtgtctctttaaagtaccaaagagagttatcaatactctggagaaaatgactagagatttcttatgggaaggaggtgatttaggaggtgaacacttggtggcttgggaggaagtatggagacctcgtgaggaagggggtttgggtactgagagattggaagtaagaaatagagtaatgctaatgtaatggttgtggcgttttccactagaacccaactcgttatggcacaaggtgattgcgagtcgatacagagaggcagacaataggtgggattcaaacaaaggagtacgcttgtcttctaaggggccttggtgagatatttctgatctatatgaaacattcctggaattggtacattttaaagtgggaagaggggataggattcgcttttgggaagatgtatagatggggaactcatctttgaaaaatgtttatccagatttagctagaatttaagtggagaaaaatggtagcatataagagtttgtagtggatgaggggatggttggcggttttgttgagaattgggactttaaattcagaaggaatttgttggatagggaagttcctagtcttatatcaatgctacagcagctagagcatgtgaaagtgaccagtgtggtggatgattgtagaatttgaaaccagatcaagtaggtgtcttttcttgtaaatcagcttttaggtggttcacttcaaatctgctccatagtgggttggaatggactaagattttgtggaaaaacagtgttccttcgaaagtgaaaatgtttggctggttagtggcgttgggcaaaattagtgttcatgatagagtgcaaaagagaggtcttatcgttccatctcttctggctggtgtgtctgctgtaaaagaagtggagaagacgtggtgcatctgtttatggactgtccttttatccgcaatttatggtttaaattgctagaggaatttggtttggtttggtttgggtcctctcgggttctgtccaacaaatgataacaagtaagttggttggctgcagacgtaagacaaagctttggagaacagcgattttggcaacatttcaggctgttcggttggaaagaaatgctagggtatttgacgattctgaaagttcagatgtggtgatcctttgggataaaattaaattttggacagccacttgggtttataaatccaaacactttgaggaactttccttcttagacctgacgagggaatggaaaacactgttgtaaaggaacaatttctgtgatgtttctgtttttgggttgtgtgctttgtttttggttgtcatttttagtgtatttctcgctaaaacgtatgtaaccacggttttcctccgtcacaaatgagagccctcaacatataacggggcaggggccagtctaagacatgtggtctctttctctttataaaaaaaaaagcaaagatttcctatgccctagcatccgactcaattttggattgactaagttctaaatgtaatgacttagtttgggctgggagtttgctgtgtagttaatcaattagatgtttccatatttttcgacctaatcttatgatttctggtgtgttgacaatatgatacatggcattttaaaaaaatatttcttatgatttgacaaacaaatatatgtttagaatactttgtaagtaggttggatcttacctttgctagttttgtaggtgaagcttgttggtcgcgcattgctcataatgtggatgatgttgagagatttttcaaggaaaccattgaaaataggtaagcatcatgctgaatttgttatatttctatgcttgagtgtctaagcaatctattcacatttgtcatcataaagatttaagatcctaaagaccttaatatcataaatatcattgcgatcaacatgtacaactgtgcgtgaaaagattcttttttatctgttctatttcatataaatttcattttaacattgtagctggtatttcatgcggattaaagtttctgtagtgttatttttgtcattgacaaatgaatacatgctatttttagggactaaacaatatactcaactcgtgtcaaaaaaaaaaaaacttgctgctttatataattttgttttacaatgcttaccaaagctagccctatgctcaattttggcctttttttaatgaccattttaatacttgtaaatagttagcataaggtgcggtgcatgaatgagcgtttgagcaaaggttgactttgataggtttaaagtggtattttcttttcattgaaacttaaacaatctctttgtttattcaaaatagttgcagaggaggtagtggattcatgtcctcagaaaatcttttaaattggtccagacactccaaatagtgattttatttttgatttcacactttgtagtgtaagctgattccagttttccaataaaataccataattgaatgaaatcatgactacttatttgtcaatgatacttaaaattatgagtcacatgaaattcaatgtcaccattatttgcctgcttgatttgtttgaataatatgtcctttatatttttaaagagacgaagggattgttctaaaggatcttggctctaaatgggaacctagtgatcgaagtggaaagtggttgaaattgaagcctgattatgttcgtgctggttcggatctggacgttcttattgtaggtttgtaatttgcttcaccatgtataaatcgaagaaacttatatatattcaagaatctcgaagtgtttgtgtaattgttttttttttcgtttgtgtaattgttattaggaggatattatggttctggacgtcgtggaggagaggtaaattttcttttcatatttcatatatatatatatttgattgggccatggtttactaagaaaatacaatcttagtgtaggtagctcaattcttggttggccttgcagaacgtcctgccccaaatacacatccaaggcggtaagtaatttgaatttattgaagctaacttgtctgcagtaggattttcttttagtttaggctgtatgggacatcattgcttatataaagaataaattttattgtgatgcttacgtcacaaccacggtgcactatatctctctctctctctccctctcttttatgtttaaaaacactaggtacatattttatgaatgaaaaaaagcagaattttattatcatcctttttgatataacccccagtgatatacagctccataatatagagaaataacatgggtccttaatagtttggagatgaaaataacttaatttattggtcctttgaccacggttttgtgtgtattttcttttggttgctgcattttagtgtaatttttgctaatattatgtaaccacggttttcctccgccacaagtgagagtttttcactacataacagggaggagctagtctaagacatgtctaagacaagtggcccctctctctttctcaaaaaaaaattatgggtcctttaattgttgtgtttaccatggaatattctgatttattaatgaggcaaatggacatcacttcaatagattcttgtttgatagtaaggtgggaggcagtaagcacaggtcttgttcatggagaacagcaatcatggctgtgttgtgggctgtttggttagaaagaaataatagaatttttgaagtatctgaaagtttagtagaggatttgtgggaaagaattagatttttgacagccactttggtgtacaagactagacattttgaacacttgtcattcttagacttaagtagagaatggagaactttgatgtaatttttcaattaggactaatgttagtgctgttttttcactttgtgtccggtcttgcttttgtgcttgttttagtatgttttatgctaaaactcatgtatccacggttttcctctgccacaagtgagagggccttcaatatattaatgggtaggagccagtctaagataatggcctctgtttctttttcaaaaaaaaaaaagatcaatagattctgaaatggtttgcatatatttgttagcattagtatgatatcacctcgctatgaatggtgattggcgaaaaaattgttaccaactgttagatattagatgtatattagctgtaagagaattagatatttagcagatatttagtagatatttagtagatatttagtctcctaactctgtatataaatatgtat

SEQ ID NO: 295962 - DNA, 2186 bp, Cannabis indica
tatgtaaaactatatgtggtattaacttttatggacacttaaatatataatattttagtataaatttaagtataacatagtattatataaaaatatgatatataatccaattcaatataatacaatacaatacaatacgacctaatacggtattccaaacgagcccttaatcatatattttatatataaaaataaactttttaatgttgcggatcatcaatgtgtatttagctcaattccattaagcaggtgattcatggctatgcaacatagtgaaaagtgagtaaactcttattttatttgttgaaaatggcctttatttgatacacacaatcacagaattttaaggtatattggtgcttaggccagctacaaacacagaaccaaaaacatccatttcatacttctccaaaaccaaacctacctcaacaccaccatttccatctctacactccgccattgaaatagatccattacttaaagataccacagacaccttctttggccttccccatccaaaatctatgccataaaacccgaatttcggtgaccctgctactccaacaaagtaagaaatttcagactgttttgaagtcatctttaacaacaattcctcgtctttcttaaaatccttttctttcccaagttcttttactaaaccactcgtcttcgccaccacactagtcaacgaatcttcttcgctaccatgcatttgctccctcatgtcgtcactgaacttggatctcacgcagttgccgaagtaattttccggtaccggtggtgtcaaacggttcctgtaatcagctacgaatcctaaaataactttccttttactttcatcaccttctgtagctttgatgatgcaatagaagacgtaagcgtaggtaagaacaaaagaagataactgaagctctggttttgaactatcccaattagacgataccctttgccggagtttatcaatatcggagcggcttagttcgacagtggctcggtataagtcggagggtcctcccgagcttggaaattgatagagctcatacagttttgagttgtttctacaatctgaggaagttgatccaggattcccaatccaataattcaagaacttcatgtcaaacccagatggatcttttataacagttctgtcataaaaaggagtgagctctggcaacaatggaggattctgtttagataagtaagcccaggacttgaaaaacatcatcgatgatttcccatctagaacggcgtgatgggctgtgatgccaatagaaaatccgcgattaggaaaaacagtgatttgaagggctattaccgaagcccctgtttcagaaacatgcaaagaagaaacgagaggactaagcaaggaggaagggaaagcattgtttgaggtgaggaggtcaaagtcagcatcggactcggcgatggagactgaaacgacgtcgcctggtgtgtaaagaacgagtggtttgggagaatcttgaggccaagttagttttccggctagaggtagaaagtagtggagtgtgagagagagagagtgtttgaggtttgggagaacagagttgaagaaagtgtttttggtttctgcgagagaatagaagaaaacacgtttcactggaaaaaatctaaaccaaaaggtatcgaagtatgttaagggtagagaaaagtgtttcttggattcgggtgaggccgtaaacggagggacatggcaaacttgaagcattttggtcgagtaaggtaaagccatggcagaacactcaaaattctattatgaaatgaaagtgataaacgtgtcacacgtatatatatcttatatttttaaagacaaatatacccttaatatggtatatcttatactcttagctattacctcttatgtcaagtcaaacgttataagtattacttttacttttttgggaataaaacaaaatgtaagtgagtgaaagtattcctctcaacaacttaaagtatttactatgttggtaggtagagagaaaagtctcaccacgtcttgtgtcaagttaaacatatcaaaatattatttttgctcttttgagaagaaaacaaaaagtaagagagagaaagtattcttctcaacttaaagaatttgctattttgatatagacaaaagtagcggtgaaaatcggtcggttacgatttttattttacgaaaatcgtaactg

SEQ ID NO: 295963 - DNA, 8472 bp, Cannabis indica
aaacattatgctgattaaaaatacaatctgacaaaaaacaagactctctagcaagacaatgagcagccctatttgcagccctatgagcacttggtatttggtaagcatatctggtaaaagtttattctatctttcaagaattgactgttacatgtacataaatatatatattttacataaattctgattctttaaagagattgaaaatgcttaagtaaatggtttctatttggtaaaagtaaaataaacaaaaacaatattcttactgtgtaaattaatagattgaattgtatacagacatacagtgataacaatagtcacaataatggtattaccaattgacactctactatattactacttgacttttaattatgtcaaaaacaaataattgacttatgaaatccatgtaactaatagaaaaatattgcataagtgctttcaaagtgtacctataaattaaataaaaagggagatttcaattttctttttaagtgaaaagcattttttttagaataaaataaggggaagaactagagaataataagataattattatgcttctagaaacaaagtatgatattcttacatagtaatatataaatatacatactaggcgtaacagttaaaacttatggattatattttaatataccaataaatttactaaatttcaattattaagaaaaacaactataacaatatgtagtaacagattaagaacctgtcatacgccaatttatagaatcaaaatagaaaaactatacagaatgtaaaaatttgacacaagagaatcatacgtggtattaatgtcctttcaaacactcttggtccacggggtaataaaatcaattagtaaagtctcaaacaattacaaaatacaattgacttaaatatgtttagactccctttaaagctttgtcgcaatcctttataatttactttattaatctgatttcagaacaccaccaaatagtgaaatcccttcgtcttttgatgcgtgactgcttacttcctcccgaaataaggctttgacaagtcttcgcccgaagacccttctcttgttcaataaagttcttcaacctattctaagaataatataagaacaataaccaaagactaaaacctagttgaatactttaagttttcacaaaagaaattctctcctcacaaagataaaagtataaaaaatgaagctaatagaggtgaggatgtttggatgctctctaggtcctatttatagattatagaaactctagagatagccataaacatattttcacagttgtacaaaactttctaaaataattcctaatttgtagcgacaagattggaatcggtagtggtaaattggaccgaaatagaaaactttccaaataggtccaagattatgattgagaatttatttcctatcataaaaaattatttgatttactataaatatggcaaaacaaaattttgtgaagaaatgaaattctgctacagaggagccttcatctctgtaatggtccctacattagcagctgtcagcatctcttccattctccttgatttgggatctctcaatgattgtaccgttggaattgtaatcattaggaaatcattgttttgggaatattccatttttctgttaagattttatttgacagctgtacactctgtgtatcagcagccctgtatttgtaattctaacccttttgggatttgtctatataaaggaatgatatcactcaaccgaaatcaagctgagattcacaaatccatatttgcctaaatttcaagttggtatcagagtcgtacaaccatgtcaaacgactcccaaaaccctggaaataatgcacctgctcaacctacagctgctactgcagcatccaccgttcttggtgctagctcaaccaacactcagcttcacagtcctgttcctcaccacttcagcaccttgaatcaaccattctccttgaaattagacagacacaactatagcctatggaaaactatggtatccaccattgttagaggccatcggttggatggttacctaaatggaactaacatatgtcttcctgaatttgttgatgcaggtaccatcatggaaagcatagatggtgaagtctcacaagttgtcaaccctgcttatgagaaatggatcataaacgaccagctattgatgggctggctctacagttccatgactgaaaccatagccacaaaggttatgggcgttgctactgctgcagccttgtggaaagctcttgtgcaactgtatggtgcacactcaaaatcgaagatggatgagacaaggactctaatccaagtgacaagaaaaggaactactccaatgacagaataccttcggcagaagaaaaattgggcagatcttttggccttagcaggtgagccatatcccgaatcccaacttattactaatgttctctctggccttgatgtcagctacctctccatcgttctacaaatcgaagccagaccaaagacaacttggcaagagctccaggagcttcttctcagctttgacagtaaaatagagagacttcaggccatgtcctcaagcaacaaaatcacaaacaacccgctagatccacaagctaattttgcccagaaacctcacaccagtggacaaggaagaggctcaaaccagtatccacagcaatatggaggccaaggtggaagacacaacaatagaggaagtggaaatagagcctgtggcagaggcagatttgggggcagatctagtggttcgaaacctacttgccaagtgtgtggcaagtatggtcattcagtagctgtgtgttacaatcgttttgatgagcactacatgggatccgaccccaacagtggaaatcaaaacaagaacagcaaccattctgcatttgttgccacaccagaagtcttggaaagtgatgcttggtttgttgacagtggtgccagcaatcacatcacatccgactcatcctccatgactcacaaacaagactatggtggtaaggagaaggtcaccattggtaatggtactcaactatctatttctcatcttggcaatggtttattaaaaattaacacaaggaaatgtctactgttaaaagaaatgcttcttgtccctgagatatctaaaaacttgctgagtgtttccaaacttactcttgataatgatgtgctcatagaattttactctgattgttgtgttgtgaaggacaaactaacaaagagggatctacttcgcgggatgcttaaggatggcctctatcaactccaaataccaagttcaaagtcggcttctaaagttcaaggttctgtcgtgtcaaataagagtagaaactttccttttactggtgttgctgttaagtctaaacatactgtaaatcattctagaactgatcgtttatccatttccaaaagtgttgtttggcacatgagtttaggccatccatcacagaaagttttaaatcaagtcttgaatacatgtcatgttaagattcccaaaaatgaaattaaccacttttgtgatgcgtgtcaatttggaaaatcccatgctctcccatataaaacatccaatagcaaggctcaacacattcttgatttggttcacagtgacttatggggaccttccccaattatgtcacataatggatataaatattatatacatttcattgatgattgcactcggttcacatggatttatccattaaaaaccaaatctgaagctagtgatgccttcctacaatttaaagcctttgttgaaaaccaatttgagaggaaaattaaaaggcttaggactgatgggggaggtgaataccaagcccttcttgacactgtaaccacttgtggaattaatttccatcatccttgtccccacacttcgcctcaaaatggtagagccgaacgaaaacatagacacatagtcgaaatgggccttactctcttagctcaagctcaaatgcccctcaaatattggtcggaagcatttcaaacttctgtatacctcataaatcgtcttcccacacctgtgttggaacacaagtcaccatttgaagtcatatactctaagaaacccgactatgccttccttaaaacatttggagtaacttgttttccatgcataagaccctaccaagcacacaaattttaattccattcgcttaaatgtgtcaacttaggctatagtgagtctcataagggctacaaatgtctcactccaactggcaaaatttacatctcacgaaatgttgtgttcaatgaactcaaattccccttcaaatctggttttttaaacaattaccaatcgaaaaaacctgttattattcagagttcatcttggtctgttcttccatcatttaatttgcctacaggtgcttctccaacagcaacacaatccttaagtgcacctgaagcagatccctcaacatcaacacactctcaggtacattcttttgattccacttattttaatcactcaccagcagcttcacaaactgcctcagcttctggcagtgagaggggaaataatatctcaggtttatctacaccagttctacttgatcctgctgctttaaattttgagcaggttgttacagaagaaacttcacctcgaactggtataaattctcctcagcctactcctcctgcaccagctatcggtcatcccatgatcacgcgagccaaagatggaattttcaaacctcgagtattcatgggttaatctaaatggcagcctcatttctctgtaccagacaatgtagaagaagcacttgctcatcccgaatggaacaaggatatgaacaccgaaaatacagctctgaaaaataacaagacttgggatctggtcttgccttctccacaccagaatctgattggaaacaaatggatttttcgtcacaaattcaatgctgatggtacacatcaacgctgcaaagctcgtttagttgccaaaggatttcaccaaagaccaggcatagtctttggtgaaactttcagtcccgtgataaagccatctactatgagaatcgtattgactatagctgtaacttatggctgggaaataagacaattggatatcaataatgcctttttaaatggcacacttgaagaggatgtctacatgctacaaccgaaaggctttgaagaaaaaggtaatgaacactatgtgtgtaaactcaacaagtccttatatggactgaaacaagctccaagagcttggtttgacaagttgaaagtcaccttgatcagttggaattttaaaaattccaaatctgacacctctctgttcttctatggtcaaggaaccaacatcatcatcatattgatatatgttgatgatatatagtgactggaaacaacagcaacaagttaaaagatttcatcacagctctcaatcaaaaattcactctcaaggatctcggacctctacactattcttgggaattgaagttttcagagatgaaattggcctatacttgactcaatctaaatatattgaagatttgttgaaaagaacaaagttcaccaacttgaagccgtgctcaacacctgcaactgcaggaaaaccaatgtcactaacagatggtgaactgctctcaaatcccagtgaatacagaagcataataggaggacttcaatatctatgtcatacaaggccagacatttcgtacgctgtcaacaaactcagtcaattcttgaaatctcccactactgctcattggagtggagccaaaagggtactgagatatctcaaaggaacaatcaacaaaggattccacatcagctatgatgaacctctaagtatcactggttactcggatgtagattgggcttgctgccctgacgacagacgatcagttgtcggatattgtgtattctttggtaacactctagtctcttggtcctccaagaaacaagcggttgtagcaaggtcaagtatagagtcggaatatcgtgctttggcacatgttgcagttgagatatcatggatcgaatcgttgctgaaggagatcaaattccaaacaccaacagctgtaacctggtgtgataacatgggagcaagtgcccttgcttcgaaccctgtttttcatgcccgaaccaaacatatcgaagttgacatacacttcattcgagacaaggttctgaacaaggaattagacattagatatgtgccttcatcggataaagtggctaactgtttgacaaaaggattgccaaactcaagatttcattttcttatcaacaaacttgggatggcaagttcacccctgcgtttgagaggggatgtgaagaaatgaaattctactacagaggagccttcatctctgtaatggtccctacattagcagctgtcagcatctcctccattctccttgatttgggatctctcaatgattgtaccgttggaattgtaatcatttggaaatcattgttttgggaatattccctttttctgttaagattttatttgacagctgtacactctgtgtatcagcagccctgtatttgtaattctaacccttttgggatttgtctatataaaggaatgatatcactcaaccgaaatcaagctgagattcacaaatccatatttgcctaaatttcaagtaatttaacaattagaataagggaaagtcaaattttccaaaaatagataactttccataaagaaaattcgttctcttgtaaacaagttttttaaacaaaaaataccaactgtaaataaaattttccttaaagaaaaagtgcaatcaaagtcaagaattaacacaagaaaattaatttaattgcacaataaactttaaataatattttgacaactaaatttctaaaaaaatgatctaacaatctcctcctttggcactttagataatcaaaatatattttaactttaaaatacatgcaaaacaaaggtagcaaaatcacaaaaatacactccccctgaaaagcacaccattagcacaaaataaaatactaactctaacacaaaataccaaactcaactccccttagaaaaatggtctaaagttaagtatacaatccaaaaaattaaactatattactcttcctttttgtttatctttaagggccaaagacataatatgataagcaaggttcaaccacaatccaacaattgaaaaaaaaaagaacgaagtaagagaaagagaactaagcttggggctcataaaaataaaccaatgaggacaatttcttagacatttcttattgaaccccctccatagcagcctcggtgtcgaccagcttccttgttcaaccaaggttctttgttttggtcatggtgaattctgaaaaacaaagtaaaaaataaagaagagagaaatagagaagagagagcttgggctaatgaagtgtgttatcccgttttttccacctgacgtggcatgtctacctggctaacatcagtaccaagtggcaatacagctcaccaacaagaaggccaagccatctactcagtactccaaccaaggaggagtccaagtactcaagcaaaacgatgaagtgacaaactatccacctcaaagggtgatttgtgcgcttgatacctttcgaggtgatttgtgttggatacatcccgaagtaagcggtgatgtctctaaaataagggtgtaatggcagcactgcccctgctaaatatggcgctccgaccacgccatcaaattaagggccaactggtgcgctcgtcggtccttcaacggcacctcacattggacgcctctcaccaatccactcttgcgtatcctatcaagaaccctagcagtgataatagaaggaggagagacccaacgatttccctgtgccccagcatcgagagactgaggctccgaagcctgtacaaagacatgttctacaccgattaccgaaggcggaccaagcctgctcaatgtctgactgtcatcatcatatgatccgagagggttgttggagaatacagtacaagtcctgtacgtcctcctcctagcaggcatagcctcctccaccttggactcattgttcagactctcagcaccatggttagccacatgtgcctttgcgtggccgacctctgtatctttaccatcaagaggttgtgtctcctcccccactataccaaccctgcccattgtttccaacctggcaatgtaagggttaagaggtggtgctctacggtaagtcttcttagttttaaccaaaatgtatcaatatcagcccagagatcactcagaaagttgctagggaacagactggatgctagcttacaaaagtaaatctgactcgacttataacaatgtggttgtcaactccccagatcactacttaaaatcacttgcatagaagagacaaggggaggtgagcaacctgacaaagctacaaggtatagacaaaattctggccagttgtaccggccagtcgtacccaagggtacttgttaggttttatgccctaaataaaactccatttcaatgtaatctattttat

SEQ ID NO: 295964 - DNA, 1482 bp, Cannabis indica
ctctccttataaaagaaatggatgtagcatagatagaggtgtcaaagttgagtacaataaatttttaaaaccgtttccaaaaaaaaaaaaaaccccaactctatgtcccttctttcttatcctagctacttctcttctttattttcagctgcatatagtactagtctgggcataacaatacagttcctctcttgattgaggtatggatatatcataatccatataatcatgatatcatggactatactattacactattcactcatccattatgttagtgctagcttatcatctttgaatatcaaagtatatatatatatgtgtgtgtatatgtagtgttgaccaaagtactatttagtagtggtgtgttcaattatgtagtgtacatttttcaattatgtacattagttcaatggattgaagcattttttgcctttcttgaaactatttctagtgttgtatgatgtggtgaggtgtcaacactaccactttctctcttcttctatatataatatccatcctcgtcttaataaactggaaaacatagataccaacatcatatatattgccttgtatatattgtatgtgtacatataataatcaggatttatgatttagtagctatatatataatcagctagatttctaccatatacataatatcttcctcaacaaaaaaaaaatacattaattatacccttttgttttcatctcttctcttgttatctaaattcatgtcattttcagaaatggcttaacgaaaatataatattaatgaactaataagcatatttatatgtttatatatatgagcactctcgttcatcatagtgtgtgaaaatataattaataattatatatatgtaataatgtcaagattgcaatgtgttttaattttgcactgtttctcttaaaatgcatgacagcatagtaatttaagaccaaattaatgttttactaatctgttttaatttgtatatatataggtaccgatcaatacatattttaattacataatataattaaatgaacagtaatagtatgacatcattggcgaggacaaagtcggatcaattggtggagaaggtgacggcggcgttcaaatctccgccattaccgccgacgacgtcgtcctcaaacgacgcggcggcggagagcggaggaactctgtcacgaaaatcgagccgagggagaatggtgatgggagcttccccggggaggagtggaaatagcaaaaataatagtaacactcacatcagaaagtctaggagcgcccagctcaagttcgacctggatgaggtcagcagcggcgccgctctcagccgagcctccagcgccagcttaggcttgtctttttccttcaccggcttcactatgcctcctgatgatatagccgattctaagccctttagcgacgatgatatccgtacgtttttctttctttttcccatttttctttattctcaaataataatatttttt

SEQ ID NO: 295965 - DNA, 3285 bp, Cannabis indica
tccaaggaaaatggtaattttaccaaaaattctcaaaaatgacccgaagtggattcaacaaatatatcaactacttcatacttgataaaagcaaaaaattcattaagggatcaagaattcaagaccctattcaaaagaagacttcaaaagctcaaagtcaaaagtctacccaaaagtcaaagtcaactctcagggaaaagttaactttggatcataacatgcaaattaagctacgaaactcatctacataaggactacacacaatcaaatagtataagtttactttagtcttgttaaagtgatttgcacaatacactaaggtttataagttcaaattttggcccactaacttgtgtgacaagttttctcacccaatggtttaaaaaaaaatttgattgactttctaaatcacatatcattttacttggacttttcgccacttccaggaatccggttaaccggttcccaaaaggttaaccggttcacctgaaaccagtttaccagttggcaaccagtttgcccaatggcagtctcgtttttcgcgtccaatagctataaacggctatttttctccctaacactatatgaactcaattttcatcaaaaattcaagttgactgagtatttatatcatatacctaacatattcaagtgagtttaatgagcccccaagtctaaaatccaacaaatacttttcacacactttgagttaaaatttgtatttaattcttttaagtgtgcttgctaatcactctaggtttctataagcaatctaatgtgtaaatgcatgagtgtacaatgggtagatacacggagctaagatttttgctgatttagatcatgtgtttcttgttagcccacgatacttcagattagtttatttctttcaaaatcaaaaagtttctacttctttagattgcttatatcttaacttttcatcttcaaatgatataaatcagaaatattgaaagctaattaccctcttttcctcagtgtctatactaatgaaacacagcaagtctctcataaaacataatcttaaattcatactaaagcatgttcaaacactccattttgaatataataagcttgtttaaggaagaccaatgtattgacctctactaccctgctcctaattcacttttttattggtttctcgatataataacatctctcattctcttgtattatgtctaataaacactaatcagtttattaatattcgtagtgccacacttttcagtttatttagttttcagctttatacccttatatatacaatatacaatgtatattctagcctaaacttctacattcctacatatgaggttaactctttacatatttcagtttgcttattatatatgcagttcagtgatcttggtatggcttaaaatgaaattaaagagtgttatacctcttgttgttatttggactttaagccaagaacatacagccaagcagactaagctacatcataatgatattaagagctaaaagattccaaatctaaaagctagtaacatcactgacatgtaccataaacgaagaatcaattatagaaataaataggcatcatacaagttttacctcaagtttgtggctggcactagaaacattagttagtgtcactgaaccctggaccacaaatacgaacctagagatacaaaatatgtacaacaggagatcgaaaagaaaaaagttataaatcctgacaaaactattcacaaaccaggaatattattaggcaaatgacaataaaaagagagataacatacctctcaacatcgtgagcagggagcccagattgtgaattttctgcaaaggtgaagtaagtatgataaccaacaataaaatttcaacaacagcctaaactagaatgccatataatataatcaacgaaccttgcatctttgcgaggtacataacgaaatgtgagccaatggctggtgtaataagataagctgctaatgtatttaccctgcagaaacattttggattattgttattagatcaacagagagaaataatgtttttgtaatccaacagaaaaatggagtcaaacataccactctggtaaagggctgaagacctgactttcaggtgttattaaagcatggtctcttttgtaaacactgcgcgtgaaccctggcaagtctgcccaataagacagaatcaaaattaatgaatttttaatttctcttcttcagctttattgcaaggacaagtgttacaatacaaagtcatagctcacataactcatcttttgtcttccaaaatcaacagtcatcagcaccagaccatatggtacaattattaatctctattttgatcgttaatttcaacttgatactcatcattttgtattatgttattgcttattttgaattatgttactcccaatatggctctaatccgtgaaatttctatacatcagcattagatactcgaatctggaagtcgtgaagagaaaaatatcgaaattttatgttaactaaccttgtagatgagaaggagaaagagtgggattcgtaaccttccaatacaaatgcttggagtaagaagaggagctgataacagaaggcgcagagcaaaacccatcatcactcgcaaccaaatcaagcagacctgaaaacaaaatttcaagaaaaaaacaatgaatctccttaaaagctatttacttttcaattttttttttaattttctgaggaaacaaacaaacagaaaagagaagagtcccccgtacataaagtgatggttagaaggatgagagaggcttgcattgggtaccgcattgggagtggaagtgtatgggaatggtgtgacttgtgagagagatgggatcatgggatgggagtggtgttgtttagtttgtaaagtaatcggaagaagttgaattgaagtggagtggagtcagagtcagactcagttgagtcacagtgtcatcgaggaagacgccaaaaacatgagttggccactcctcctttttgtagtgtttaatttgtagccacttttaaatgatgtggagtttattaatattcgtagtgccacacttttcagtttattatcctaggataaaaattaaggtggcgtttggtaacaattttttaattagttttctgtttttaaaagtggaaaagtgaaaatattttttaaaaacatgttctataaaactgtttttacttttcaattttataattagaaatcaaaattttaaaaacaaaaaaaaatcactttcaatctttttttaaacagttttttttcttaattaatcttttggattac

SEQ ID NO: 295966 - DNA, 4764 bp, Cannabis indica
ttagaaaaaaaaaaaaaaaagtagtttcatttttggtaccctttttcaccctaatggtgaccaactatttttcttttttgctgaataaaatggtaaccaactatttaatgttgccaaatatgtgtgtgtcaaaacataagcaaagcagtactccccattgaaattgctcaaggagaaaatgttaaagacctcaagctcaagccttaaatattcaatatatttttactctctttacatgctcaaacaaatacctaaatataaaatataaaatccaatattactaaaaaagaagaagaaaaaagttacaagaaaacataaaatcctccaaaaactgataaaaacaaaccttcatttaattctaggctgaaacaaaagatgtcatgtgtatgtaactatgtattgaatgtaatagtaagctatatagtttcagtaaaaacttcagaagctagctagggctagctgtacctatttatttattttgttagaagcgattatggagaaatactaaaagtcacaacacctaaattgtcatatttcgggtttcacataatttaatttaataactattatatgaatattattattaagtaccaatcttctccagcatcaccaataagtggtatattgtaattggattgcaatattatataaaaaaattatattaaattatatgaaatttgatacttaattatattaataacaatttaatattttaaaaaatattaagtattactggtactttttatcctttctcctattatatattgataattatttacaaaagatcatctttagataagacactgttgatgatttatagcaactcaaaagatcatgtaactgcatgcatgcagtataattcatcatatatagagaagtcgatcacaataaaatggtaagaaaacgataaatatgatcgtggaaggaatattggttcatggcaaagaaaagtggatcattgactgactgattgtttttattagttttagttaattaacgttatcagattaattaagtaataatcaaaaaaatatttattttattaaataatttttggtaagaaataaagtgacatcacaaccaactcgccagctcaactcggcacgatcggttggaagtgaagtgtgtgacggtttggtgtgtgagtcctcacctatagacacaaaactgggtgacccttaaggtccaaacccaaatcacatacttacaccttatatacactttcaaggaagtattcctttctcacgtggaactcaatgcactattacacacttcacttttcatatattttgtaaaatattaactaaaattccaacgaattcattacacactacaaattaatgtactaatatgtacccacttatatggagaaatttacacaatatatcaaaatagactttttctttataactttttgaacatctttttatttattttattacggttttgtgttgtttcaatgttgtttttatgttatcgcaacattatattatttttgtaatgtgaaaacaacgtgtaaataacgatttttttagaataacgtataacagtgtgtaaaaatataaaaaaaaaatctcaaaatttgtaaaaacataaatattttattattgtttttggatatttctgaaacaatctcattaattatatatgacattaacagttgctcaatgtttggtgttgccttatagaatcaaagaataaccatatataatgaccctaaaatccttaaaccctaaaccatcaacatacatattatacatctagctaactgataaataagagacagtgaaggccattgctctgcattgaggaagtgaatatatatacattgaccaaatcccaaaaagaaacagataaaaggacaacacatgggatgtttatgtataatatatagtgtttgtatgtgtagtgggggccataatcatagctctctcatcacatcttaaatatatctattggatcttcaaatttatgttgaatataatttggatttgacaagtcattctgatgatgatcatttgcactactatactaatatatttcttcctatttatatgggaaacttacaaatttttaaccttagtactaaacagagccatgttaaggatgaagaatgtttcaattataaagattatagaatttttgtcagaagtgttgatcagttgattaattgattgcattaatcttatttaggtcattttatggtatatatatatagtattttaggagattgtattgggtatatttttagtttattatgattagttaattcatgattatataaatggtattaagtttataaatatgagattcctctctaatttcctaagacaacaactactattattacatattgcgacaacttttggacttcatcaaacaataggacatatatacactactactataaatatatgatttatttttgggatttttataaaaaaaaatatatatatatatatatatataataaaaaactaaaaatacaaatttgtataggcctaacaccgaagacatagctttgcttgcggagctgaaaagtcgaagacttatgtcttcagttatttaggaataactgaagacataggcctgtgtctttagttatttggaataaccgaagatgtagttcgttatatatttttcgctgaaccattttccttcagactttcttttcaccttttctcttctactaaaaaaaaaaagcctctcaaacacttaaaaattcgccgtcgttggactactatttttgctattcttagccgtttttgttacaatttgtgataagatgaatgatgttttatctcaaaactaattggtaatgggaggagtagctcattcatcttatatatgataatttatttccacacatgactaactctaatacaccctcctcacgtctgggcttagaaaatgtggatataacaaacgacatttaagagaccacaggactgaacgtgacatttgaaagaattccacaaggccaaatatcaagggagacaacatctttttagaccagcagcactttaactcacaacggatcacaaacgaatttttggacaagtggcactttgggctcacaacgtatcacaagtggctctgataccagaatttgggataagagatgaatgagattccaactcaaaatcaattggcaatgggaggagtagctcattcatcttgtatattataatgtatttccacacataagtaatgtgagactaactctaatagttttctaccattttttctttcgaaatcttatttctatgacctatagtcgcatttaaagtaccaataataatttttttagggctttgatgttaaaataaaacgttagtacggtagtatatatttctatcagaaaatggtatttttaattattttgtgattttgattagttttgcatagatgtatatatttaacatgtatatgtattatgttatttttatatttttaaattttgacatagactttttaggaaattaatggttgcggtcggtgctagtggtgacctcaaaccttgaggtatgtattttaatttttatgttttatttatttatttattgaaaataattgatatagtgatattttaaatattaatttttttgatataggatttatttgaattttaatttttttttaatatgaatcaactttcattaatcaaagtccttcaaaagtaagaacaatatataataggaactattgaattcttactaatgtacaattaattttaaaataaaagtctctgatcagaaaatgagctactctatttacagattgtttaacaaatacaacatacacattacataaaactgacaataatagtttggactggtcaactaaaatgtcatatgagaaagcatatgaattttactattgatagcattaataacatttaggcaatctaacttccccacgacattgtgacattcttgtattttgatccaactcagagcatctttgattctcaccactttagcaatatttgcatgaacaacccatagtttacttgctaagattgcttaaatgaaagtcccatcatgatcccttgccacaataccataggggaagcttttattttgtgcaaacatagctctatcaacattaactttgatcatatataagttcggtttagtcaactgctccactctttcttcgtttgatgaattgtgagaaaaaatattgacttgacttgagtagatttccattagtatacgtgtattgtatatacatttttactgtttagtatagaattatttttctgtacataaattgtgtatatgtgtagtgtattgtatttgtatttatatttatatgtatgtgtttatgtatacaatatgtatttagtgtaatgacaatgataatactggtaaattagttccattttagtattgtgtaattgttttgattatattttggaatgacaattgttatttgtattttttaccaaaatacgtggcaattagagaatagaccacacgttcacatgattcacgtgagcacatggatgattaattaatataataaatatttagtattctcttcaagtcacaaagagcgtttgagagtgtacgattggccccaaaggagatccgaagccaaagtccaatgttaccctccgagaagatgcaagcctccctgatcacatagcatctgggaatagcccatgtgttcaacatggttaccaaggaaaaatgttgtaggtgactgcgtcaacacaggtaaatagtaaaaaggcaaatagtagaccgaatatcactt

SEQ ID NO: 295967 - DNA, 7151 bp, Cannabis indica
gggtccaggtctgggtctagatcctggcctgggtcttggtttcgagtccagattgaagattgtggttgactccgaatcctttgtaaatattataatacaaactaaatagggactatctgttatgtattaaataatacaacttacattgtattaaaaaaattcgtcgtaagaattaatacaatacaatgctttattcaaacatagtgttatatattatttaatacaatactacccttatacggcctaccaaacaaaccctaataattttgattttaattttatatgacgattcatattatattatgcatcttactagttttttgtaaaaattaaaatcattgatgttaatactaggggcatttattggaccacatctaatgtttttatgcctattagatctgattcaattatatattcgatgataaattttaccatccaattcaatcaaattaattttgatcatctaatcgatccaacatccattggatgttggattagatcggttctatccattagatatatttcgtatatatttattagtttaatttaggtttatctaatatttcagacctaattttttagattggatcagatccatcaaatattttagatctagtatgtattggattggattagatctatccaattcaagaaaaaaagagtaaaattttaatgttagtttttataaatacatatagaatttacttaaaataatataaaatataattactcatttaaactaaatgaaaatactaattaatttgattgtatgttagatgtattggatgtttggacaccctatctacaatctgatctgatctaattgactatttaaaaataatattccattcgattcgatcataattagatatctaatatatgacagtcgattataattatatcggtcgattttcattaaattggatcgattcatgtacacccatttaccacattttaataaaactatgtatcaacagttattagacttataactatcaaaagaatgcacccatagtcccttttcatggtactactacactacttccaacgaattgtccaatagtatatgcttctatataccaagaacaattgaaaataaagcttaccatcaacataaaacaaaaggataaatgctctagcatattcgatttcattgacttaactggattggtcctttcctcaatggcatttcggtaattatgattaaacatagtgatttgtcatttcaaatagttgttttgcaaaacagtccctctttatttcgagccttttctcgagccctctctttctctctctgtttttcttcttctgaaatgctgacccgtcctctgtgccactgcaagagaaaagagtagagtagtagtaatagtatcatcatcatcatctttatggactctgtaatactaaaacccacgttcgattctttcagtttcaactcttccactcctaagaccaaacccctcagcacaagacattgttctttcttcagattccctcacaaggtcagaacctcaacctcgtttatctctgtctcttacagactatcctctactccttcaaattacttcacatacgactatctcttgaagcctctgagtaccatcttcgtcccaatacttcaaagcataaaaacctcacttttcgctcgaactcaaagatgggtttcgtctacacaagctttccgtgattcgttgaaggttgtagacgataacggcgtcaagtacttgcagagcaatgggcttgggatagctctgttgagtgttactacgaatgccaaggttaagattagtcccgttgtggcccaattggctgcgaacccaactttcgtttcgggattgtttgcttggttctttgctcaatcgactaaggttttgctgaactttttcgtcgaaaagaaatgggatttgaagatttttttcgcttcgggcgggatgccctcgtctcattcggccctgtgcacggctctctcgacctcggtggctctctgtcatggcgtagcagattcgttatttccggtttgcttagggttcagtctgattgttatgtacgacgccattggagttcgtcgacatgctggtatgcaagctgaggtaggaatttttgtgttgttatatactgcgtttgtttttgtactgttacattgtatagcagcattttatgtttttgatattgaaacatatattgttgtccccactttttctgacaagaaaacatatgaaatgtggggaattttccaaaccaagagtttcatttatgaagatgtcaagtaggtattaatgttaggcgtagttagcgttaggagtaggtgagattcgtgagagtccatttcatatgatgaaagtagtacttaaaaatttgttatattggaacaccaaattgagctttttatgtgataattagttggattggaattaattcttctaagtgtctgaaatttggtcaattcatatttgctagattaaagttccataacactcgtatgatgctattgctaggaataggagttcaaagtactggttagaatttttaagttttcagagtttggagtcattcctttttgtatgcaaaattccctaatctttattttggcttattttttcaactataattatagttcccgaagatggtagtgtttgaatatggcttttagttgtaatttcagaacatccagaatatatctttttaatcataatctctacatatattcacgtatttccaagacatgtaacttacattgaatgagtatgaatctttacattcttgaaattcttcttctactgttcatgaactgaactctggataaagtgactaaagttatattatatatatacagaaaaatatcttgtcaatttgcaaactctttgcatatgttagttttatccccctctttcattcttacacttacaatctatctatgaatgtattcaggtacttaacatgattgtagaggatttgtttcaagggcatcccatcagccaaagaaagctaaaagagcttcttggccatactctatctcaggtccttgccggagccgtgctcgggattgtggtagcctgtgtttgttgtcagggaagcatggttgcagcgtagtgcagcttttctagccagaaaattttgccagaatcatcaattgatgatcacacactcaccttgctataaaatgtacttgctaatgctatattatgctctaatgaagaattggtcagctgaaaatgaagataggcaactcttttgtcatagtcaaattcaagcgccaatcaagctatctcaaatcaaacaatgaagaatctgcataaattatttgtactcattttattcaaattcaaattccaattcttctctggggatttgttatgcgttatttttgcgttttgtaatgtcacagattgagaatcaatttataagctcgtggttattgcaacgaataaaagcttattaaaagttctaatttgctaaatgtagctgacagtgtacaaatttgcaaaatacatcaagttatatttaagtgaaagagaaaatcattttcaagaaatattgaaaaaaagcttagaaacaacttctcttttgaggtttgaaacgacaagtcgtttggtgaggccctcaaaagtcccagattaaatggtcaggaatctgcgtcagccatggtcagtagatgcacacgcgtcagatttgagattacggcatgtgataagttcaaatagaggtgactgagagttgagacttgagactccttttgtcttataaggctaaatatagtattacaactcgtagaaaaattcactggctcaaaagttgaccattttaagaaaaacttattcatggttttctagaatttcatcttttggatatgggtagcaaaatctccaaaagagaccgagccaattcgagagacaaatccaaacagccatctgggtcggaggattatactcttcttgcttctaagacaccatgtgagtttcagttcagacaaaccaaaaccaacatctgggaatgctctcctacctctaatcatttatataactgatgtttaatttccttagtttttgtcataattaaatctagttctaagtgaaatataagatcacaacagaagcaatatgttatgtatatgacatggtttgacttttagccattttgtgtaatgcataataaagatataatgatcttgatcttggtattgtacaatgttgtaagactgaaatgtttgaatctgactgtttttcttgtttggcagttactgtaagcgagatccaagccttatatgaactgtttatgaaagtaagtagctcagttgtcaaagatggacttatacacaaggtatgcttttctctttactgttataacaattattaatccaattgagtaagtggtatttggttttataatgattatggattatctttctttgcatcattgaactaatctatgcttttatatgattattaggaagaacttcagcttgcacttttccagagtaatgataagaggaaccttttcttagacagggtatgccactccgatatttgcaaaattgattatttaagttctgttattatgcattttccataaaagggttatagatttctatcaactgaaattttgagtgaatgtattgctctctacagtgttcattattgtccatagtttgaagtgagtgtcaattgttctctcttaatgtgattaagcttcaaaaccgcttccatagcctgctacacctaacttttgtgttctgtcacacttggtagacatttgatatttattttttctttggcagatatttaatctatttgatgtcaaccgcaatgggtgtatagagtttggagaatttgttcaaaccttaagtatttttcacccaaaaacttcagaagctgtcaagactaagtgtaagaaatgtgttcaaataatgaatactgaatccaaattcaagtttactgcaatgtgctttttaatgcaactaaccactaaaaggagtccaaatatgtatgttgcagatgcatttaaattatacgatctcaggcacactggttacatcgaacgcgaagaggtaagtcatacattgctgctaactcttttggaatgatataatgccttttttcttttaatggtcctgaaaaatcactataacaataccttctaactagatttacttgaccaatgtgttactgtattctcattcaacagtaacgtttcttcaactagtcaattagctattaaaatcctttggttattggaaaacagttgaaggagatggtgcaggctctcttgaaggaatctgatctgaacctatcagaagatgttgttaaaatgattgtagacaaggtatatcattagaaattgattcttataaacacttctcagtttttctggtttcggtgctcatccttcatgccttatcaaacagacattcgcagaagcagattcgaaaggagatggtaggattgatgaggaagaatggaaggagtatgtagagaagaatccttctttactcaaaaacatgactctcccatacttaatgtatgtctcaatttactacatttaatcatcccaaattgagcaaaatgtgacactttcttttggacttgacttagttatctgcttcttcagggacatatctctagcatttcctagctttgtgttcaactctaaggttaaggagtccgagctgtagcctcgaaaattcgtgatggtgaattcatccttgtgaagattgacacagcgtgaagcaacttagtcatgtaccgaaaatctggctggtgaataaatgtaagtcgagacaaaaaccagttccaaacgtgagagtttcaaagtaagctggcaaaagcgttgagtgggacaatgttcaaagacttccaagatagaaatctaggccctttgcggtatggcgttcatcaatgttcgtagttgctttgttgaattgtaatatgttgtctgtagattttatttgctttgaaggttttgtttcaaaatttgtacctaaagacgttcttttattgaataacaatacaatagtgaacatgctttgtttgttgtgctgaatctatttgcgatttcatgacaagtgtcgtagtgataactaattatgagccttatttttcttttctttaacagaatagaggattggaattgtttagtttgtggtcaaggattgtgaaagtgaggaggaatagttgggagagaagaagtggagaggttaagaagtctggaaatcaaaataaatagcattaattccttggaccgttcttagaaaaaaaaagcaaaaaagtctcttttaataataacatgaatggagaaaatcttgcattctttaacttagcatatgaatagttttttcttgcagcgaaagctttggaacactttttttctttcaaacatatttaattacggttatttttcttcctttcatttcagtttgaagcttttcgtttttgacttcgttgtgggtactcttttgaccttctagattgtatttgggaaattttgattttttatgctttccataattttaaaatttttccgctaaactcgtaatattttgatatttgtgggattttgacacatttttataatattcctaaaatacccctcatttacattaccccctctcttttcttctctctttatttcactacactatcgaccatcgggcccaccaacgggcccactatcaggcccatcatgcccatcggacccatcaagccatatcaaattctatttttttacacatgtaatcgggctccatcgagtccaccatcgggtccgattcggacccatcgggccatatcaaattctatttttttacacatgcatcgagccccatcgggcccactatcgggcccttgtcttcctcaattttttttgtgttaccatcggaccggcatcgggttgcatcgggcccgacgaaatcaaatcccaaacccagattttgtccaaatcacatccgacgaaaaaataaaaaaaaggttggtgagggtgagatggtgagaaaacaaccgagagagatagagaaagagagagagttgaggtttgaaaatgagatgggtatttttgggtttattgtaaagtggtcatattttttaaactttaaaatgtattagattaggggaaaaaaattaagctattttatgcatattttttcaaatttttcttgtatt

SEQ ID NO: 295968 - DNA, 2372 bp, Cannabis indica
caatccgcacaagtgcggatatccgcattttgcggattggattggattggatcgtgcggattggattggatcggatactttgtgaacacccctattgggaacccacgggtccaacaattccttgaagacatttgtgttcaaaagaaacccaagtttttgtttttaagtgaaactttatgtaaaaaaagaaattgtggaacgggtgaaagtccgtttgggctttgaaggttgtttctctgtgatgttattggtagaaaggagggcttgactttttttggccaaattctctgaggcccatttactcagctattcccaaaaccatataaatgttaaagtgaaaatttctggtagaaataaatggcgtctttctggtatttatggggaaccaaacagagcactccgtgatcacacatgggccctcattcgtactcgttatgcaaaatccactctcccatggtgtattattggtgattttaacaacatcaccaacaatactgacaaaaaggaggtcggccatatccatctgctctattttgggttttcaagctgcaatacgactgccatctcttggatttggattttgcaaggatatccttacacctgggaaagaagcttaggcacaagtaggagtgtggagattcgtcttgacagagcactaacttctccaagttggcttgctgaatttgtcgaggtaactcttactaatttgggtttctcttcatctgatcactctcctatttttcttgagctgaatcttcccatccccatgtcaatacttatcacttccgttattaaaatgcttggagtcgtgaaccattatgtgctcaaattgtggtagattactgggagaaaaatgggcagcaaaatattgttgataaaataaaaggttgcagtaaccatttggcagcctggggtcaaacgcttacaggaaatttcaaggtgagattgtctcgaagcaaacagaaaatggctgtgttaaagaattcagatgatgattttgatgctgacacttttgtggaggaaaagaataattattttgaaatattggctcagcaagaattatactggaaacaaatatctaaacaacattggttacattcgggtgataaaaacaatatatattttcatgctgtagctagtgcccgaaagagatcaaacaagattcaatatttgcaagacgaaaatggcagctggaagacttgggatgttcttgactatttctttgatctttttacaactaattcaagttcttggtctcatgttattggtaatgttcgaaattctgtcactgcctctcataatgaagaattgctacagcccattggtgatgatgaagtcaaaaatgccttgtttcaaatgcaccctgataaagcccctgggccagatggcatgggacccgggttctttcaacatcactggagtattgttggggctgatattattaatctggtaaaagaatttttctcaactggtgtcttgccttgcagtatcaatgacacaaacctttgcttgattcctaacaagaaaaatttctctattatgaatgaccttcgccctattgctctctgtaatgttatttacaagattatttcaaaggttcttgctaatagaatgagggagttcgttgatcaaattatctcggatacacaaagcacctttattccaggacggctcatctcagataatgtcatggttgctttcgaaattatgcactatctcaaacgtaaaaggaccgggaagaaaggtttcatggccctaaaacttgatatgagtaaggcatatgattgagtagaacggggatttcttagtgcaattatgtctcgaatggggtttgtagaaaagtgggttgatcttatcatgacttgtgtctcttcagtccaatacaagattgttcatggcggtcatagtctcgggcctattactccctcgagagggattcgacaaggcaatcctttgtctacttatctcttcattatctgtgcagaggggttgtcttctttaatccaacaatttgaagcaagaagagttatacaaggatgtcgtgtggctcaacgtgctccaacaattactcatatattttttgctgacgatagttatcttttctgtcaagcaacaaatggggctactgatggtgttcgttctcttttacaaatgtttgaagttgcttctggtcagaaggttaattgttctaaatcttcaatatttttcagccccaatactgacttatcaacttgatcacaaatatgttcagcattcaatatggctgaagctactgaaggcagtctctaccttggtctccccaatattattggtcaaaataaaaatactattcttggctttatcaagaacaaagtcatatctcgtatcaatag

SEQ ID NO: 295969 - DNA, 4681 bp, Cannabis indica
cattttaggtaaccttttcggttgatctagggtaactaaaagttactttagtttaatgatagcaataattgcatggcgtcttctgatgttaattgcatgtttctgtaagcatgatattttctacaactgaatgcaacttattttatttagttgagtccaaagtgtattctccttgcatggtcttgtgtgaatgcaatgtctcaatatcctttataaataatgcagtgaagaaatttactcaatgatcatacagtacccggtattaaagaaatatgcagcctctttctatttatttatttttcagtttttactgatgatggaactaattttaaattaaagaacttgggtgacatattctaagattaacatagagaaacttattggtgcatgcatagctatttctgttacaaggctaacattttctagtcatcctatggagcctttgtggtggacaagctgccattatattttgttgatgtatgacaagttttgttaatattggcagaaaatttatgccttgttctattcaactgtatagcatcggttattgggattccttctaatcctggtcattttgaggaagttggatgggtgatgagacatataaaaatagacatgcctgcagttatattgaaacatctggcatgtattagtgctcatgtatgtgtacatgtttgcatatgcatctatatttgtattatataggcacaccgaatcttgttttaacaaacttatctttttatttttaatgttggatgactaacagtttctctttttctttcccttcccttctgttaaggctgttgagatctcaagcaacgaatatgagccttcagaaagagacatattgtatgctgaaggggtcactcaaggaaatggtttagctttcattgaattctcattagatgatcgaagtccaatgtctgaaacatacacagacaatgtggatgctccttcgcaacctcaaactaagtaaatatacttgaactttctcttttatgtacacaaagctcctggcacacaaatttatttcacaaagctctctaattatctattctttgatgtagttgtctaaatactgatatagtaatacattactcataggatgttttagatcctttgttgcccggtagaattaggagcatgactttgttcatttttcctttgaacattataattaaccttattatctttattagtaagattcagtggaaatagtgcaaaaggaaaaagaaaaagaaattagtcacttgccacttatctcatggtctagtaatacaataataaggattaaaagattccattgttgatcaatgacttcggtacttacctactactcatcttaaaatagctagtctttggattagctggtaatcatgatcttgattttaactttacagctgtatcttgttttggcagatatcaactcataagggtaaacgcaaagggactgagcgaggggtgtaaatgggtggaaatgtttgaagatgtgcgcgtggttgtcttttgtgttgctctcagtgactatgatcagttttctcttgccccagagagtaatgggagtggcagcctacttcaaaacaagatgatgcaaagcaaggagctctttgaaactatggtcaggcacccatgtttcaaagataccccatttgtcttgatactgaataaatacgatctcttcgaagataaggttaatcgactccccttgagtacttgtgaatggttcaacgattttagtccagtacggcctcaccataacaaccagacactagcacatcaggcttatttctatattgcaatgaagttcaaagacctctatgcttccctcactgatcgtaagctcttcgtagggcaagctcgggctagggaccgaataactattgacgaggcattcaagtatataagggaggttcttaagtgggacgaagagaaggaggaaaactactatgggggagcagaggattccttctacagtacagatatgagctcctcaccatttgtaaggcaagaataatatgcttgtaagttgtaataataatcttactatgcaattttttttttaagacaacgagaaaagaatagaggtgaagatgcaacatacctaaagtgcctctgcccactggaataaggatattgatggggggcttttcgaagttgacttggtgtgagcatgtacattgtagaataggaaaaaatgttcgttaaattcttgaggaaattcgtattgagaggttgatttagtaaaatcatatttcaacttatttctcactttgacctttggtttggatggatgaaaagtttatttaattttttggcagcatgtcatgaaatagagtgtaaaaaagttggggttattctttagttcacctcttaaaagagttgtttcggtccactctttatttgaaagtattactataaattttccaaaatgttatttatttaatgatttttgcttgtgattcgttcctatcttgtgtccttatccgacgtatcatctaataatcacccacaacatttttttcttatttatttattttacattattttttttcaaaaaagatctattattataaatcaaaaagtcatttataacaacaagtgttgaagttgcgagctattgatgaacacaaaaccataaacagagagaggaagagagaagaagaaggaaagggaagaagattgaagaaagattcttattcattgaaatgaagtgttacaacttatataacaacactcaactaagatacaataacagaattctacaactaacttataacagaattaagcacgtgtttaacaacaccaactaactccaacaaacactaacagttctaactgtcttcaacacctcccctcaaactcataattgaacgatcttcaattttgagtttgtgtttaaattcagcacacctttgacttgatatagctttggttaacccatctgcaagctagtcataggaagagagatgcttaatctaaatagtctttttgaataccttttctctgatgaaatacaagtcaagttcaatgtgctttgtcctttgatggagcactgggttctgagttagcatgatggtgcttagattgtcacaccatatggtaggagtttgagatagttgtatccttagtttagagaacaagtattgtaaccaagtcaattctactgtaacactagcaacacttctgtattcagcttctgtgctcgatctagatatagtttgctgccttttgcttttccaagcaattctcgagccaaggaagatagcaaaccttgtggttgatcttctatcatctggatccgaggcccaatcaacatcacaataggccataagatccaaagttcctggtttttgcaagtgtaatccgtgatctgttgtgccacccacatatctcagtattcgtttgactgctgaccaatgtgtagacaaagatttttgcatgaactggcgaaccttgttcacactaaacgaaagttcaggccttgtgatagtcaggtattgcaaggctccaataattgacctatataattggacatcttccaagggttccccctagtaagcagataaacgaataccacttgtcattggagtgggagctggtttggcattgctcatttgggcctttgctaggagatcttttgcatactttgcttgagataggtgaagaccaacatctgtttgtgttacttcaatacctaggaagtatgtaaggggccctagatccttaagagaaaactccctgttaagggctgcaatgatggttttaactatgttgttatcacttcctgtaatcaatatatcatctgcataaactaggatgagagtaacagatgtagaagaatgttgaatatacatggaaagatcagatttggatgatatgaagccaagagatggacagttttgaagcttcacaaaccaagctcttggagcttggttcaggccatatatggccttgtgcagtttgcataccaagtctgtctttctagggacttcaaatcttggaggttgcaacatgtacacttcttgtaggtccccattgaggaaggcattattgacatctaattgtctaataagccaacctttggacaaggctaaggttaagacaatcctaatagtaacaagtttgactactggactaaaagtctcagtgaaatcaaacccatactcttgatgacaacccttagcaacaagcctggccttgtgtttgaggacagagccatttggattttcttttttcttgtacacccaatagccttccttcttggtggtaacctcacaagggtgtaggttttgtttctgaccaaggccaacacttcatcactcattgctttgttccaaacaagttgacttagagcttcttgaagagatgatggttctctggttactaaaatggcttttggcttgtgaatgccagacttggatctagtcttcatacggtgtgagttatgctggtcatgaggttgatggcatccgtgaataggatatgtgctggttgtcactgctggtgtgaccacagtactacctgatgcaggtctgttcacaccagaagggaactgatcaccaattacaataggaggctcagctatgatgggaatatgtgtgggcaaatgtgttggaaattattttaccaggatcttagatctactcacaagtatgttgactaacaccctaaatatgaactt

SEQ ID NO: 295970 - DNA, 2378 bp, Cannabis indica
ttttttattttttttgaattgacttgaataaatacataatcgaaagagtgtccataatcgaatggtccttgtagattttgaatgttttaaatttgaaaggatatgtgatagtcatttttaattataggctaatgaaaaaattgatatgcatttatattggttaatactatttgatatgacaaatataatttcattattccatgactcttatcaaaacattcgatagtagtatctatcaattaagcaagaacaaaagatgaaaatgaactaataatgttaatacttgagtcttgaaatataattaagattctaatgacaaagtagtacactaatactttataaaccaaaacaaaaagatcataattttcaataacaagctcaaaattcaaaatctgctaaaaggactcaaaatgcagaaagccccaataagcattttaatctctatttgatcaaaacttttctatgtttaatttactcaactaacttactttcttttattagctttgagctttgtttctcctccactcttcttcaacttcttctcctttctttctccaccttcgaccgctttgatagacgaatcatctgccttcttcttcatcttcttcacaattccatcttttgcctttgtcaatttcttcaaaggcttctctgcaacaacctcatcctccttaacttcatctcccttcttcctcttcttcttccccgaatcaccactgcccatgacatcattctcaacacctaattccacatcactatcaactacatcatcaccctcatcaatgccttcctcttcagcattaacatccatataccgaacttcatgaattcgacccttctttttcccaactttatcctccttaccaaccttcttatcgccttcttcttccttctcaaccttctcagccttgactccctcaatcttcaacctcatatcgggcaatgcctgatacacaggcaatgcaaccgattccaacagcttcaaatgaaaggatcttacattcccccatttcctaggcacaaactctacaatcccattaatggcagcaaccacattctccacaatatcatcagaactcatggaagatttcgcaacccttacaacacaacaagtcccggtccttaagaacaacaaagcagagctacacgccttctcaatctgttctttccaattcttgtgcttcaaatccacaggcacaggaatcttcttcttcttgaagaattgcttccctaaaagtctaggcaacaaagtaacaacacgtttatcggccaaaaacatgtcatacgaatcacaaagcttgcgctttgattcaaaggctttgtaatctgttttgagcttcgaaagctttataactttcgacacaggaatcccttcggccttaatctttttcatggtgtcgtctttggtaagaccagatttggagctgtcatcgataatgaggcagagctcagctgattcggaatataaggagtgagctagagggaccttgtaagcattgacacgctccttggctgggattttcttcaatgtcaatacaaggtagacgaattcgtcttcgtctaaaagctgaggcttttgagtatccgatttcgaaatcttccatttcagaagagcttttacagccttctctaccgttttgggactcactcttaggtttgtgtttgttgaagaaggaggaggaggagctgaatccaccatagccattgctgcagacaagagaataattagggtttagttatagtcttatgaatcaaagtcccaacctatcaaaatcaacttcaaactcaaagttgtttccaaaaacaataaatttctccaaaataacaacactatcgatgatcaatagacaatcctagatataccaaaacacaaagactggtttttgaaatcaatataaatataaagacaccatttttgagggagcttaaacacacaaagcaaagagtggtttttgtgtatagactataaaaagtgaaatacctttaagctatgccaccggagtgaagagaagacgccgagagggagagaggtagaagaagaagaagaaggacggctgggtagagtagagagagagaaaggtagactaaagtttagggtttttgtaaatttagggtttttcttttctttattagtttattgtattatttaggttaaagaggaaggcttgtgtattgtctatgctaaattagtcctaaattagtgttgtatattggaaattattttatttactgttttttaatttaagttgtagcattagttgccataaggattttttatgtagaattctataatacttttacagaaatctttatatattaaaagtgtctaacgacattttttggtttaacagaatatacttaaaaataaaagaatattc

SEQ ID NO: 295971 - DNA, 6583 bp, Cannabis indica
tctctctctctctctcttatctcgatctgttcgctcaaccaccagtcattcccaaccacggtcgccttcctcctcgtggccaccggtgcccaccacctcctataggtgtatatttaattatttattaaaattaatttataaatattttctatataattttaaacaaacacatacatacatacttatttagttaaagctaattaggatttttgcccctcaaactttatttaccaaatcatgctcccgaactattgagattgttggatttaaggacttttgtcaaattttagtaaaaaaagtctaacatggatgaaagttcatggggcatgatttagtacatgtcaaagttcgaggggcatgatttggtagatatcaaactttggaaagcatggttttggaaagcatggtttagtacataaacaatcattgaaatagtaaacttgaatgaaattagacaaaagtcctcaaatataacaaactcaatagtttaggcagaatttttaacggccaaaaaagtttaggggcatgatttggtacatgtaacagtttagggggcaaaaatcctaattcgcctttatttaacatatattttaaatttaatttagattaattatataatttttttagatttaggcattaataaaaattattttggtttagtttaattatttagttttagattaggtattttgaaaaatatttagtttagattatttgttgttatgtaataaaaaaattatattatttgttgttaggtaataaaaatatttagttttaattatattaattatttaaatttttaaaaatagtttttattaattatttagctattagtttgattttcctttttcattaaatcgttatggaaaattttatgtttggattattcattgttatttaaattgttattgaaacttttttttatatatattattgactttttaattagtcgttgccaaattttgccgagctcctctctttttggcggtatttcaagagaggctccttattatcggtaatatatatgtatttttagttcatacatatttatatatatatataagttgatagttgttgtaaaatttaaaatttcaatattaatgtttttattattttttaggtattgggttcttggtgttgattgaagagcgcaaaaatagcacctaactttattggagaaaagtattatcactaaaactttaaaagtttttatttagtggagtttgaaaatcttagatattcattgtagcgaagtagattctgcgattaattgtatactgcggttgggtggataatttttgtattattaatgttaatttgtttatattttgtactgttttgtatgcgttttgtttcttatttattgcatgtctgaaatttttgagagcatccgattacagttgttatgctgccgaaatttcgatagaattagaataattttcagtaaaatgcataaatattagattgtgataaaaatgcataagtatttttttatagcattataattttaataatgttcatgtttaattttttagtagaaaaaatatatgtaatgtaatttagttaaagaaaaaatttagtgtaaatagtttagaaaaaaaattagtattttattataacgttagtacagtttaggtaatgtttaattttaaattttaattttacaaaatttatctgatattggaataattaagttttttttttttttgtgttgatgtgtttgtaatatggtaggtttacaagtttaacgtgcttattcatcaatgtaattttagaatgtgcaggtatatcattaagccttttttttttttggagcaatactagacgatatttgaagttgaggtcttaagattaaagagtgtatttcattttttcattttgtaaatacttttttgcttcatagttggtgatgatagaatcagaaatgtgtataaaattttgtaagcctaaactagtacactatatattgtaattacatttgtgttattaataaatttttatttatgctcgatttgtttgacgattatgattattgttggataaatctccatactaactgtctctcataaggaaataccttaaacaagttacaaagaaaataaagtaagattttttacaagcctcaacagaccattataactctaggagtagtcggttctgtttcacaggctaaaattttataagctctttacaatacaaaaaataaataacaacattcaatactccaacaaactatcaataactcaagcaaaacaaataacagttttttgtaactatttcttaaccgattttttgctcaactcaatacaacatcacacacaacaacaacaatataaaaggggatcaacttgcccatttttgagagagcttcggtccagccctagagagttgctgcaaccccttttgtgaagaaataattctcagtttcatgagaggaaaacaagagagagttagagacataagtgttgtattatcaaagcaaaaaacatagagaaaagagagaaaaacttgagattacctgttgtactttggctaggaatctctaacccccttgtaactggttttcacatggatagtgaaagatcaagcatctttgagggaagcttgacggagacgtacctctaatttttagagagggaactccgaaatcaatctctttgtcttcttgctcttaatttttttgcttgttattttcgggttacacttctagcacaaccaacaaagatcattttagatctttgttgctactagttatgtgttgtttattttgtgtacaggatcggctagagaaggaagaagaaaggtgtggctgaatgaggattaaaggtgtggctactagggtttgaagagaagaatatatagaagctgggagagaatgggtttcgactgctagggttatgggagaaaataaaagtgagctactagggtttttttttttttagcaatataagaggtttatatactgccaaaaaggcagtgttttgatgtgtattcttttgatctgcacaagagaaggaaaggtcaagtttgagcttggtttttgtgactttgggagttgttggggtaggagggcatttcgggtgtattgtccatttcctacattaattatgatataaacaaatacataaaatttaaaattattaaaattttaaaataataaaaaaaatgggatattatatactataggtgacagtttaaaaatgttgcctataaaaggtaataggcgaaagtttataaccgtgcctaatactataaggcacagttataaactgtcgtatactttatcataggggacgaatttaaaccgtcgggaatgataaaataacaacggtttcgaatcatcaccaatttttttcattttacgacagtcgaatagacgacggttatagaaatcaactggaatacttttcccaactatttaaaactattgggaaaaactattttttagtgcattgaaggatcgacaactccagaaattgttgaagtcatggacatcaaagaatttaagctctcagctggatcaaacaccatatctaattgctttggtggtggttcaaagtgatctgaagcttggttcatgtggtgtcgttgtttcgggcaatcattgaagattgtcgtcaactttttcattctttaaattatgtgttgttattttttattagctaatatggttgtacattgttttgttagagcattatgttccaaattgagttatagtcatatttgttatctgatttaacaaattaataaaggattccaatttacttttaaaaaaattaaactataaatatatatattttgataaaatttagaataccaaataaatatttacttttgaaatacttgcgaattccatttatgtcaaaaaatgaaaaggaaaaaaaaaaggaataaaacaaactatttgcaaattaaaatttatagtttatatgttatttgctaaaaatattatagtttatatttaatttttcttgacttaattatgtgtataatttgcattgatcactaacataaaagtagaaatatccaatttcagtctattattaaaatactctgatctattcaaatgtttgtttttgctttttttgaacaattcaatatgtaattcttatacacacatataatattcatatctaacaccattgaacttgttttgaaagtgttgataatgtaaacaaataagaaaattatacactgatatgacaccataacacatacatattctacaaatatatatttactataaacctataaaattatttgtcaaaaacaaacaaataataatatcgtcataactttgttgtttataaaaataaataaataaatatataaatattatacatacaatacaaaaaattgttacgacaattttttaattacaatataaattttttgtgttcaaatatgatttttagttaacaaaaagttacttataattatatatagtgtttaaatacaaattgtgatttttgtaactaatcgctttagtcatgaactttttaatcataacataagaatgataatttataattagtcaattttttttactttcagtcacaaatattattgtgattaaaattaaaatttttgatcgtgatatatttatatatataatatgtgcctacttgtgcccacgtacaaatacaatctacttaattaccttttcgttgggtttgattttgctcatgacaaatccatatctccaaccactactaactaaaattcctaggcaaactattctctctctctattatataagcaaataaaccaagtcacacaaacaatcaaaaatgaattcaaaagaagagttaacaacaaagccattcaaagtaacggtgacaaaagaagaggtggttgcaccacttctaccactacaagagcattggctaccgatgtccaacctcgacctcctcttgccaccgcttgattttgggcttttcttctgctacaagaaacctataaccgcggtggcagaggagcatgtagacgagattccaatatcattattggtgtttggggttttgaagaaggccttggctcaagctcttttgccctactatgcctttgcaggcgaggtggtgaagaacttgagcggggagcccgagcttcaatgcaacaaccttggagttgatttcattgaagcatttgcggaggttgagcttaaagagctcaacttttataaccctgatcacagcatcgagggcaagtttgttcccaagaagagcccggggcgagttctcgctgtccaggtaaattaatttgtgtgttttttgctttttttttcattgatttgattaggaaattatttctactaattatatatatatagatatatgttttgataaggtgaactataattgatcgagttaaaaaatctaacaaatgcacataatatatgtcttacttatgaatttgataaaacaaattttgatcatatcctaacttttccattttacacaaatttttgtacaatctttacatataactttatagactaaactactatatcagcattcccacctgtcacaaagtttaacagaaaaaaatacttttggagattatttttaagaaactgaaaatatgagagaagacacaataatatataagtcataattcagaaaaaaaaaattaatatgaaaaaatatcttcagctcaaaattaaaattgaatgaaaaaacagggcatcattaacataatgcaatattttacatacatcaatacaaaaatataaaaagttaatatttgattaaaacaccgcaagctaggttctatgttaccataaataaatatatataaatatacaagtttttcatttaagaattaaaaagagtcaaattaattcaggcattaccatctgaatttctttatttaactagtttatactaattgatatatgtatatatacatactaaagttaaacccatgatcttccgttgattcataatagatagttttattggtacactactacactagctattcaaatcatttatattaattaattaatatataatattaaatctaataattagttcttgataactatgaatattattgttattaattagtctgaaatttacgtgtagggatgtgtaattgatcactagaaacaatattatctataaaaataaatatttacataaacaacaacaattaattggtgcaactaacagatatatatatatataggtttgtctatatacatatcagtaggtaagaaaccatggaattaatatatagatctttctatatactagtatattgttacgtgcgatggacgtatactatattttatattaagtattatattatgagttcggaaggaaataaatgaataaaaaataaataatatttaatttagagagatttgaataataaatttaaattaaagttttatgtccagtaaaaacatattgaaaacaataataataaggttataatatatgttgcatttgttctagttcttaaaataatagcagcaagaacatatttgacctgaaaaaataaatattacaaaattaagaataagcaaagcgtgtgtaaaaaaatttcaaaaatggtaggatttgttagagagatatgt

SEQ ID NO: 295972 - DNA, 2433 bp, Cannabis indica
aaactatcacaaaattagttccctgtaaaataaataaatgctaccaaactgatcgcttaaaagctcagatgtaactttaaaccttttccatctccctacagtattatataacaaatattggtagtcaatattactgaatacagatacaatcttaaaagtaaatgagccaatgccacacaaaagtgttacaaaactactaaaacatggtattttcaaccagccatatgaaatgcaacaagcaacgataggatcatcgtagtcacataaacaagtcccttaactgtgtctacaatatatattatacattggggcaagaatttgaaccttaaaccagcctggacctctaaaagatggttctttctgacacttccaagatagaacttcaattaaattctaccaaaaaacaaagctaacaacaactgttcaaatcaattttattaactttgacatccacgacagatttagaggtgagaacatatgaaacataatacacaaaacagtttcagcaaatttaactccaaatcatctgactcaatctcccattcaatcagctgggtagaaaacagcagcttcaatcttgagatgggaaaacaacaaaagccgattttggcatgacttatataacatcacattcaaaagaagaagatttaacgaaggaggaaaccacaggatagagaaccaacctcgaactcctccaggtaggtataagcaccaccagtaagtttcttctttacagtcccgaaatccataggatgttctattacttcgtgatagtctggtagctgcaaatacatcaaaaacatgttattcaaaaatagaattaaaacaactcctaaggtcatgaagctaatgcactatcactacaaccctcccccctccaaaaacagaaaaagaaaacaatactaacctcttcagggtctgcaggttcagagtacacaccataggtgtccttcctgaaattcaaattaaaatagttaagcatattgacatacaaaagtgcatcaaagagatcaaagcacaatccaagaacccaaaagaacgcacttttggagcctctcgaggatgaacagtaacagctttttatcaggtaaaggtgttgagggtcccaaatccaactttgtccctgcaaataccccataaccaataacttctaaaatcaaaaatatatttctttaaccaatgaatggtcatcataaatttataagacaaaccttgaacggtgtttgatggcttcgttccagaaatggacttgataccctgaaaatattggatttaaacccaatgattaaaaaataataactaacaaagcaaacatatatgtatattatttatttccattttaaggaagataaaaaaaaataactcagctaagcaaagtagtagccgtgaaaaagctaagtagacaggcattcaaagttcgaaaaaggggaaatacagttccaaactgtgatataataattgtttaaaaaagaagaaaagacaaatttgaacttttttattatcagatagatatgacattaaaatcattattagctcagtaaactagaaaaacagatttaatgctgataaatcaaaaatactcaaaaacgaagaataataatcaaatttttttaaaaaaaattacgacatttaaacaaaaatggaagaaaaaaagggcatcttgctccccaaaaaatttcaatactgaaattccaaaagaatggaccaagtcaacccctttcctcaaattctagaaaaccaacatagttcaaaggtgcgaaattctaggaattttcacaatatgtcaacgcaatgtcacccaaaagagagttataattttcaaaacaaaaagcgattggcgctttcaacccgcgtaattcaaaaagttcaagaactccccattttattaccaaataaagacctaatttttctcagtaccttctttgagtcagagagcccagatccatctccgatcgcattgattttccgcttcttgttaccaacagagccagcgttatcttcctcagcattcgaatctgaagcatacgaattctgggaagcagaattgagagaggatttttgatttgaaggcaacttaagaacaagcttgagcttcttctcacgccgtttccctgtcaattcttcttcttcttcatcatcctcatcgtcatcctcgtcttcctcctcagcgtcggggctttccgggtcgggattagggttccggcgagtagatcgacgaaccgaattaggggtagaagaagcaggggcattcttgtaattatggtgagaatgagggactgaattggtaattcgcttagtctggtgtggaatttggtgctgttgttgttctctgaggttccgtttttggagatctaaaagagagggacgccctttcttcttcttcttcctctccactatcttacccattttggtactctctctctctctctttct

SEQ ID NO: 295973 - DNA, 2677 bp, Cannabis indica
atgctgaattattatgtgcacatattagagtagagagtagggagtaaagtagagtagagtagagtagtcatgagtcatgagtcatgttgttgctgttgttgttattgttaagagtagagtagctgctgctgtaatataatacatgccttcctctcctcttctgctgctattgtagttgttgagtcttctgcaacagaaaatttgctggttcacattttgatgtgtatccaaacttagatgtacagtacttcctatgaacccctgttagctttcctgttgctgcgttctggtggagaccaaccatcaatcttgagcactctctgttacaagttaagataatagtaaaatgtgagtgagtgagttaaagactagaatgattgaaataaagactagaaacaacacttacaggagctgatcttctgagtaacttgtgtgccattcgcaggtcctattccactgcttgaacccataaagagtgcattgagcggtgtagactgcagccgcggctaacaaggatggcgaatacttgagcatctcgtactctaccagagacagctcgatcatgaagaaggatagtagttcaagctgttttcatatcattatagacattagataattgaattgaacagtaatcaaattttataattgggcgacacaagaaatcaattagttacctttttgtcagattgagcagccttgagaaaccttttcatgaagacataaggcgtggggactgacatgttgaattgcaatgtgttaagcatcaatttctcctgcaagttggacaagacaattttacacaagttttttaagttgaaaacaattgaaacatgatcttaattagatgggataagacaattttatttaccatttcaagaacttcattccttgtgtaagccttatctgatataagaatcaaatcacccacaacaggaacagaaacttcctcatatttacatgccaaaagcatggcaaccaatccaaccaactgaagcttctttcttgcaactttttgcttagctaaaaacctatctatgagattaactgtgagaaacaatgtctctttcaacagttcaaacttgtcatgcacctgtttgattggagggggaagtagattaataataatgataattgcttcataaattggttttttgacatagtcatattggccttaaatggtttattagtacctcaataagccagtcaatcagtatagatctcatcctttcatttatgtcatattgttgtcctaagtagtcagatgagacacagctaaacccctgagcattggacaatataaaagatagtcaaatgactgtcccttttgaacaatcttcaaggttcaaattcaaacaagagtattgtgatttacctccatttttctataaaaagcatagatatcttcaacataatctacaactgcaagtgggttctttctatcacagctatcaatatctgtaattgggtcttcttcttcaactactatatcttccatttcaacctcctcctaaagaaaaatgaagaaaacaaacaagttaaaattcaaattcaatcaaataaagaggtagaaagagagagagatatagaaacataccataagatcactttcagctggtgcttcttcagtttcggtttgttccaagaacataggcactggctgatctgaaggaggagatttgcattcctcatcaatgaatatggtctctccaaacccatttgagttagaaactgatgagattcttgtgtttttagcttcctggatgtttaaggccaattacccttttaacatttttgacaatttttcaaatttccttaaaaacaaatcagatactgagtaaattcaaactcacctcaagtgctgatgattgtttagtgctagcaatttgtgcagcaaatctcctaaatcaaattaattcaaaataattttaacaacccaagtaagtaaacatgtctcaaattggttcttgctaaagaattaagtaataatttgacgttagacttagacaaaactacatttgaaaataattaaggtcagtggtcagatctctaacctggtaattggtctatgagctagatctgcctgcttcttttcacaaatctcctgtttactgaagaaatttttcaaaaaaaaaaagcagattaatcccagaaaacaaaagaaagaacaaattattactaaaaaaagttagggatttgaaagagagagagaagaagaggggtttgaaatattactctgataagcctctcttgttaaccacaacacatgggtaagattgacctctcactaaattatgattaatcactcctaaagctctcctgttctgtcttcccatttctacacacaacacatttcaacaacgaaagatcagaaaaaaaaaatgaaaaattttgattaaacacacaactaagcaagacaacatattttcttttcaaaatcttaagtcagcccactgaaaaagatccaaccttgaatgtttgttgagggtctgatcagattgttgttttcagaaagaaccattttttagctcgatggtcttagagaagaatgagattcagaccaaacccagaagagagaaaagcatgagagagagaaagaaggagagagagcccactgaaattgcagaaacagatagtagaaataataggggagctatgggtatatgtctgaagagagaga

SEQ ID NO: 295974 - DNA, 3324 bp, Cannabis indica
tctaattcagattgttatgcagtagttcttaattaaagccttacatggttttttatagacatggaaacttgaatttggcagataaaccccaaaggacccaaacagcttgaaatggtttttctgtctatctctctctttgcacatggatgaagctgaggaggagacggcttccaatcgactctccccgcagcagccatgaaaatccatttctgctatgccaaatcaccgcatccgtcccccaactccatttctgaaaggtcttacttatcaacgccaagaaacttcctgtgttgagctttccacacacacaagcactggtggactgaaaaaaccaaatgaagacaatttagctatcctgacatgaacaacaatgagcttttcttcattgttgaaaaccaagagagatccttcctacattgatgtgttgcataattttatccttaaaaagtgacataaaaatgtaaacaaaaaagagaagcttttcattgatcaaatgtgttatttttaagaacattccaattcaaccacaaaaattgtggctttaaaatcaaattataaatcccacccaatcataagaatcaccgagtaaatgacaaaacacttcaataataccaaactcattcctcactactctccttctctacatcaagaaacctaaggtgcttccccttaggagttggcagaccattcaatctcaaaacacttggtgaagaagctccatcagccgccgaatccacgcaagtctcctcttcaaccttaacaatctgatcttcatcatcactatcatacacaaacttagttcgtttccctgcaaacttgggcaatgttttcttctcatccatacttattttgctaatacaatcacacagttcatcaactaactcattatgctcctcctcttctccaaactcctccacttcttcaaaatcatagtcctcttcctcttcaaaatcctcttcatcttcttcatcatcgtcctcgccaagagtactagcgttcacctgagtagaccagatagaagaactatcatcatccggggttgatttttctttgctctctgcttctcctcccccatctcctagttgtgtcaccacagattcacagctatcagatttctctgaaaaatctaggagtagagaccttgttatgatgctctttagcaactcattacaactttcttctgccttctcatcacccacctgcccaatcaaccaaatcaataaacatgttctcataaaccaacaaaaattaagcatgttcatcacccacctgcccaaaaatcgataaacatgttctcataaaccaacaaaaattaagcatgttctcataagcaaatcgatttgatgaacatgttctcataaaccaaaataggtgaaaaagaaaagacatttcatgaaaattaaacaagaaaattactcatttgttctacctgaaaaacaactgttctttctacccaattaagacaaaagacatttgaaaaagaataaacaagaaaattgctcaattgttatacctgaaaagccaactgttctgctacaatgggagaaggtgcctcagaagataaaccattgttgttattcatgttaacctcatcaccacctgaaagatttaagatttgtggtgtattcaccggagtaggggcgagaagcccggctggcgaatacacaagtcccttaagatgaacaaaagggcggctttcgagagtgagtttcgaaagctcagcttcttcttcaactttctgtaaaagggtcttaacttgacccctaagcaaggcctcaccagacccaggagtgttcttcatggcttttttcgccatggatgacaatggagtctccaattttcccgatgctaacccaacaatcggagaatcgttggttatatcaataagcacagaacgatcttgttttccatttctttgcctcgaattcgataaacccttttcaaaatctataaagattgaatttttattaaaaagaactcaaaaaactaaagtgggaagaacagtaaattgaaaaaatagaaagaaaatgactcacttgaaattggaataccattgccgttctgggtagcaagggtttgagatcgtgtcactcttcttgctgatgatggagtttccattgttgaatcaatcaagaatatttggccgtaaagtaaacttgggttgtcggaaaacagagaaaagatttagttatttctttagcgaaatcgattacagacaaatcagagagattaaagatgtttttgtttttatgagaaagctacaatggagtttatatatataagacaacacgctcatatgagaattatgaccgttggcgcgtgcacggcaccgaggtgtctaacccgttggcgaaaactagccgttggatgattatttgaataatcatgggttaggttactaatactgtgggccttattaactttttagattgggcttaattggttaattttttaaatgggcttaattggctactctttttttagggattatttcataaatatacaaaatagataaaactttttacaaaaatatgaaatgttatttttccgttgtttcataacaatgttattttgacttgtaaaaataaaaattcgtaataaaaaaattgtattgtgtaatttttttatctttttaatggacttaatttaatggattgataatagattttgaatttaggagttctttttttttttttttaattaatggatttaggagtaattttgtctcaacaaaataggcataattttgatgattctattttctttttctacaaaatcataatcaattctctctctaaaaaaaaaaaaaaaatcataatcaattaaaaaaaaatctgctttgaaatcatatgagctgattaagtaatttttgattggttaattttgttaatttattaaaaaatacatacaaaacccaattaaaaaaacaattggtttaagattacactttaaaacaaccatgatataaattgatattctaaagtgatttggaaacaaaaatttagattttatgtgtagaaaaatatgtctaaaattgtgattagttgtagtgtgatttaatgttttttagttttaaaaagttgaatttatgttttcaagtgggttccgttttttaaattaaaatggcggtgatgttaattccctcaatgcttaggtttcatatttcctctaagtctactcttcccaactcaaactcatataaaaatcacttatattatgtgacatttggttggaaggaataaaaatacagttaaattagaaatcacattctaatactttaaaataaaaaccaaactaaaaaatggaataaaaattattttattt

SEQ ID NO: 295975 - DNA, 1713 bp, Cannabis indica
caacataggatcataatataattagttacaattttttcacttttagttataagttttgttgtaattaaaagtaaaaaattttgtagtgcctaataacaattctactaatttatatattaatatatattatccatttgtaggtgaagtgctttagtgtttctcttctaaagggttctagatatatatcctcaattggcttaatttgcaaaatgtaagaatcataattggcccatacaaaaagcaatccatgttggaatgcaattaggtgatgatataatatatatttgactaattatataatataattttgaaatattattcctatgtgtgtgtggggccaaaaaactagctagcatttgctatatctaactcctcttgctttatttgcaccaaagcttatcatgataagagataagccatattagagaaaagcaatatacataattttatcttcaatgttcaaattgcattgaatctactaataacaagccttgacttaccaacttgtacttttttttggggggtgttgtagtcatgtcgattgtgtcaaagttatttatgaagctatctcatgataattaaaatatatatatatatatataaattatctcttgccataatttgaagaggaaaatgctattaatgaaaacatcatttgcttagctaagtgttatagctgtctcacaatcattattccataaagtttgtgagtaacataaacatataatatgtgtgtatagttatcaattccaattataaagacacatgtttgatgtttcacacttttaattttttattgaatcaataagagaatttgtttaattttatgtcccaagtctaacaaatgatcaatcatgagccacactaattgtttaaaatacttcaataaaaaaaaaaaagtcaatttaataattactaattttacatgattgtagcatatgtagttggaaaccatatctcttgtaagagttagaatttggcaaaagaaaaaatgagtaatttatgcaattttatgttctttgaagaaatttaattgtgataatttattaagattataaggtatgagactacacaattgaaggtataaattataatgcaatacaaaattattttacatatttactattactaatcaattttttaaaaaggcataaattagtaatcataatttgtacaattctttagttttcttactatttgatagctaaacttaactactaaatatatatgtagtcttaactctttatttgtaatataagaaaaatgtaatgcaagatcgaaagatagaactttaagagttgagaaattaaaattgttgtactttgagagttaattataacaaaaagagatagagaaagaacaagggattagagaatttgtttcaaagggagaattgattcttattataatatttgattgtgctaaaagtgattagtagtgctttgtacattacaaaatattttattaaatattaagactcgcataatttaatttaatagttattataaaatatcgttaatcattcgtaaaacgttaccaattgtactaagaaaaaaatttatagatatccattatagcaatgatttattattatattgataccgaagaggttaaattgttaagtgaaattcaaagaggatgtgatgattgagttgagcatggaccattttttatttttatttttgaaaatagcattcataaataaaagataaa

SEQ ID NO: 295976 - DNA, 2956 bp, Cannabis indica
caataccaacatgctcttatgttctctgttttttttaatagtcttattttgtaaatgaagatttcctttgcgtgagtacctatccactataacttgtcgtctttctcttatgttgtttacttttaaaagaaatagagagtctcagcggactccccaaaggtcgtgcaataactattcacaatttggatcaggatcatttgaaaataggtgtgagaaaaagctttgaaatttgaccagcttagcattatgctggtcgcaatggttattataaagaaacaaaagagtttttaaatataatcaaggtctcttttactgttctctcttggtctactatgcatgtgtgtatggcttgatggatgttaatatttcatgacaagccatgatgactcacctaatagatacgagagattgccttttttggcatgattaagaaaatttatatgttgtatccctttccttatgcactttgttgtcttcctatagctacaagactcatttaatgtatgttgccaggcagtacatacatgggaaaatgacatcaagttggaaggcatttggaattcctcttgtagcaaggctttctgattccatatgtgggtctgatgtccgcaacctgtatttggaattgcttaatcccttaaaagtttgtgctaaaaaggcttcggacaacctagatggtcccgaaggcactgcatctgaagattctacacagaatactgtaaatcctgatattagtgggactgtgaatccctctgttgtaaaagaagccaattcacccttagatgacaaattacagttttacttagcagatgagaagggaacaagtagggaatctgagatactgatgagtgagcctgtaattttgtcaaagaggttgaatgttcttgtttgttggcctggaaagtgttttgaacagcagtatgatactcacctcctttgctcgttgcctgaggttttcaagtctgggcttttcgcaaagagacctcaagagtctgtgtctctgtataagtgccttgaagcattcttgaaggaggagccgcttggaccagaagacatgtggtaagtgcacatataccttaagcatagaaaatgtattgcttgtatatgctgctgttttgtattagattgtgtttgagtttgttgcagctgtaaaatttatggtgagctttatattcgttgaccttttatgttagcacttgcttcctgtataatggtcacttttttcctctatttctttctttctttttttatttctttaaattcttcgttctcaataggcaaaagtttattttatgttcatccattaccaattgctattttggttacatgatttactgggtattaccttgtttgaactatgctgtgattggtgatttctttttatcattatttgctatttgtacttcaggttttgtcctggctgcaaagagcaccgtcaagccagcaagaagttagacctttggaggctgcctgaggtcttggttattcacttgaagcggtttcaatatagccggttttcgaagaataaactggaaacatatgttgactttcccgttgatgatcttgatttgtcaacatatattggccatcaaaatggtcagttgtgtaatcgttatatgctttatgcagtgagtaatcactttggaagcatgggaggtggtcattatactgcatttgtgcacgtaagtattcatttttgcttgatagttcattgttcgttagaaaatgtgttcgtaatgtacattgccagtactgtgtgcaagtactgtacctgcttcatgagttcattttgttaaataggatctgggttaggatattttctgtccatgcaagtctaggaaaatgggaagaccctattttctacggtcgggacagatgatcagggaaactttatttaggggccaaatgacctgaattagacttgccattcccatttgtgcacttgtgatgtgtctccggttatggatgttggggtgcaagtggtgatcctagttcaaagaaatctagtctattttgaactttgggagtaatattatcttctgtatttcgttgtgttttgatggtttgaaggtttcacacatctgcttgttttgtctgatgcagcatggtggtgacctctggtacgattttgatgatagccacgttaatcccatcagcctagagaagataaagtcttcagctgcatatgttcttttctaccgaagagttgtggaagcgtaaccatttgaatagatgagccatcgtggtccgtctgcattgaagtcatcgtggtccgtctgcattgaagttttcctgaatttgtttatgtcctagttttgcatctaaattaggacgagtagcattcttttgtctttggagtcatattgatctgaatcgacaggcagactacccttcttcatggatgaaattcgaggaaggttatcgtgtcataaaggaggcgccaaggactattgtcacatagaaaaacaagaagagatgagagaaacattgaggacattatacaccatgtaaccatttttcatagaaaattcgtattaactagattaggggaggttttttttttcttgggatttgtagtgggtgctagctaacccattcaaaagtgtaattctttatttttgatagttgatcaatgatgtttattacatgataggaaagttttgaattctcatttgtttgtgtgccctttcaatagagtaattctttccttatgggttttttttttggaagaagacaatgtgtccaaaacaatcttcatcatgttacataccaccactttgaatatgcttttttcttatgcatatatttgtcatattttgaatatgtttcatttgttgtactaacaatgattgtgctactgcttgatgaactcataattattctataccaagattaatggtagacatatatttaaatggggtaaataatattttggaccttgtattttataaaagtt

SEQ ID NO: 295977 - DNA, 2076 bp, Cannabis indica
caacgagctgcacagtatgtttagaaatcacgtaatacgcctatgttaattagggtgttacaatgttttattcaccttcctgttaaggttctcaaacatggtcaactcgttcaacaattgagtcatgttgaaatctagctttttcatcacatagcttttggtgaaagccttgaagctaggaaatagcgactcaagaatcatagtcacttgagtcctatcgtctatgatagccccatgtgtctctagctacctcatgcattagctcaatcatgtgcaatacatgagattgaacaggaacacccttcttcatcttacaattcatgtagctacgagtagcatcatctcttgtttgattagactactgcccaaacatggcctatagagtatttattatttgagatgcattctttatgttctcatgcatcttacgcagaatatcgtccatgcttactagcatgaaacacttggccttgttgttggattgaatccaagcatcatatatgtcatgtatattttttggggcattggtagcaggctccttagttagggtaaatttttaattctcacaaactagcattaaattcaaattcgatttctattaaaattatcaccattcaatatttcaagtactagtaaagtagtaaggggtttcacatagtaaacatgactgaaataaataaagtaacataacgattgtgcatgaatagtaaatatcgttttggaattactataaatgtgatgcatgagcacatacaagtaaaacacataaaatcttgtttaagttatttcacaataaagctctttgataattgattatcgccttaggattgataaaaagtcaagttcattaagcctatgagacaattctcatctttattattttaaaacttaaatatctcacattttcttttcaaaatatgaagtaccgctttttgaccaagttaacaactaagtactatgaagcttagttgcactttgtgagtgtaaccatatttcctataacacaaagttcacaaacaagagaatcagaaacacaagaaggaaaacaaagaagggctcaaaaatcacatcgtttgacaccgaaagggtttaggacataaggaaactagtcacaaaaacatcactctagaccttgtcggacctcatgaaatcagcatcgatgcaaagtggaaaaggaaagattctcaaaatttaaatttccctaaagcatggaaaagtttcaaggttcgatcttccttattgatttctaagtttcagataagaaaacaacttgaaacaccacccttcatggcagcgcatacacgaatgtcgccatgaaacccataaaaaatccaaaaatgcatgttagtatcacttaaagtggctacacaaagcctacctacccagaaaatggctagattataagtacgggatggaaacacttacttgtaagagtaggtactgggggtgccaaatttcaaacagtagaatgaagcctttcttggaaatccttgaggcgccttatcaattcatcagtgtctgcttggatgtctaacaacagagatgtagtagataaataaatgtctgaaagtggggctgcttctagaaaatgctttgaccagagttagggaagatggtggtgaagttcagtaagtaatcggacatccaccaaaaaacttctgggttttttagaagagtttctctctcgaaaagtttgagagaaacctaaaatggaaaaaaagttgctatgaatgggctcctcacttatttatatccaaatggtgattcgcatgccttcaagtcaacgacccagatcaaatttaaaaaaacacattttagaaaaatccaaaggaataccaaaggtcaccattaaatgctatacaaataaccaatgaatactaatgataacctccatctcgagaacttcactgacatgctcagctatcaattcgcaaactgaggcctcacatgtttccccatactgcatgacgtgtatgaacaaagaaactgatgatatgtgtattcaacccacgagatatgaaaagtttgtgggtgtaatgaccgctctagtaatgtggattagtaaaggcaattagc

SEQ ID NO: 295978 - DNA, 2248 bp, Cannabis indica
tcttttcttcacagtccaatcccatttagtcataccccaaacacaaaattgtttatccagtgtttattctagcagtttaccaaacatactattggatacagcataatcctatccttaccagtccaattgtgttcatatgtaccaaacgggcccgtaggatgtagtgtttatggtattttgagtctattcaattcaagattttactctgattacattggaccaacacttctttttcttttttgctgttacgttttttcctctacctcaattcatattttctctgtgcaaatttgaaacccagttttggagataaatttcgtgacattaacatgctcataaatgttttccaaggtttaatacttccaactgtaaccaaacatatttttcctagagtgattgggggcaagcaatgcaaactgcaaagtgcttatctccaatcatttagcctttgggtgttaatttttttttatttaggataaaaaaagtttttcttttttggtctaatgggctaatttttatgttaacaggttgatcacgagaaaagtcgttgaaaatgttcacaggttgagaactccgcaaatgagtttctgtacagatgcaggtgctaaattatccagttccaatgttggccaggttagctatgggactgtcttgatctgatctattataaaactctccaatttttatgttttgttctgttttcaccactttgtagtgtcttgaaattgcaatgaacataatgtgaagttgggctttattgatttgcttgaaaataccaggagcatcagaagacgccgggtgtttcaaataaaattcaagaacatgatgttgccattgttggagggggaatggttgggttggcccttgcttgttccttgggtgagtagtctttcatgtagattttagttagtttcattgggataagtgctgtgtactttctttatgtttgggataaatctagcttcagttacaatttttttatatgatatatggctactttctcattgatagcttaggcatattagttttctcaatcatttgtttgttccacgaatggtttaagtgttccaagtaggttgtcaagacatttaggccacccaacctgatttttttgtggattaactttgatctcatgatcgtgcccccttgcaattcaaagagatgacttttggatgaaatgcaatagcttctatactgaatatgcattcatgtgttttaatattatctagattccatttggtttgatcagcattggaagaattttgtgatattgttctttcattcaatttgtaaatgaatctgaatatgtttagcctaataaattattgtgtgggattaggagataatagccagattagttttgctaatattatttcttttcatagtaaacttcataacctgttctaaaaacattaaaaaaaagatacctttgtaacatgctaatttgctaatttttcattttctctagcaagcatgccgttgacgaagcatttgaatgttgccattattgatagcaaccccgcattactgagtggactccgcgtcaagaaagaggaccctcctgatccaagggtcagtacagttacacctgcaaccatgtcattcttcaaaggtattaagtatgccatgtttatattctatagaatttcctcaactcctctctatccacttaaatatctcacgtgatttgattaacatagttttaatggagcttatttcacattattatctagtaacatcatcgcaaaaatttcaaaggtaattggtaataaatattaagtggtttatttttttgacattacaatgttatttgatgtttggcttgactatacacggtgagcctgaagttgtttccgttttaccatttttcatgcagtcattttccaaccttttttgttgtattatggaattgggtcttctagttttggactttaaagaatatttgtctactttgcagagattggtgcttggaaatatgttgagcagcatcgacatgcatattttgataagatgcaggtgcttgtattataaatttaaccttcttaatattctttcttgcttgtgaagactgttaaaaagtattgagaccttttcatctttgcaaccttttctaggtatgggactatactgggttaggatatacaaagtacaatgcccgagatgcagataaagaatttctagggtaagctcaaaataaaagtagaaaaatgtcatgctcaattaaaaaggatgctaattttgacttctg

SEQ ID NO: 295979 - DNA, 1879 bp, Cannabis indica
gaaattcaagatagacatcattgccattagtgagttgggaaacgctaacaagattcttcttaatagcaggaacatgtaagatgttgtgcaaatgtaaaggaaaggaatgagtagaagggatagacaattgaccagtatgagaaatgattaattgcttaccatttcccacggcaagagtctcagtgccattatatggggtagcagagtccaaggttgtgttgccacagctgacatggttggtagccccggtatccacataccaaagatcatcatctcccatgtcagggagaatggttgtggttaaagcctgaggatcataaagagaatcaatttcagtgagaaaggcttgagaggaagaagagctaccatatttgggggtgatgaaattcttatcaaagcggtagtgacaaacagccgttgtgtgaccaaaccgaaggcacacttgacaaagcagtctcgagccatttccatgcccagaaaatctcccattaggacgccccatttcgttgttgtgaggacgagacgaaggaacatcatgcccatgattacccccatttcttgattgttgtgtactcaaattggcttgcatttttagagataattcaataacactgctgtggtgtttcacccgagtttcataagatagtaagagtgcctgaacttcctcaaaagagagatgatcacttcgagaggtgattccggagaccacgggatcaaactccggtccgagaccattcaagagttgtaggaccaaatcttgagtggtaacgggggatccagcaatcgccaaaagaatcggcagtggcctgggctttttcaacatattcaactattgacaaattgcccttatgaagacgagagaaaacacctttcaattgcaggaggcgagcctttgtttggctggaaattctttgctcaagggccctccaaactgagaaagaagtggtgaacgatgcaaccgaagcaagaatcggttccgacattgatgagcgaagccaagaaaggagaagctggtctttctttttccattgcaaatattcaggatttggggcgccagtgatcagagtagggattggggtgacatcggagaagagaaattgatctaaatcatgaccaattacggtaggtacaacctgggatttccaagagagatagttgagtcggtcgagtctcagagtgagtgaggtagataaagaaatggcaaacgggttccattgaaccggaggtggaagaggagcagcggtagcaggtgtggctggtggatcggtggaggaagattccattgacgtaagtcagagacaatgataccataaagaaggtaaaaccagcatgaaaagaagaaaggctaagagctttgtaaaagagaggctaagagcaatgaaaaagaactaagaacaggacaaaagaattatgttaaaaagcttacccaaaacagggcagctgtgcctttatttatagtcaaagtattacaatacagtaaaggaaagaattacaaaatagtaatatccacctaatcaactaattaacagaaaagccagcaattaacagaaaaatagttatgtaataataagttggttaacaattagtaaatggttgattgcgaaatataggccgtggatgtaatcatgtgtatttgctcatttgcgtaactgatcacgcacaaaaataataatacatataatagaaatgagggctatatttattaaaatggatataaatagttctcacacatagtacatacttatttttttgttaacaaaaagtagatattaatttaaaagaaacaaaaaatgatctgccagtatctcttaccagatgagttggcacggaaaaaccgtgtttttgcaaatgtcagttgtatataagaaaatattaaaac

SEQ ID NO: 295980 - DNA, 3477 bp, Cannabis indica
ttttttgcattgaataaattcatttataaatactatacatcttatgtttatcaaacaaatactaaacatgtcacatttattaaaataatactatacatctcacaaaaatatgaatagttatataactaaacaagttgtttatctattccaagagcatgaacaactaatccttgcaatgaaagaactggtttaaagatgataatattctaaattacagtggccatcaaatccactgcaatgaaaaaaaaaataaaactagaacgatatgcaactgataaaacactcactctccctcccaaacagaaagagtaatttgagtttgaatagaatagatcattaatggcaagattacgtgtaagttaaacaagtttatggtgacaattatacacataatttgattaacaaatctacatctacaagaatgtgacggtacaacacgtttcttgggtggctgcattttgttataaactaataatattttaaattctagtagtttagccacaaaactatacactttgcaggagccataatatttgtgtgactcatcattgacttctttttctcaacactctcttcttttcttgtacgttaatctactattaacattaacatcccgaacacataaacaggccattacagttgaccaatttaagtaacatcactcacctcaaaatcttcatctcacacatcaaattgacaattttggaaaagggttttcagtgttgtattccatcactaagttgcagctcaatatttacattatgatattctgcagtgaaactatattctactatgaagttgatgaatgaataaccacatttgtgaatttgaactagagaactaaaccaaatatggccaacaaataattgggtggtttgtttcactgtaaaatcgtccagttcatcattgtgccaagttgttgaagttctttatgtggctcatgatttcctccagcagcttgtatatctctttacttcttgggtgcgatttaccaccctttcgaaactcgtaaactacaccatcgagttcaatcgaactacaccctggagttttcttgatgttcttgcctttcatttccttccttaacttcactgcatccctccatttatttgcagatgaatatatatttgacataagtacatatgcaccatctctctctggctccaccttcagtagctttttcattacatcttctccaagttcaacacaaccgtgaatcctacaagctcccaaaagggctccccatatataagcatcaggctccatcggcatgttttcaataagctcctgtgcttcctcaattaatccagcacggccaaaaaggtcgaccatgcaaccatagtgttctgtttgaggtctaaggttatacacacatgacatgtctttgaagtacctttttccttccacaacaagacctgcatgactacaagctgttaaaacacctataaatgtcacctcatctggttttatacctcttcgaggcatatcggagaatatactcagtgccctttttgcttctccgtgcatagctaaaccaataataatggcagtgtaagaatacacatccctacacttcatgcctcggaacactttaaaggcttggtctatggctccacacttagcatacatatccacgagtgcattccctatgaacctatcagcctcaatctgttttctatcgatgtatgcatgaacccacttccccaactcaagcaatccaagatttgcacaggaattcaaaacgcccaccaatgtaaagtcatcaggctcaacccctatgctttgcattttccgaaacatatccattgcatccttgaattcgccttggttagccaatcctgatatcaaagaattccaagaaactacatttcgaacaggcatttcatcaaatattttgcgtgcggaattagcatcaccacacttgagatacatatcaaccagtgcattgcccacgtacacgtctgagggaaccctattgtccagtatatagtcatgtaattttctacctaattttaagtctcctagctttgaacaagcagagagaacaataaccgctgtcatctcatcggctttcattttggcatcacacatctcaaagaaagtcaaaatagcttccctggcaaagccattcttcacgtaacactgaatgagcgtggtccaagataccacatctctcagagaactttcttcaaacaccttgcgggcgtaactcacagacccacaaacagaataaagcctgatgagagtgttcttcacgtacacattggataacaccagcccagtcttgacagcataagcttgaacctggacaccttctctgagcgcctgagacttggaacaagccttgagaacataaggaaccgtatagttatcaggacggaagccattgacaagcatctcgcgaaacaaaacgacagctcgaagtgagttgccattaaggctccgaacgatgtcattgcatatgtcgaggccgaggtcctggttttccaagtgctttaagataaaacatagataacccagatttctagaggaagaaatgagttcaagggtcggcggtgggagagggaaagaagcagttttgagtataaaggcgtggatttgccgtagatttttaatgttgtccgttttggtccccccggcggcgacccgaaaagcttgtgagttgacgtaatttgtggttgcccagtagctgctcatacaaatcaacatgaacataaaaacatgcaaggaagaagcaattagcaacgataaatgtttaggtatgaaaatgaaagtaagggaatatgtatgataaattaaaagctcattaggatttttgcttacacatgtaccaaattatgtaagttgaggggcataatttagtacatgtcaaaattcgaagggcatgatttggtagatatcaaagtctgggtaacatggtttagtatataaacaattattgaaatagtaaaattgaattaaattagacaaaagtctttaaatccaacaatctcaatagttcatggggcattttcaatagctttaaaagttcaagggcataatttggtacatgtcaaagttcagggggaaaaattctatgttgatttagtttctcccaatctcaactgttatgacccttttctttttaccgttacattacatggcacaacacacctagaaaacacaagagagttatttaagtcaaaattgagaagtgtagttgcagagtattgaggaagaggttgaggactgtatagaggagcacaattttgaactttaaaatcaaaattcaaaatttaaaataaacaaatatatataggataagagtatagtaagaactattgttttgttcctaccgtagggatgtttttttaaccataaataatttaatggtaataaatgagtagatgtataataatactttacacttgccgtgcattatataatttcttcttatattattataataatatttcataattaaatattctttttttt

SEQ ID NO: 295981 - DNA, 3182 bp, Cannabis indica
atttatgtttttttttatttatttcatatatttagtacttttggtatatcttatgttacttgtaaatttaattgtagaatgtatgtcatcaagcgagctaaagcattcatgtcaaaattagatatgaatgatatcacacacaattaaataccattttttcatataacaacacattactaataaaaaaatgtatgttgttgctttctaggagcttacttcccagaagttcatagaggattactcttaatcgctctctgcattactaccttctactttcaagatacaaacttttgacaatatggacccggtggggatcagtgagttgttcgaagactctatccaaatatcacaaaatgatataactttcaacctcaaccttggcgaggttgatgaacctcaggaatcaaacaaagttttacttcagtagatacaaactcggcaaggcagccattcagggatctcttaaattgtcgtggaatgccattagaggctgtaagtggaaggagattgatggcggtctgatctagttcactttcgctaacagagatgatgccatgaatgtcctggcatgtcgtccctggtttgtctgcggtgctttgttagtcatcatgccctggcccgcttggctaactccggctgaagttcgttttgacaaaacccccatttgggtcaacgttgaaagcataccacctatttactgaaacctctccaatctcaaataattagcttccaaagcctccccaatctttgaacttcccctgggtattgaggacgcagttggtatgagtacactgagattcagggccattattgaccttaacaaaccaatattctcaagcttttttctctgtaggcagacattgaaagatttatgaaactccccaaactctatgtcaagtacggtttactcacccatgatcagagcgtttgtttcaaggcccccatagtcgttaaagatgagaagggtaatttctaccccatgtatggaacctggctaaaaaatgatgctcaagaaaaatcaaccttctttacgtcgcttgctaaatggttcaaagattgggttttacaaaaacgtatggggtctaacccggtcctacgaaatcagatgaagatacacaaggcaatcaagaatagtgaggctgcataagttcgtgaatgcataatgcaatttccagcaaaaaaaaaaacaaattgtgaccgactccgaaaaggaacacggcgattctacaacggagcaggttacccaactgcctcttgtttgcctcccgagtataggcgagattgccccatatggaaataattccaaaagagtggtcatgcaagacctcataactgcagcaacagttaccacaggcggtgatacaaatagcagagttaaattgagaaacaattgtgaagtctctgattagtcaaagaaggctcagagctccaatataataaagaaagatgctaatcttaccttttctggtagagacaaggaaggctgcgaagatcaacaagcgaagaagggctccttgagaaatcaattcagaatccccagaattcgtacctggtaagagaggaaaatgccaaaatataaccgttgaaatagaatatggttcatgcccttctacaccttataggaccttattacttggtacccaatcccaagtaatcaactggccttccaatgaatgttgggcccaacccaagcccaaatcatgggacataaacttttgaaacatataattatgattatattccactgtgttgacaacactataatcatgaataactatatgttctgaatttaatagaatttatacattaaatttataaccatgaaagaaatcatgtgaaccgtgcaacataaaatgatatctgatgttttattaattactaaatttaattatattaaaatgagttttatttagagtataatatcccaatgcaatgatattgcacgtcgttcataaatcaattgacaataacaacaaaatgttattttgatttgcctacttttttcaaattattttcgacatactttatttttttattcacttgatgtcgtttttaggtctactcgtttttaaataacatttctagcatgattattatgtcattcatatataatacttgtattttttttttttgctaatctaaaaatttcattccaaagaaaaactaaaacactaagtttatggtagagagtctagagacaataggctcaacctcctcaatcaatgttatttcttggtgatcgactcactatgtaattttatctcacttgtttcaaatattttttgaacaccacgaggaagaagaaatagaagagaaaggttaatttatctttaattttataattgttattagatttgaaactattttttatttaatttttaaaataaaaaaactaaatgacttgaactaatctgaagttgacatactgatttgatacttaaaatattaaaattaagattgagtgtaaatatttcaataattaagtgcaaaaagaaaaaaataacaattgttaaaagatccttacttgataacaaattacaaaaagttaattaaaaattattaataattaaaattttataaagaaatattaaagtattaagttaagttaattattatttatttatttttaatttttaaagagaaatttcatttaatatacttaaaaaaaatccctatttcaaaaaaaaaacaccttcttaattattttatacaatacaattttattaacttcacattttatccaaaatatccttattattatttttttcaaaacctaaaaaaaataaatgaaataccattgtgttaatccccatcaaccatgatacaactcctccccgttctcatctccattaatggctcctccccattttttcaaaaaataaaaataaataaagccctcctcccttctttctagctctgccctctacaccccttgaagagatccgaccagccaacttgcaccagcccaaccactgtgaaggacgtcgaccagccttcacgcctcatcccaaccaccgcgtcgcccctccttgacctccctttcattgtggattaatgggtaagtgttttttttgtaaaaaacatttgttaaataattgtaaaagtatagcatatttcgataaatctatggggttgttcgtagaatttttgaaaaaatcgcgagatctcttttttcagagtat

SEQ ID NO: 295982 - DNA, 5744 bp, Cannabis indica
aaatggatttaatgttataaaaattgaactgatttcatttggtgtctttcaggattatattacagatcctgataggaggattgctgctgacaccattgctgcaattggcatatgtgtgcagcgacttccacagatggcccatacatgcttagaaggactcttgactttgaccagacaaggtttgtgaaagatgacaactgagaaatgtatatgtttcataaatttttcttggctttattcccttcctaattacatattgttgcagaaatttttgctggtgagtttggatctgttgatggagaagcaaatgttttggtgcaagcaataatgtctattaaatcaatcattaggcacgatccactctgccatgagaaagtatacttcttttcatatttttatgttgatgtgttttatatattattcatggcatgtattatatatatatgccttgtgaaagcatttgtgcactactaagttgggttttgagatattagtggatagtttattttgtgcctttaatcgactactaatttatgagtatattagtgggggcgccactttgttcctactgatagaagtatctttgtctttgacacatggagaaagtataatctaaaatctttatatgaagatatatattgtagctataggatgcatcccatcaacttttgggcaattccagataatttttggtgctataaacaaattcaaattcactattttgaaatctattttcagtagtataaattattcggaattttctgaaaattggtgggatgccgactataaccatcataactacagtgtattatgtcatataaaaacatttgagttataattttttcatgtgccgaaaacaaagacgccctactggtaagggcaaaagtggcgtccccactatagagttgccctatatttatatacctattttgatgacattgtgaagatgttgcattttaatcttaggcatgctattatgtcaatgcacatgtaatgatagccaacaaaattaggtacatcaatttagttaatctgccatttgtgagacctaaatgttcaattcttgtatccatagagtaaactctgctgtattaactaaagctgatttttgtatttgaaaggtaattattcgactggttcgtagtttggattcaataaaggtgcctgctgctcgtgcaataatcatctggatggtgggggagtacaactctttagggaagctagttccgaaaatgttaaccacagtacttaagtatcttgcatggtgtttcacttctgaatctttagagacaaagcttcagatacttaatactactgtcaaggtattttttttttttggctggaaacagtcaaggtactttagaaactatattttttgtcagatttatttatatatagcagttgataagattttgtagcatactgtttatctgctggtttctttgttatgatcactagaccaaactaactgtttataaattaagcattatttttgtggccctaattactttaaaactcttttctgtgcttcttcaaggttgtgaatcctacataggaaaatgatgcattttcatgtttaaggtcatattcatccgaatgggagatattgttagttttatagtaagaatcttattgtcattccccccaccggcggagagcaatgtattgatactaatgctatatgttatattcatctgtataagtttttcttttctcattattcccaaaattgggttggtatcattactttgggtgtatgtcacgaactttacttattcaactggtcttttctgtaggttttagtgtgtgcaagtggagaagacactctgacatttgaaaaagttttaagctatttgcttgaattggccaaatgtgatttgaattatgatgttcgtgatagagcttgttttttgaagaaacttctatcgtcacacttagatcaccaagctgcagaagcagaaccagggggcctacataagaatagaggcttgtcatgcttacttgcaaaatccttatttgcggtacaaacaaaatcagctcttccccagccaaataatcatcgaatttatcttcctggttctttatctcaaatagtacttcatgctgctccaggttatgaacctctcccaaaaccttgtagtttaaccattgatgttcgtgaaacaaatgaatctggtaatctagccactagtgatccttcagtaacagatgatctctcagtatctggatcattggatgaagaaactgcttcggattatacctctcagctttccagtgctggctctaatggtggtcatggcagtgatgaatttggttctgcaggtgaaaatggcgaaaacaccagcccattgattcagatttcagatgctggaaatgctttccaagcccaaaatcatgtttctcagtcaggttctgctgattttgaggaattgatgtcaaagagagctctagagtcgtggctggatgagcagcctggtttgtcaaatgtgaatacttatgaaccaagttcaagaaatggatcttcagcaagaatctccattggggatattagaggcaaaataaaacgtaaaagctatgtgctcttggatcctgtaaatggaaatggactgagggtggattattccttttcatctgagatttcaagcatctcaactatacttgtttgtatagaggttgtcctcaagaactgttcaacagagcctatgtcaaatataactttagttgatgaagaatctggccatgccttggatagtgcagatcaaactttgactccatctgacaggttaccaactcaaattgcttaaggaatgataatttcactataaatgaaaatgctgaatcatattaatctaacacagttacttctctaaatttttgcttagtgggagttcttgatttttttggcctatagctcaatcaaaagtggcaatcttgatggcctagtaatctttagacatgtaataagacggttataagttttcaacattcatgcatgctttgagctaagagtcatatctccctttaccaatattaaaggttgaaactagtcaaccaaacttctaaatatttttgtgttgatgcttagcagtctcatatgaatagttttcatagctgtatctgagtcaactaggcaatctcatatgcatagttttcatagctgtatctgagtcaactaggcaaatttctattgttttccgtatctgtatcttcctatagcaatgatcttgcattgtttttgcaagtctgaaagtgatagtttaagttattgaattaaattagattgcatttctcttaaattaactgctacttttttgtaatcttggtagtttttctagaaatcatcagtcatactagggtccatggaagtctaggttcacctattcatcaaattcagcataaatgtttgaatcaatggtcataatttttttggtatctagtaatcaaggctttagtaaattctgatttgcatcccacttggtataacagctccacaccatctcaagatgatgtgccaactttagcatctatggaggagatcacctctctggagcctgatcagataatgcaaagaatcatccacgttcacttccatcaccatctcttacctctaaagctagctttatattgtaatggaataaggcatcctgttaaattatggcctgatattggatactttataaaagctgttcccatggatgtggatgccttcatcaatgaggagtctcatcttaaaggaatgtttgaatacacgagaaggtaatttactcatctttccttatttcatatgtaactcaccatcacattcctatgaacatggacccggatgcacaaaaagcgtgcagaaataatgtgcaaatacatatgtattggtgaagtcacatgtataacttgcctaggaaataattttttgtacattttttgacacagtcaatcaaattcatctagggtagaacttttcaggatgcttcataaagattgtcactgcaaaatttgaacaaactcatatttttatttcttcattcgatttgtgtaaaactgctgaacgccatagcaatatagtagaccccaatcaagtgcataaggaactcaaactttaccatatacttttttccttatggtatgaacagttttttagagggattgtttgcattctcttgtgtattcttttatcatgtgctgtctactgtctggcgcaattatcattatttgagtggtgtagatagtgattgggatggttagtggtctgaaaaaatgaagggggatgtagtaagcggggttaatcaagctatggctccaatttagcttcctttgaataaacgggaaacttttcagtttgaatgttgaagctgtttgaccagtacatctggattagtttgattgtatcatgtcataccatattgacatattctctgaatttggcttcagattatagaagaaagaaataatttttttctgctgatattccccttatgttttacttttgttggttttcgaaaattgttaatcgtcaattatattcaacagttgcactttcagcgatcacattggagggttaaataacgacaaaggtgactgctcggtagcgacagacaaattccttgaaatatgcagaagtctggcatcaaagatgctaagcaatgcgaacatttatcttgtatctgtggatatgccgattgctgcaaaccttgatgatgcatcagggttgtgcttacggttcagcagtgaggtcttaagcacattgaaaccatgcttaattacaattactgtcgatggtaaatgcacggaaccactgaacatttccattaaagtgaattgtgaagaaactgtatttggcttgaatttgttgaaccgggtcgtcaatttcttggttgagccatctcataccaacttgttgtaaagcttgtaatttgtaattgcaataattgattatggaaaagaaagaggaagaacgtgtgccttagttgacccaaatgtgattgtattctctttattccaaacaattatcctgaattcttgatttctgaatttccagttgttttttgtccctgtattgtacagaagaaagagtaatgtttgaactgacatgtttgttttttgcctgagttcaatgattgactcaactcttctatcagccaattcgtatactatcagtttgtattttttttttcttgagtttatcttttagattttgagcttcgcttacaccttcctgaaaccagtggtgttctgattaatggaaaattttcatgcaaatataattaaaaaatattaagtgatttcttgttggaggatatttgtgtctgtttggacttaattgcttaaaagtaatgatgtgctactaaaaacattgaaggagaaaaaaaaacaaagcaacaatgaaattcttcgtccctattttcctttcatcctctggaaccttgctttactaattttgtaggatttatttgaactcaaagtgtacaccaattttagcacataagtgttggtttcttgcaatttcttgaaaattttatgaagttagtgtatagcaactttaatttaaatcatttgggataaaactttacgcacagaactctttgaattgtttggagaaatctgaaaaagttctatatgcaaagacgaaaatccaaaatagtattctatttgacattgtaaggtgccgagcgtggcagtccacactccacattagctatatttgttggaactttgtgaaatgtttaaaaaaatgatgtgtgtgagtagga

SEQ ID NO: 295983 - DNA, 1239 bp, Cannabis indica
gcatcagtaaggagtagtgccttagaagtactcctctgatcaaagttacatgaaactgaggcaattggaattccaataacttgtccctgaattaaagtcttcatgattttggagtttgtgggtggatgataggtattgagagtttttcaatctcaggaaatgaaggcagtagatgagttgtagtagtagtggtagttgatgcctattgaggttgatgaagaggtgtatttaaagggctaaagaagtagttggtgattctaaactttttggtttctctgactcatcagtggctcatcaatgacaataaaggcatagtacatatatctaagactcctcaataaaggtaattttctcctaaaaataaaagatggtgagaagatggcatgtttgggtagctttaggaaaagacaatgtggaaaggctctcttttcttctttggtggattctccaaagtactggaagaaaggtatagatttggggtgtctgaattaagtcagtttcttgttacataagactccgttttgcattggttcatggaatttgaaaacttgggtatgactgttacaagggacccacattttggaatgatatttaggataacttatatattttgttattctttgagttattgaaacttttgactttgaaagaccttgataaatatatatattagctaaatacaatctataaaacaggtataatttatatttattatacatgttagaatacacaatgcacgcagaatattacaaaatggtggtatgagccaccaaaacttctattggcagataagctagaatttatgtgattatgagggaccaatttgttaatatcaattcctctgaggataagagatgaaacaatttctttttcttgagccatgtatatttcaagaatttgcaagaaaagttcaccaaattgagtatatttatttcatataggataataaaaaagaatatcctgagtacgtagttgggacaacttttccatcatacaatcccaaacaaggtccatgcaatttccctttttctaattctaactgtatgaggctgtgcctgtgtcattgaattgctttctgagttggcaacttaactttgtgatctcagccctctttaatatactactacgataagataagagagtgaaatattaaaaagaaaaagaaaaagacgtgaaaaggaaaagaaaattaaaagtcgtttttgtgtgaccaaaattgtgtagtcatttaccaaattt

SEQ ID NO: 295984 - DNA, 1580 bp, Cannabis indica
cttgggcagtacaaaagtaatgaaattgggctggggcagtaaaaatgttgtttttgccgtgtcccagtataattgtaaagttttggtccaaaagcagtatttttgtaaaattccctttattaattagtctcacagatctatcactgtatgtattgttttattaaaagtgcgtacatatcatcaatgtacaattaattatggttgtaattgtacaataatcaattcaactaacatcaaaaactaataatcacaacaaattacagagaaaataattcaaagcataaaaacaaaaaaatcaaaattttatcgagcatctgccaaaaggcaattcttacttcgtgttacctcccttaaggtgatatttctcatattcagttgacgatcattattacaacactaactaagaacacacttcaagagttttacaaaaagaactcaaaaatattcaatccgagtactccaagaacataacttttgggattggtatctgaaactctcactctcacacactttgtttcttctctccccttcaatctaatttcaacgcttgaatcaaaagtaaatgaaatctattacaaaaaatataaaattatgcaagtatacgtatcgttttgacaagtaatactcaaataaataaaattgtttcaacaatgatggtagcaaagtaccaatcaactaaattcttatttttatttagcaatcgaataaataaactttaaaaaactaaatgatctatctaaaaaacaagcaaataaaaagagtattgtaaaactatgaaagagtatgttgtgtagcactaaatatcttttatattattacaacatactctacacaccatttcaatatattttctacaaaaatacaactgaaaaattcaattatcaaacaattgaaatgcaaaatcagcttggaattatatatgtactccgtattatatcattatatatgtactctgtaatatattatattgtatcgacaccataaaaagatatgattttaccttaggctaacaaaaaatcatatatattttctgtgcattattaatattggtactagtaaaaagcattaaatagtttgaagaagagttaaagtggaatccacaatcacgtattttctttcttaatcacttgatgttagctcaagtggccataaaagagtataaacgtttaaataaataaaaaaaaaggtagacctcttttcttcaacattgaaaataagatacttaatgaaccatataatgttatctaagatttataaagtaataaacatgacttctccttatgatcatattatttcagaatgtaaagctttgattgtcaaagttggtaatatctctttaagatttgtaaaacaatacgcattgtttggcgcgatcctctcttattgagacagatcgtatttttagtatccactaatcactctttatctaatataattgcaacattagtgttgaatgatttgaattaaggaataattacataaggcaccattttttgtaaaaattacgttcaaagaatgtttttttacatttttacgatttttccaaaaaataacacgaaaacaacataaaatcaacaaga

SEQ ID NO: 295985 - DNA, 4868 bp, Cannabis indica
cattacataatgtattactggtgtctaatgatcatttagctgtaggaggtcggacgttctgcaattgttttgttctcctatagaagcttgttttcacttctcctattcatcttttctttaaaattttgaatgatcaaacaatcgtccatagaataactgtttgtttagatttaatggtataatttctcttttcgctatattcttatattttattattatttatttaaatttttcacgagttaatgtgttttttggtaattaattaaaattgtctaataagggggctgtgttcaaatcttaaaacgatttcattttattgtttttcttgccgtgttaacatatacttttgagaaaacaactgtcctattagtaatggatttcaagaattaattataattttctaatgagggggctgtgtttaaatcttaaaaatattttattttattgtttttcttgctgggttagcgtatactgttgagcaaacaactgtcctattattaatggatttcaagacgtaaacgttgtatctctacatgggtaatgattcttctactaaatgatagttagctaaactttctaatttgagaatgtattgtttaattcatatttatttcatcactttatgtaacatgtctgctgtagacttgtagttcacctttctaaattatgagttttgattgatctctttttactagggtgattttgttgaaggaaatattatgtattgtttgcatacatagtaaatgcataacatgccgataagttcagtgaaatatgtcatctgttggtatagataaagtaggaaccattaaatatatatactttctttttgtttgtttgtttatttatttattaatttattttttgcagattgagccaattcctagtggaaatttgcctcctggttttgatccaagtagttgccgcagtgtgtgagtgtctgtttaatcttttttggttttcctttttatttgttcgacgtttccttgtatgttgtgggttttctcgcatgctattgtaattagttttacgctattgtaattagttttacgagtaatgctataggcacaatcaaattacacacaatgatgtgtattcaattttagccatatataattttaagtggggatcatatcaattttaatgtatagttgagattcattacacattattgtaggtataaagtgtgtaatttaagtgtcacaaatcacaatcattattcttaatttcacatatctgtttattataaccatattctccatagttacacgctttctttgttatgtttacctgttattaaatcacccatctcttgtaatgtttcttcttacattacgttttgttttttcacaattgagggcaatcacttatggctgaatctattttttttcccctttttctctcttctttctttaaaacttccagcttttttatttttgagaaattgcaggtacgttggtaacattcatacacaggtaacggagccacttcttcaagaggtttttgcaagtactggtgctgtggaaggctgcaagcttataagaaaggaaaaggtaatctcctaaatttttatttgattttcattatttttttcattctatctcgtgtagaagtttttaattctttgttgattaaatattttaaaacttggattatctagtaattagtttcttaattttgttttactgttttgtttgctttatcactttgttggttttcttgtttggttcatgcagtcatcctatggatttgttcattatttcgatcgtagatcagctgcccttgccatattgtctctcaatggaaggcatctgtaagtgaatttttaataatctatgtttgttaatttggtgatcattttctcttacatcttattatgtgattcaggtttggtcagcctatcaaagtaaattgggcatacgctagtggtcagagggaggatacatcaggttcgtttatgcttgtgtttaactatcatgcttgattgtcgaactggttttcgaatggtgtagcatttatctctgtatctgctttatgacaatgtttgttataatgcacaggtcattttaacatttttgttggtgatctcagccccgaggttaccgattctaccttgtttgcgtgcttttctgtttatcccagttgttcgtaagcttcagcactgtgactccgttttactcatttgattactgtttgttaagtgcacaactgcttatgcagttatagtacattacgtcattgatactgcttttatcatttagtttacttaagctcaatttacttggttattagtcatctctaatttctcctctttttcttagagatgcaagggttatgtgggatcagaaaactgggcgatcaagaggctttgggtttgtttcattccgaaaccagcaggtactgttttaatttggtctgctagtgtttttttcccctcttctattatgctatctttttgtaatcatctgtgtggcattgctttttcaggacgctcaaagtgcaataaatgacttaactggtgagaacgattttattgtctgtcatttatattttcttaaaaaaattgaagttttagcttaacttaatgaggatgtatgtccttaacttgcctaccttaataacttttgagtaattttgcatgtttttagttcttcttctccagtatacaatatggttttttttttcacctaaaatttcccaaaaatattaccataaataatctcatcaattgcaatttgactctttaaattcatcatgaccatcagacatttttgaacacccctatatttgacagaggctgaaacacttttgttttctattttcctttttttccaagcctattgctgattttttttacttcatttttcaggtaagtggttaggtagcagacagatacgatgtaattgggctacaaaaggtgctgtttcaaatgaggacgccaaaagcacagacgcaaaaagtgtggtagagctaacaaatggctcatcaggtgaggcaaatggctagtttcttttagttgttctagtttggaaagtgtgcactatcactaattttacttgtaaactgattttccattgtaaatagagggccactgtctcaagatatgaaattgtatatatcattttgattgtgcagaagatggcaaggaggcgactaacagtgaggccccagaaaacaaccctcaatatactacggtgtatgttggaaatcttgctcccgaagtaagtaattattgtcatatgcacggaactttatgctattgacgtggaatggtaggcgtgtctagttagtagcagaactgaacgttggttgtgaacaccttgtcaagatcatctaaccaaaaaaagtcattctacataatcaaaattgtccactcttttaagatggaattatttttgttgtcttggtgatattgcatcatagaggttacagcgttgatattaatgtgagcaaccttcttgttgggtgtccaatttacaggtcactcagctcgatttgcatcgtcattttcattcgcttggtgctggggtgctcgaagaggttagagttcagagtgataaaggtttggttttgtgaggtatagtactcatgctgaggcagctctggcaattcagatgggaaacacccagtcacttttatgtggacgacaaattaaggtgtggttcactacttcactcttggccattttatttttaactgaaccagtctagtctgatttgctttacttagagatgataccagttacttcacatgttgagacttcaatacgatcaagttttcaacccctgaaattttacaagtactggattaggctgttcaatctataggggcaggggacaattccttcctcgccagggaaacagggagtatgacatctaaccatttgtaataagatgcaatttcgtggaagtaccataattagctagtcttgtgttatcttatagggttattaaggttttgtaaagatgtcgtgttagtaaaaattcttgaaacctcctgagcaagaaattggagtgtgcagttgtgcattttgatgatcactgctaaggatatagtttctatttccaataattaactgaccttttttttttattgtagtgctcttgggggagcaagcccactccaccggggacagcttcgaacccattacctccccctgttgctgctgcacctttacctggcctctctgcgactgatattttggcctatgagcgtcagctacaaatgagcaagatgggaggtgtacatgccctcatgcatccacagggacagcatcttaagcaggctgcaatgggaatgggtgctgctggcgcaagccaggctatatatgacggcggattccagagtgttgctgctgctcagcaactcatgtactaccagtaatgcataattataacgctgtaatcccggtcatatttcctgtgttatgcagactttctcttgagttcataaaacctttaggaaattcctttttttttttatttaatcctttttcggggtggggacgtcaccctgcataatgtgattgctatttgtatggatgtgtatggtgtatgattttgtggtctttcttatgatgagtggttacgattatcagagggagttggttatagtataaacaagcagtgatggctttagatttttttttggttgctaatttgcttagtcttttttacattttgtttttaatttccaaccattcagctgattttgggttgtaaaccttcatttactgccgcttcccccatttttggcccgtattttaggtactgttgtgatgattaattctcgaatcgatatattattgattgtgattttggtctttagtattttttttttctatttaatttttatcataatctctacaa

SEQ ID NO: 295986 - DNA, 1997 bp, Cannabis indica
tttcccaccaaaatatgaggttggatggtttcttgcaagtaaattgatagttgagggggttttgccgcaaattactcttctttaattgggtgtagattagtttttccttcgatacaatacttgaacatgaagcgcttaagttctattgagagcataaatatcttatcggtaaaaaaaattaataaagactagtgaatatgtaattagagagacatttaagctctaattatgaataagtagttaaggtcatattaggaacagttggttactttgttagttatgttggttgttaggttcagttagcttctaattgtcactagttggttagattggtttaagtatttgttactgctacttgtatgtatgatcatgtaacttttacttaatcaatcaaaacatttctttttctctttcttttctgtttgtcttagcttctctttctctttttgttctttcttcttcttcttctgttcttcattgccaaagagatccaacatctccaacatggtatcagagctctgatcttggtattgatgacgaatatggcaaccactgatcctggtagctcaaatttcaatcaacacaataaggagctctgtttgcagcttcaagaaatcgaatcagggaccaagaagatgctactgtctacttcaatcatacaatcccgatcaaacttaatgatcacaactatcttctttggaagcaacgaattcttgttggatacgtcgaaaagatatttctccacctccttagtaccttagtgatgcagatcgtgttgcacaatgtaatatttcagaaatctaattatgaataattaagatttattatatattatggattaattaggtagtaatgagtaggatcatgatcccactaacctaatttatctacaagtgaataaataagcgtaatttattaattacagagatttatttagaatatgtggatataatgtaagttatttatgaaataaaaatattttcagattcggcgatcctggaaaccctattaaaggtcaaaaatataacaaccattttagttagtcatgttgatgagattattgagataagttgattttaaaaatgtcgagatattttataatttaccaacactcagctcagcttttttctacagttctactgcatctgttttttctcacagcacaactacaattacttttctccacagtacaattgtgccaaactggttcttaaagtgtcattttgtggcctcacctaacaggaacacactacaacattattagagttgccctaatagcaatgattttattttgatagagatatatatatttataaaataatctgattacgaattaactcaattttattttataaattaacattatgctatatctaatgctaaatataaatattgttctaaatttaacattaaaaataaacaaatattatatttattattatgctccaatacactaggaatattttatgttgcattatataacaaaaagtaaaatattattaatcctcatcaataaattaaatatttaaaaaacaattgatgagaatattgtaattaaaaaatatatattaaagatgatcattaatattaatgataaaaccatcattattatatatattgtgtactaaatttagtatatcttgtgttaaatttagtacaacttttaaaataggtctaatttaacacaagatttaacataagagctaatttttttaaaaaaatattaaaatatagcattataccactattttagcactccaccggatacactgctaggctaactgaaatggcagtaggggagagtgtggtacaggtacaataaggtaaatttaactattcagtttgatacatgtgatatagaagtacattatagtttctaaagtagttgcagcgctagttgcaataggagtttctatatgattttttattgcaatttaagttgcagcgctagttgcagtaggggttttacgtagaatttcggaaaaatgcaaaaaaaa

SEQ ID NO: 295987 - DNA, 8089 bp, Cannabis indica
tctagtgttccaacttccaacgcccatggctgctgctgctacttcttgttcttcactaagatgcctgcatcaaaggatagtgaagcttaattgtggtaattttgaatgcgaggaaccaaaacatgttgtggtttcaacaacagccatacccatacccatttctatttccagaagatgtgccattcttggaatgtcttcagtcttttctttgacccttccaatgggaggagctgatgccagagagagacgtagcaggaagatcattcctcctgaagattaccaaacaagtactactacaagtaacccccctttctttctttactatcttaatagtacttgattttgattaaagatttgaattttaaggtgataatggattgaaatattatgatgtggttgagggaaagggtccaattgctgagaagggatcaactgttcaggttcacatatatgaataatgtatttttttttgtttattattattatattttggaggggaaagggttattgaaaatataatttgataaagctttgatctttgttgattattaggttcattttgactgcttgtatcgtgggattactgctttgtcaagtcgagaatctaaactcttggctgggaatcgtgctattgctcaggttatctatctataatctctcattttggtatttactactttcgttttaaatatcatttttgagttcatttgtttaataagactaattggttggtggtaatatgcaaaattagccatacgagttcaaagtaggagatccaccagggaaagagaggaagcgtaattttgttgataatccaaatggtctattttcagcacaggcttcacctaagcctccaccagcattgtactcaatcacacaaggaatgaaagtaggaggcaaggttagctaccaaatatttgtttatcactatggggcaacacctgctgtagccttaagctacaccggtaatgtctcctcttaagcattccttattcttacgaccttctcttctcttctcttctcttctcttcttccttcataatcggtgctcctttgttcgtatgtgtctttcttgcacagcgagctgtgatagttccgccggagcttggctatggcaataaagggagtaatgagatccctgtaagctccctattgtttcatttctgtatctctattaattcacttgaattgaatggtgacttacatttgtttttttgcagcctggagctacttttgaactaaacattgagcttctacaagtgaacccatcccaaaacaactgaaagtgatcactgtctctgtatctatgtcatgagtttagttcttttcattttgttctttctctcttcaatcttatagaaatgcaaatttaactgaaacatggagaaaactttaccataaaacgtatggggtatgttggcaaaattttattgtaaagatcaattgaaagtgatacctatttgtgccatgagttttttctttctttcttcatattctttgtaaagagcaaatttgctgatttttgtgcaagtttttatggttggaagtaattattttataaattgctgataaaaatcaactccatcatgttcgtaaaatataaattagattatagattgttttgttcaacagagtagcattcttctctttctaaaatcctaaagagaacagaaagagagcttagaaaaaactcagcagttctctgaagacattaataaaaactcaaactgaaattagttcttgccatttgaaaacctatctgatatatttgaggatgtcacaagttaacacacactttttctttaattgtaagggactgtcctctctgcgttgaattcttatatctcatcgataaagtccagcagatcgtcaacttcctgccacaacacactgattttctgctgatgtagagcaacccggttctcaatttcctttcctccaatttttttctcatagcagtccacaactgttgagtgttttgccaacaatctctcttgtaaatctttctccttgacaatcagatcctcgacctatttaaaccaaatttaaaaaccaaccacgattagaaagtcaggtgctagaagcaaagggtatatgcatattgaacaatgagaacgaaaactcgactcgaagtcaatggaagacaaagtaagcaaaccttgggcaatatttgagcagcttgctgtgacgattgtagagatgccaacaatggcttcagttcttttgtgagctctttcaacgaaccatcagcagcttttcgagctgctttgcaggcttggatatctccagtccttgcaagatcgtgtaatgatgcttccagtttatcgtgaagtgttatgcaacgactgataatattttggacctgctgaactgcagctcgcacctaaaacaacacacccacataattggcacttttctgataattaacacaaactattaagtagatattgagtggaacaaccgctcacctcatcccactgaagtttagctagataagaaggagatgactttgagattgacatgtccgcgtgtatatacacaataccggtaagaaataggaaaagaaaaccagaaatcaacataagtggttccctaagcatggcaaaactgttgaacttgtaatagacctgcaaaaacaaagtgcaatataatgttgaagtcacacaagcttacctatgctctcttgagtagtcgaagaaaatatgaacaattattttcatatcagactatccgctatcatagatgagccatgtggagtataaataaatttctttactagtttgatacaccttatacaaagaaaattttccttatttcagtaagtttcatgaaattctgagtcacatgccctgcaactctatacgtatagcagtattattacctggaaatactgattatgctcgggcacaacattggttttttgcagtacaaccacaggtctaccagcaatatccaagtgggagatctttgtctgcggtgaataataaacacgacaataacagcgtcattcacttgatagaaaataaacacatccaaattataatatcaacattcaacaggtgatgagaggaaaatatagaatgataaccaaagatagtctggtaatacctcttgtgattgttttacaggaaatggtgtagacacagagatatccgcagagccctcgggtaaaacaacctgtagttccagtcacaaacatagaaacctattatcatgctaatcaaattatttacatatgacatcatagtaccagattcaaaggtaaagtatgctttacattctattcactattctgatctaacaccttcttatgttatttgagaatacacaattaatcaaactgtcttcatttcactaaccttcacaatgagagtatcaatgacaaggtcgttaatgggggaaccgaaagtgaagttaagaaagcgttttccctgtgactcaaataagaagtcatgaagcggcaagccatatccaatggtaaaagcagttctccaaccaccaaacaatggatacctaggctcgatttctagttccgtctgaattatggaaagaattgagtaagattgtatgaaaaccccataaaatcaattcctatttagaataactatctacctttttggaatcaccccataaatgagaagttgaaatattcccaatctcatctctataataaacagagcgagttctcggaggcaattttgcaacaagatgcctaaatgcagatgcacctctcacatgaggtcgggattggtaatcaagcctgcaacaaaaaagataaggagatgttagatcaaatcccaagaccagcagtgcaatcactacaagaaaacattttgtctgacctagaaaattcccccttgagttgggcacctccatggttaagattgtaatgctcagtcacctgaacattaccccagtgtgaaatctctagctctcgcaccaactcacgagcaacagcaaagggttgcttgttctcgaaatgaacaacaataggagagtacgagaaggggggaagattctcataggggccatacttaatctctgagccatgaatcttggtattatctaattttgtatacgattcaattctagcatcaggtaatttaacactgagtgattgaaacttgacagcataaggagagagaaagtatgagctatcttggaagactaggagctgtatctcagcctgagaaattttctcaggaaatggctgcaaggcatgagtgtaagcagccagtacatcaagagtaaagctttcccctttagccagtccctttggtagagtcaccgaataaaatgttaaggatgaaggcatgtctttagggtgggcaacttggacaggtaaactattagtgaaatcttttgcttttcccttcccaccattactggtggcacccaaataagccaaatatttaacctgtttatcagggaaagccaacagaacctccgaaaccaaattggaccctccattctccacctgccaagctcaagttcaaatcatattcaaaaatcccatttcagattttgggtcagcatccattttagctagcaggtcaaggtttaacattacaaacagtaactaaaaaagagtactaccttgagtgtggaaattacacgaacgatttgcgatctcaaatctgcctgcgacccaacaaaataaaaatgaagaaagtaaacaaacattacaagctcgtatccatagatctaaaacaaaaccgtagacttacccgtcggtcaaccttggagagaacgagatcggagagtacagtccgacaaagaaaggagattgaaacaacaaacataaacacgagcagatctaacctcaaacccattccctgcctatgaatcttcatgaccgctcaattatcagtgaagccacggcttcaaccaaccaatgatgaatctacgaactacgattacttcactttcaaagacttgggatttgtcgaggttttgttttgtctattgtgttattacgacgtcgttccaatcgatagtggagtaaacgacatgtcgtttagttttgatgccccctccccaaaaagaaatgacacatctagtttctcactcacttgtttaaaaaatattttctaaatttgattatttttcttgttctggttttggttctagctcaaccaatgttcactcattctctctaatttctccctctctttttctctcactccatggcttgatctctctccctctcccatagtcccactctctcttcctcctcagtcctcactcaccttgtccgttacacgccccatttctattcgaaggtaattttcttagatccacatgtttagaatgtgttaaagtccaaatttggagtgtacaacaataaattttaattaatgagagagtgtgtagattcatttcaatgtttaagggttcaataataaattaaaatcacactaaaatttaaggacctatttattctcgacgtgtatatctcgaagaagaaaatgtacaaataaaaattaaaacgaaaagaaaatcactttaaactgatatttaagtgaaaagttttgtattaccaaaatttttatcaaattttatcgtaacccatcgcaaatgaattgttaaatatcgttcttgcgttaaaaatcaaattttcaaaacaccatcacaaatgcattgttaatcatcaatttttcctaaaaatcaagtttgttttccataaaagcatctttaagcattgtaaaagcttatggagcatcacaaacacattgttatgtttaaaattctatagaattttttgttttatctttgaacaaaaataatttgagcaaagtcaataaatcatacatagaagtgtttgaaactttaaaattagtattttaggtgaatgttccttaatattttaacaatttaaaaaagattgtttgataatattgttgttgttatctgggtttttagaatccaaagtccaaatgccagtcaaggttggctcaaacttgggcccgatctcgtatactattcacctaaatgaccaagtcacgttagggccctgattcggacataagcctaactcctagacctgccaaggacgaatctccctaatccaaaaaaaaattattcggttcagaagctaagagtctatcaagacaagtccaaagaggcaatttgggagcgagaaattaaagaatcatttatgtagcattcggacatccatactcggaaccctccggacacaaggccccacagtgtcaaaacgtgtcccctacatcatactggcggggcacatatgctaccaaaaggagatcacatttttatccaatgccatatactctgacattctcggtacggactcagttgcacacgccacatggcctcttcgaccgttgctctgcttatacaaacaagcctcacaagtggctcaaaatcaataacaattgtattttatcccacagaggacaagttgatcctaagaaaccctatcgggtttgggtatgcccatacttgattctcccctataaatataacattatcccttcatgtaaagggtaggaaattgatttcttgagagaagaactgagaattagggttcctcaactagggcataaatacttgtaagaaatactttgaagcttttctagctcaataatattgactcgtggactaaagttctttaacactcgaaccacgtaaaaatcttgatctcctcttctttatttacttctttcttaagctttttttttatataaatcgaaaatcttagtcaacactttagtgctttcattgagagttgaggaaagaattaccaaagctgtcatctacaacgatggttgtaacttgaaaggcagtggccaaatgacctgcacgagatcctgcttgagatggtgcctgagatggtagagacgacgctgccaacaacgatgaaaactagctcccccaaacgactgctcaagtatttttcgtgggggatggggaaacattggaggtaggcactcatcatcatccaaaataccaacatcgtgggggacataacaaaaatggtcataacaaaaattacaacaaagaatatgaagacgagtaatacgagcatgatcccaaagtgatacgtttaggacaagaactcactgatacgcggaaaaggttggttgaccaggaggaatttttaagaaaattgtaagaaactcttacacagttacaggctaaattcccagaggaagatttcctcgttccactagttaataaccctcaagttgggtcgtctgccccagcaaaagataaaggaaaaggcatcatgggtgaccctccgtgaaaacatataaataacgcaccatgaaacatcagatacacagttggccaagcccagcaaagagaaagggatgctcatgccccaaggttgggccaactgatcgatctacagggcagagtcgtgtggagcaatgggtagagtgctcaagtacacagtcccaatgttcggggatggaaaaatttcccctatgactctattaaccagtgcgttcaagcaaagaacctagacctagaggacaacatgtcaacaatggaccttcaggatagcttgaatgcaaaaatagaaaaggcaaaaggtgagaaggcaaggcctcacagaggcgatttgaaaataaatagtatcaatgatagagtccgcgtacaagagctcccgaacgaccactcaagatggctaaaagatcaaatagctacattggcaaaactcacggactgtttggtctgaaaacatagttaagctgcatctgactcaaaaaacgaggaggtcaaaccatgcatgagaagaatcatcgaggcaccactattggacaacttctgaatgcctcaaatggaattgtatgaaggcaaaatggacccgagagcccacttgtctaaatacaataagttgattcaagtagcgcaagtcagggatgatgcaaaatgtttgtgcatttttttacattatctaaatttttcgaggattggtggaagagattatcgtcctattccatctgaagctaaaaggacttacaatctatattacgaagcagtttattgctgtaaaagactttgacatggaggtcaattcgttgaccaacatcaggcagcaacccagagaaagcctcaa

SEQ ID NO: 295988 - DNA, 5303 bp, Cannabis indica
tattttagatgacttatttatttttttatttttattatttgccttttaccttctccagtatcaataaagtataaatttagtttgcgaaggtctgttaatatctttgctagtttttcaattttttttttttggttcataaactcgagtaggtataataaaagacctatgtaccacacatagtccacactctcctgtatatatattatataatcacactcaaacaaccctttttaattcaaagcacataattaaagctaactatataatgatatttattataaattactggctcgtccactaacccagactgaataaagaaataaatgaccccattatataactctttctggtttgcttttaatagcatggttttcatgctttggacactgctataaatataatcctttattttgcatttatttaataaataataataataattattttttatctttttgcaatatgccattaaaattcatcatacaagcatagaaaatgcataaccaatgatttcattatccaacttttgctattgaatattacaaaccacacattataagcatacaaatataataaataaaaggtattattctacctaaattcatccacttcttaattgtctcctttgtcaggatttttttgggtattgctttaccctgcttaatttcctacacataataaattaacataattaaataattaatgatccaaaaaattccaagtgcacccttcatattgatacatttgttgaatatatatgataattttgacaaagtaataaggtgcgttttataataagataaaggggatttttataaaaatagcaatttttttgtattgtcaccttttttttacattttttatactaaattttcaaaaatactgtatttaaaattacaaaattattatattttaataaaataaaacaaaacaacttaacaaataacagaaaacaatcataaaataacaaaaacaaaaagataactaacaacgacaaataataacataatgacctaaccgcaatatgcaaaacaatataaatttttcaatatgctttcgtattacgatttattttacttaatttgactgacaacaaaaaaaaatatatataaagagataaaagaaagaaaaaaaaattataaaatctttaatatataaaaaagagtaaagaaaatagatagtataaatataaatataaaaattttattgtgaaaatataaatgtaaactttgtaaaaaaattagcatatgatgtaaagataagacagccaacaaattggtttttaattattcttcttttgatttatttttttttatatttttaataaaggttttataataaatagtatttcaaataacaatatatttagaaaaatttattactataatttgctagttataactaaagtttgggaggaacgcagaagtatatacaacattcagttttgggaataggagatcactgatataattaagtatagtgaccgtatcatttatctaataatttgtattaaatattattattggtacaattaaatattgaaaccatataatttcattgtgataattatatgtgatatcactaattaattataagtgagtgctagacaccattaagagtactgccttatgatcaaaataaaaaataaataataattattgatcactaaattacctaactacatgtaggtattagatcacaaacaaataaatattttttctcttttcatattgaatttcaaatatcatatttattattatttactgtatttatttaagaatggtggggaattaatggaaactctatagcggatatttctcatatgcttaatgttgcaacattgcagatacattgaaccaaaaatggttatatatttatttattaatctaattgggacgataaaaattggatgaactttgaaaatatgatattaattattaatgttcaatatttaagtatgaaaatatagataatgattatacagaaacttaacacacttatctagtaagcaatttcaattaattatatttattaattttccttatcaaaagtaacttgacacataagtgtgtgcgctttccaaatttgtatatgaattttttttgaagatggaaaatttattaagattaacaggcctcagccttaacaatgtcacacaaaaaagatggagcattcagcttattatacctacaacctaacgataaataagacgtcctaacaacataatgggcagccttatttgcagatcgattaacgaaagaaacaagaacattattcaaactagataaaatagtacgacagtccccaaatttgtatatgatttaatttggcgtaactatggataaattttttgtgatggtttgtaagagagtcataaacatttattttttggatgtctttttagctcagcttgcttgaaccagatgctggtttggattaattgcagaaacagaaagttgtctttgttacagatgcaccactggatcgggagcaccaagcaaaccaggttccgaagaggtgtgatgattgctgctactaatgcagtagtatatcacacttggatggccagaaataaagtgctttgggatggtgtttgtcccacaattgtttctacttgtaatctaatcaaaagagaacttcaccatacaaattattaaaaagttgtatagggaagattatcattgaggataaggattgggtttaaggaaatctgtaaagaggtctaagtgttctgtttttgagttgtaaagagggctttgtccctgattggagtttgtattttgaacatagtaatacaatcattctgattaaccaaaaaacaaagtttgtatatgatttatatgtatatatgtacaaattattactcttattattatgccatctctattggattgtttatatataactttatatatgaccaaaaagttaataaagttaagtactttcactatgggatttctcatgagaaaggaaaccaaaatcatgaccgggagttagccctttcaattaagctattaattagctttgttatacttcatccacccaaccgtcgtcatacgtttgcccctaaaggagtttatcaatacaagaactatcaaagacacaatttaaggaaactgagatttaaagacttgcaaaagttgctttagcctttagctcataagctttatttataggatgagaaaatactaattgcatgagaaaaaagctgaaaaacaaaataactaactctttaactgttactaacaggaaataaagtaacaattgtaataactaattagttatgttgtataatctcccctcagtgtagagtacaccttaagctttaagatagacaaatctatctttactcagggccttaattagaatgttagctacttgatcatcagagggcacatattgaatttcaaggtgtttagctaatatcaattcacgaacgaagtgtaaatcaatttcaatgtactttgatcgagcaggaaaactagattagcaattagtgatgtagcaccctgattgtctacccatataataggagctactagtagcttgacaggtaaattctgtaagaatagagatgatccactttatttaagcagctgagtttgctaaggctcgaaatttactctatgtacttgatacagctgtttgatgttggtcagggcactaactttaagatttatcttcctggtcgcaacaaactgcctttgaaagctaatctctaatgtattccaacaattaatcacggaactgggttctaactttctgaactattctttcgtgaatcccatcaatgtcaacggaaaacaaaaaaattatatatgtataaattcagcttacttatcatataataataaaaaaattgtagcacatttttaattagaaccatattatattataaatgtatgataataaattgtaattaattatagcacatttaaactattataataaattgtgcataattttagtaaaacttaaattttaatagaaccatattatgaatgtatttgattatataaaattaattttaataatctataggatacaatttttctaataagtaatgaaatatctacttcaatttttcatttttcttaatgacgtataaatttatagagatgagaaagccacttatcaacctataggttttatgatcgtaagttatgaatttatcaacttaactgatatacacattataacttaaaatttaagatgggatttgattggaatgaataaaaatataacactaaaaataaaaatgagaatagaaataataataaaatgtaatcttgtttttttttttggtaaggaaacaaatattgatgaaccaatcaaacttttacaacacactcccgaaagggagttcaaagaataagacatcaaaaaactatacatgtaaagctgtcatccaatccctatcaccattagaaatttttcagagtaaaattttgaactctattacaaatatcttgatgaattattctttctactgtgttcaaattactttaaagccctaaagagctttatcctgcactctctaaatatgatagacccaaagccgttgtatagagtcaaaccttttccttgactcaactatctcaataatcccccaacattgtattttgagcttttcaacccagctaagagttcacaagcctaagacagtcttgaccacaaatcacacaatttgggttggtaataattctaaactgagccaatctagactaaatttgcaatctttccaaacgagttaaccacaaaataaaagcatgctcgtgaatgattaaattaccccaaaccaactttgtctagaagagatgaaaaaagagacaaaatatcaataagctttttatacaccaaactaattattaaaatttttgttatctagtcattctttttattttattttattaaaataataaaaaaatcattttattaaaataatattctaatactttaaaatgcaattaaatagaataaaattggtttgtattctattttatgacctccacttaaacactacctaagtgtgaaccaataaaattgtaattcgtgtaaacttgtgttagatctttaccaatgtccacgctattttgttcacagaatattggacattttacaattttatatacattattttaattaattagaaaatatgtgcaaaaaaacttattatcattttctcatatatttttatatataattaaaaactttttttcgatttcttttataattgttaagcaaaaatttcacatttagaatattaaaaataaatgcaaaacacaatttcacctatgccaaaa

SEQ ID NO: 295989 - DNA, 3839 bp, Cannabis indica
tattttgagctgaattgagttgatattcagttgtttcaagttgagagtattcatgcctcatgtgtgaagaattataagaaaaattgaagaatatgattgagacacaacccaattcatctgtgcaaatctcacagtgccaatgtctaaagatctagacaaggccgatggtggaaaagtcatagccactgagttactcactgctgctaatttatgtgaggacccgagagatcaagcctttaaactaagacctcttgtttaacactaatttgaactattaagagttaagtactcactacctgagactttcattagaaaaccaaggacaacgattcctaattgttccaaaaatctttgttgtagtgcatggtcaaggtttcataagaatgtgggtacattcttgcctctttacccggggtttgtgtcgattgcttattactttggggtcttcccttaacagataaatttgaatggttactggattttgtaaaattggcctattctaactcctcataagatcaacttcttatgtacctaaaaagaagtcctaattaaaaaataattgcttctaccacttcaatcaattcagtgtgtacattgacaacatcacttaaagtaactatggcctctaccaccaagagtacttctatattcccgttatttcttcaagacatgtcaccttacaagaagctggtcctttcaaaaggcctgctccattaatttacatgaagagaagagtagatgctaggatgtcttatcttagcatactagaaaaggatggaaggatgttttttgctaatgtcaatctttgttgcaggggtctaataatgacttgtcagcaaatatatgttgattctcgcttcgataatgactcttggacaatgcctcttaaagatgaggagagtgggtagaatgacactatcattggatttgaagaaatgtgggaatatgatggagtttgtattgatgatgaagctaagactgaacctttaggtcaatggaggcttgtgtgtttggggaagttggagaatcagcaggttgctaatgcatcaaagtcattgagaatttatttgtttgtatttcatattttcttacatataaaccagttgttcttttggtctccagaaaagatgagtttcctcactgctatggcttcctgctataaaaggacgaaacctgtaatgaggaatcatgatccttccgtctgagaggtcatataagcagctcgtgactttttcagctcctccaaagaagtcaaggaggaaagagaacacttttgtgcccaacaatcctcattcgatgagacattcacctaatgtgaaagagaaggttattgaaaacaaagacgaagcctacaactctgagcacccagacaaggttgaactcgaagatgcaccagaagtgactgcaacaaaaatcgaagcacttctgcagaactagatagttgttattttttttgagggtgtggtcttagtcctcttttttagcatttaactttagtgtgttattcgatcatccctcacggtattttggggttgatatgacatggcaaaaatgttattagaatttgttccaatttaattagaaattattcctattaaattaggaatttattctaatattttttttttgtttttaccttatctgttaccgcatgacctctaacacttgcatagtattttatgtcttaagaaactcggttactgggagtaacctcaacatttcttaatgtttatttaccatgcaaaaactactcagttgtgcaaattttttttgaatgcctcttgttatcgcaatttttgtccacctgacgtggcacctccacttggcaaaaagtagaagacatattgaaaacaagtcagcactaaccagacaggttaccgccatgcaaaattctatcctgcaagatatcatggccacaaggttgacacaagtaggttctacctattaacaatatcatctaaaagacagaaatgtacaacagctggcaagatcctagccgggcctaaagctggttggccaaggtaaacaaggcatggggtagggtgcctaaggggagatcaacagactgcccaacactgctacaacatggctttgtctaaagcctagaaagaaaagatgcatgtcaagagctctagtgaagagtctacccaagggcaatgatgtttaggccaaagggaggaggcagactttgatcctcgctttggggatcctgtcgaatgctttggaccaatagaggattagaagaattagagatctatcccacccttccgacaaggaaattaaaaaacaggaaaggtttagcaccagaaataaaattagcatttataagatttctaaggttaaacctctatatctttgcttagtcgcatgaagaaatggtggggatcgatccataagtaatttctcatgcccttaacatagatccaaacttctgacctatacaaaagaaaaggaggttactaaatgaagagtgagcccaaggtttgaaagatgaagtcaaaatgttgtgcaccaatgacttcatcattaaagctttctacccgctcagggtgtccaatcctatcttgatacccaaaataaaaaacaagtggcgagtgtgcatagattttactgaccaacaaagcttgttcaaaggactgtttcctcctgccaagaattgatcacctagtagatgctacaactggtcatgaaatcctaagtttcatggatgcctatttaggctataatcaaatcaaaatgcatccacctgacaaagagcaaacaagtatcttgatggatgtaggtctgtacagctacaaagtcatgcctttgggactgaaaaatgcaagggctacttattaatagtaagcaaaatgttcaaagacctgatcggtcagaatatggaagtttatatggatgacatgcttttcatgtctaaaaatgttgagggcatataggttgtctaaatgaatgctttaagatctttcaagagtacaacatgaaacttaatcacctcaagtgttcttttagagtaggcttaggaaagttcctttgcttcatagtggatccccagggaatagaagaaacctcagagaagacttaagcccttttggacatgaagtcgcccaaaaagataaaagaagtgcaaagcttaactggccgcatagtagcacttagtgggttcatgtcaaagcccacaaataaatgtgtaccatttttcaacatgcttagaggaaattaaaaatttgaatggacagaggagtgtgaagcttccttccaagagttaaagaaacaactagcttaaccttctatcctatcaaaacctctagctaatgaggaattgggaagatacctcgcagtcatttagagattccagaatgagcaaagtccatgtgcacatcagtgggttgttggctggtaaagagttgagtaaaatgttgttcaattgttgttaaaatgctctgagtatcggtgacaatcgagccatcttggcatgtgagggaacaaatcgtgtttttggctcgtcgacaagaagcaaattgatgaaagtagcgcgtgttcttgtcaccgagtttaagccaagtaacgggggagcgctgttgccaatacgcctcctctttatagagaagcctatcaaggtccccttgaagttggctgcattgaagaatctcagtattggaagattgggggttgttttgaatgatctgaaattgagactggatgtttttgatttgacgaggaaggggaggtcctaccattttttgccactaggagagattaatagcgcaatgctgaagcttagtagcaaggttggatatattttaggaagaagaagatgaaacagagagagagagagagag

SEQ ID NO: 295990 - DNA, 3155 bp, Cannabis indica
cttttccagctgttgagtcccttctttccgaccttcgtaaatcccaccttaaatgtggtgaagacctcttcattactgtcattcgcagttatggacttgccagtcgccccaaatgttcactaaaaaccttcttgcggatccatgactttggtgtccaacgctcagtgagatccttgaactgtttgttgaatgctttggttcaaaacagacgttatgatttggtccgctgggtgtttgagaattccaagaataagtttgaagtggtgcccaatgtgtttacttgtaacattttggtcaaagcactatgccacaagaatgatttggagagtgcgcttaaggtgttggatgaaatgcccagcttgggtttggtccctaacgtggtcacttatactaccattataggtggttatgctatgcgaggtgatatggttggtgcaaagaggacttttattgagattttggatagagggtggctgcctgatgccactacatataccattttgatggacgggtatgctaaacaagggagactggctgatgctattaaggtaatggatgagatggacgagaatggaattcatccaaatgaagtaacttatggggttatgatcagagcttattgttaaagaaaacaagtactggtgaagcactaaatttgaattggggatatgcttaatggaaatttcataccaagctcggcgctatgttgcaaggtgattgatgtattgtgtcaacaagggaaggtggaggatgcttgtgagctgtggaagaaacttttaaagaacaattgtactccagacaatgctgtctctagtacgctcatatattggctttgtaaggaaggaaagatatgggaagccaggaagttatttgatcaattcgagaggggtttaattccaagtatgttgacttacaacacacttattgctggaatgtgtgagcagggagaattgtatgaagctgggagattgtgggatgacatggtggagaaaggttgtgctcctaatgcatttacctataatatgctgataaaaggattttgtaatattggaaaggcacaagaagggattagaattttggaggaaatgttgcataaaaaatgttcgcctaataagtcgacttatgctatgttgattgatgggctccattgtggaaaggaggaaatcgcgaaggttttttcattggcattggcaagtggaaacattgacaatgattgctgggatcttttctttgccaagatggttggaaatttggatactggagtaactgttctcaacaagattttgtcagattgttgattaagaggttgctttaaatgtataggagaattctccaataggggtgcctaaaacaaccctatgcataagggtgttttttttggcaaatataatcttaccacatcacaaatgtgttggtgtgtttgttgagcatgagtgcagcgtacgcttttatttttatttattttttactggacttgaagggagagacccaagccattcccatggctttacctcatcatgtttcttcatcatttccctgcctgactaagcttccatgccaagccgagttctttgatcatcttaagtggttcagtggttgagaaagaaagaatcgcagagtagagaagaagcacggttgggggtgagttttcctttcggttatcttttattttcagttttgtgctgaggaaggtgaaattagggtattaagtattatagcaattattttgacaaaaaaaaaaaaaagtattatatcaattttttttctttttttaaattttgtgtttcatgtcgatttagtgttctttctcttgttgtttaagatttttatggtttgatgaatggaacatgaatttataatgattatcttggtattgggtgctttgctctttgcaaaaatactaaacggccacaccggtgcagccttttttctgacttgttgacactaaatgggtattcatttgattgaaatgggaagttttcaattcgtatttgtgatcttaattgatggtttggtcaataaatttatttctttggcttctccattggttgctcaaaatttgcactgtgagaatctttcttcttcattcttctttctcgggctggttttttttgcttcagtgtcaatttgctgaaggggagtaatgtctaaggtattactttaaataaattgatatgattcattgacacagcaaagttttgattgaattatcttatgttgcattggattttgattttagaggccatcatgatctttcactgattttcaccatggagttacattcaatccttacatttagatttatttaccattattttaacttacagaaagatcccaatccattggcaatatgttgaactgaattaatatgtagaaagactttttgtatgcaatatatattatttttcaaagcaaaatgtattattttttaattagtatatggtatgtaaggaaattcagtttcttatattgaaaagaaagaagaaaatatagtcttcttgagaaatgatgaacttgttagtattattattataatattagatgcagtatttattcatcattttcttatattgttatgttgttttaaattgtaggctgtgaagattgcatcttaagcaacaaatggatcaaaaggggctgtgtctagttgagagctcagctatatatctcttctactctctttctttgtcccagcaaactaccctatcattccccaaaatagaaaaggaatggaagaactgttaaaattgtagccctgatttgatttcattagaaaactgtcaatctttgttagatgacaatcatgttgttattggatggtaattatattgtagaatttatcagcacccaatataggctcaaaatttatgtataatgtttactatagtagaatgttttcttgatccttttttgtctggatctagaaaaaagccattttgtccaacaaactaccaccaccactagatctaatatgttctttaaaatggaacccttcaagaaaagaaggcatacactacataattcatatttggtgtaatgtagtttttttacttattgttataaccttttctaatccaatattgtatgattcattaattgaaatcgtaattgacttagggtggtataataaaatagtataatgatgggtaaataat

SEQ ID NO: 295991 - DNA, 6048 bp, Cannabis indica
ctaaggagaaggaaggagtgagagagctactagctagtgtgtgtgtgaaagagagagagagtacgttatgttatatatttgggttttagctccctatttctttgaagctttgagatatttggaactgcgagaatttccacactcgtagttttccattatctctctagttttttttttcctcttttcatcctgatcagatcttacagtagttttttcgttttttttttaagcttgacccattttcttcttttgtgatttttttcttcccctagtaaagattgtggagaaactaacgaatagacaggtatatctatctatctatccatctattctatctactttcctttcctatttttaaattctgttcaagccgtctcattctttattgggtgttcttatgatgttgagtttgtgatgtatgcttctctataaagtttctttttctttttttctgcgatgttatggttgtagatctctttttccactctgtttctcggctcttttgatgttttcttttgtatttgagtctgtttctgatgggttttctcttttctgctccttagatctggattataattattattataattttggacccttcattctcatcttattttccagttctggataatgtttctcataatgaacaagactaaaattttctcactttctgccaaattttaccattcttgatttgccaattttacattcccatgattacttttaccgctttaattataattgtgaaaactttgtgcaaaaaagctctcttggctctattatatatgacatgttgtggttgcatgtgctctgtcttctgttttttttcttcagtttttgccaagatttgggggtatgtttggaagtaactaatgcttcagaaaaaaaaaaaaaagggaaaagtgattggcacaaagaaaatgatgaaaactttcttttgtttgaagaaattattaaattttgctttaattatgttttcacttttctttcttgccttttttgcttttcggggttcggtctaatctactgtatttttcttgacttattagtggagagagaaagagagagagagagtaggtttttatttatgagcggctgggtttgataaagttgggccccataatcatgtgatttttttaaagtcagtgtgacatgggagattaaaacgtcggtagttgcaatcagatcctgtgatttactcctaacaagtggttttaatggttgtttttaatactggatccattgttttctttgtaatactaatacggcttgttgtagaagtggacctttcacaactttttttgtcgtttacctttttcatttctttttgtataaaagagtacatttgttagttatctttgtaatggacctggcataaatcagtagctgtactcttccaaactttggggatcgtaggagtagtagcttgtaccatttctgctcttttgctgttcattctgaagatctggacattcttatagtagggtctccaatggatcagcttcatcttctttaaacaattctacaccattctcagttttcatgtttgtcttgtgatctctttatcatttattgtataatttaagatgcagataacttagtgaattattacaagttcattactgaagggaaagtggatgctatgcttgtctagtatgttatgagaaaatatttaaaaaatcttattcatgacttgataattcatatgtttgcagatatttcctaattctatacaagatgaagcataaagatgggaaaccggtgtaccagcaggataaaagttccagagttgttccaatgtcaatcatgtttgttgtgctgtgcgggttttcattctatcttggtggaatcttctgctctgagaagcatagattttacaccaacgaagccaaggatgctgtaaaagttgtccaatcttcattcaattcagcagcatcctctctccaagtgaaatctgtctctttcccccaatgcagcggtgaatatcaagattacactccttgtactgatccaaaggtatattgattagttattgccttgtataatgtgaattttagaattcgggaaaaactatatgtgttgtctaatgctgtaaactaatgtgttttccccttatttctgcagaaatggaagaagtatggcgttcatcgccttacgtttatggagcgtcattgccctcctgcttttgagaggaaagagtgcttaattccacctccagatggctataaggtaccaatcagatggccgaagagcagggatgaatgctggtaccggtaagtcagtgtacttttatgacatgttggtctggatattcagtttgagtttttgttctgttttgctgagctatacatgtggatctgggtccaggaatgtcccttatgattggattaacaagcagaaatcaaaccagaactggttgaggaaggaaggcgaaaagtttctctttcctggtgggggcactatgttccctagaggtgtaagtgactatgttgattcaatgcaaaaacttatccctgaaatgacagatgggaccgttcggactgccattgatactggctgtggggtgagtattttaatttccatgtccttatatatttctggtatttttattcattcatcgttagaatattccagagctgtacattttatttcctatcagagcagatcagatcatttttgggcttgcatagttaaattaaaaaagaaatgaagcttttctactgcaaattatagccatcttttagcattatatggtagtaagttaaagcttggagcacatattgttgatggctatataaagatcttttatcaaaatgatgtttaggttgcaagttggggaggtgatttgttggatcggggaatactaactatatcccttgctccaagagataatcatgaagctcaagtccagtttgccttggaacgtggaattccagcgatcctcggcattatttctactcagaggctccctttcccgtcaaactcatttgatatggctcattgttctagatgtctcattccgtggacagaattcggtaagtctttgtaaactatgatgtatacaaattaagaatttttattaaaactctgaagtttcttaatggttaagagttgcaaataagatactaaatgatcgcaattcataatttcacattcaaaaaacactaaacattgtgccacatgcatattagtcactagcttggatacaaatgatatttaatctgttttagcatgaaattcttcaattaaaatctttgtgataaagcatattgagtcttttataagtaacatcattttcgaggaaatttcttgaaattcttgtacctaaattcaactgaagcactaaactctagagtctagactgcctatacagtgaagttctctttatcaattggtgggatttgatgagaatggaaccttatttttgttattcctttcatcatttcaaacatggaaaggttttttttccctcacattacaatgacctttgaataaggaactggttttctatattagtagggcattatctgttagcttgcagctttaatcaactctaatatctctgctaccaggtggagtttaccttcaggaaattcaccgcatactccgtcctggaggtttttgggtgttgtctggtccaccagtaaactatgagcgccggtggcgtggatggaacacaaccattgaggatcaaagaagcgattataacaatctgcagaaactgcttactgccatgtgcttcaaattgtacaacaagaaggatgacattgctgtctggcggaaggcttcggacaatagttgctacaataaactttctaataatgctgacgcctatccaccaaaatgtgatgacagccttgaacctgatgctgcttggtatactcctctccgcccttgcattgttgttccaaaccaaaaatataagagaacagatttaaagtcggtctctaaatggcctgcgcggttgcatgctgctccagaacgtgtctcggatgttcacggagggagtgctagcacattcaagcatgatgatgacaagtggagggtgcgtgcgaagcactacaaaaagttgctttcatcaattgggtccaataagattagaaatgtaatggacatgaatacagtttacggaggcttcgctgcagctgtgattgacgatcctttgtgggtcatgaatgttgtctcttcttatgctaccaacacattagctgtggtctttgatcggggccttattggaacttaccatgattggtacttttgcttcatcaatcttctgcttttgagattcttgtcaatctttatgttgtagctgattgtggtatttcttttggcaggtgtgaagcattctctacttatcctcgtacttatgatcttcttcatcttgatggcctctttactgccgaaagtcacaggtaagaaatgtggattaatttgtggtgttttgtttatgcgcataatttatgttttgatttggtaaaaaggactactttatgctcttctggatatgagatgttatagtgtttgtgttcctatcttgagtttcaaatgaaccgaacataaccctaaaggaaatcatttcgctatgaaagaaaccatttaatgtcaaaacttaggcaccaagttttaatcacatgcttaacacttgtgagtggctccctgtactttgttcagatgtgacatgaagtatgtgctcttagagatggaccggatcctgcgaccaaatggctatgcaataattcgagaatctagttactttgtggatgctgtggctgcaatcgcgaaggggatgaaatggggttgtcggaaggaagacacagagtatggaatcgaaaaggagaagatattgatctgccagaaaaagctctggtattcctctaataagagttctcggtaacaaatatgagaatcatatcaattcatggtgataattagtcagagtacaactactactacctcgctattccatggttagaagaaagaagcgaagagaagctactacttcaccacaaagagatgcaacttttagaatcaaatttgttaattaaagactccaataagttgattttgttaattaatagggcttttcatatgatacaaatatatttgttaaaggtgccaaatctgtacttcggttattttccatttttggtccttggttcacccaatatttgtttcccttacattttaggttgattatgtattgatctgaatgcaatgggtggcaatgtcataccctcatagcttatatatatttttgtgtatttatataaatgagcgctgcagttgattactcctttgaattcatcatcacggtgttgtgatttactactagttttattatagcgtccgatagttttattttatttatttttctgagtgaacagttccataacttattattgacttttatatttctatttgaataaaatcaaattgtagcacaagtattggaaccgacaattgaaactttgcttacccaagaactgaaaaatagaatattgcttgttgttttgttaaaatatgaaccgttacaaaacatgtcacatgatataatgtaaactgtagagtgtaggtgacttttgtctttgtcttcacatgccaacgccaactcatccgtagcatggacaaatttgaatttgatttacttttctttgtcattatatatgatttggaagaaaaaaatattcaaattcaaagtcaattaataattgaagatttagcataaatttattataaaactatgtttcttatcctttcatttattgataagataaacagaaatttaatttgattagtgaaattgactaccctacatatttattgacaagattatatgctagaaaaaaacatttattaaatttaggggtgttcattggatcatatccaatggatttggacccatccgatctgatccaatccaattatttattggatattgaatttttccatccgatccaatccaattgaattgagtcatccgatccgatccgatccaatggatgtattggattggatcggttccatccattggatgctttaactggtttt

SEQ ID NO: 295992 - DNA, 3735 bp, Cannabis indica
ccatatatcggtccaatcggaccttcaaaaattctctaaaattctctcaattttaacacccattggacacatatcggactgataatcggacccctatcggatacaacaattgggcattcaaaaatgaacataaatcggacactatcgggccacccatcgagcccgatgtcttcaatcttgacagtacccagcattgattatagaccatcagacctacatcggactgcattagggtggcatcggacttgacttaaaaactagattctttctcaaaatgcaaatccgaccgatcctaccctaaatctaagccaaactcacaaatcatagaattttaaccctaaatctcaacgaacttattaataatctcttacaatttaaccataaattatgcaaaaattaaattaatagataaagggagtgacgaaaaactaaccttcgacattaccacggttgtgggtggtcgtgggtggtcctcggtggtggtcgtgggtggtcgtcggttcgtttgccgtggtttttggggattggggcagttgtggtcgagagagttcgagagacagagagaaagagagttcaaaatggggaaggtattttggggtgaacacaaatattggcctattttaaaaatattaggtatattattagtttaagagattaattttctccaaattatatgcataaaaattcaaaatttcctctatataatttgcattagtgtccaaacctaattactcttttattttatatatatatgtataatttgtaaaatatttatttatatatacgaaaattattattggtgcttagtatttttagtgtcatactgctattgatgtaattaagtatcaggtcttatataacttaagaaaataatttctaaaaaatatcactaatcaatcgtaaaattgggtgtgagaaaatattgagtaccactaatacttaataataatgctctattttataattatattaagaaagtacaaaataattaataacatagctccctcatagagatgaactttatataacaagatcatggttaaatgttataattaactcttttttcctttcaaaatactcatcattgtagatgagatcaagaatagagaaatctcattatatatggactatataatgatattgcgtagtggaaaactatagataaaaaacctggaatatatattgacattttccagaccaaaaattgtgatgtacaccctgtaactacaatatcttgtcccactatatataccttttacaaatgtcatatttatttattagtttaattaatttggttttaccattggtgttttaacttggacctttctttgtgactaaggtaactttttttacgtatacaatcttgtaaaaatactttttaatttggttggaaaaataagaatacactagtataaaaataattatgggagtatcattttttttctttcacattttgccacataaagaaattataaccaatattttttatacaatgatatacattatacgtataagtatagcagatattacactaatttcaacaaaaagtatgagtaattaattatggtgccaataataaaattagactcaaaaagttagttgtatatacgcatgtatactttatttttatgtgtgcaactaaataatttgaatatattttttattttgtaaattattcaaaattttggaaaaattagtgagatacttactgaaactataatatatttatacaccaccacatacaaataattttgttgtaatctttttatatgcggaaatagttgtacatgtttattttgcccttttaaacgcctatatataattaattattttgaatagtttttttggtaccataaaattatgtaaaaatttattaaaaattatgaccaaaaataaaaatactccaatgattagagaaaagagataacattctaatttttttgacaaatattctcaaaggcagactctttatagattagtattttttaaaaacagaaaccctcactactactgagtctgatgagcatgcatgacaaatctgagagggggacaaataatctcagaactttttatctctttatcttttatttgattaattattaatatacaaaaaagatcgagagatttgagttagaaattaattatactaaaataaaaaaaatcgatcctatagtataatttgaaaatatacatattatgattaagctgtgattcagcattaaagaaggtctttaataatttgatcaaccccacaaaagctcacatcagacgaaaagttgatgggaaatgtgagatcacagagagcatgggcgatgggcaagcttatatatatatatatatatataaatgtatatatatagtattatattacttttgaggtgagagctgtttttcttctttttaataaccctttgccaggcacgcccacccagtactactcaatatatattttatatgtttatttatatatatatttagcttatggttttcatttatttttgaaaaaatagcttactagctagctagtactgttttttgaggaggcttctttaaagcttttcttctttattgtctactttttcaattttcctagtctctcactataagattcatctcatctcatcactaaagctgctctaacatcaggtttacaatagaaaatttcaattattatatacttactttctcgattcttcaaaaagattcgtctctctctagttctgtttatatatatatatgatgagaaaaatattatatataacatacactgactcatatatatgctaattataagtaatttaaggtctcacaaaattacaagacccctacataaaggttttagtactgctctgaactatatatgtttattattttgcaatcggtacgtaaagttatgtaatgagaagcctatgtacgtacgttgctcgagttcagttattagccaaccaaagataattaatattctggaaaaatgtacatatatagtagtaattttgaagtaaaaatccaattatatatataagcaaatataggaacggatctagaatttaattttcaattttcaaatgtgattgtaataaagtcaccctagctagctagggaagaactagctactgatcataattaatatatattatacatatatgtatgttgatttaattaggtaattattcttttgtttattttgtgctctttttatgcttctttttggactcatcatatataacttgattaacctaagatttagtgagtgggaaacaaaatttcaaagaatccataaaaaacaatagtaagcttacaattgatgactctagagggcaccattatccattattaaatagaaagaataataattttgtttagagagagtagtgatcctatatatatatatacattctacacagtcaacgctctaagtcaaaaatccactacacatgtgcaggcacatatattagaaactttaattacttcttgtaaagttttacgaatatctaaaaataatatctgattacgtatgtactttactaatttctaagtttaatattgttgttggtttatatggagtggattagaaggttcttaattaactcaaatataattctgatgacttctataatttgccaaaccctattttaccagctacgtaccagaacttataagtactattgccaaatatagcctttttttcttacttttagcttttctttttttttttttccttaattaattttcttt

SEQ ID NO: 295993 - DNA, 4177 bp, Cannabis indica
ttgaatcatcaactaatgcaataagtatcgaatcatattgatccgatactaaattgcattaatattaaagatgagtaatgttccacaccacagatacttttagcaataaatccatcagcatcccccggtagaagcaacgatgagagccctattgtgacccgatactaaattgtgtatttaacgtaagacctatatcaacatcgccatgcagaagctgcgatgagaggcctgtccatccaccctaagagcaagcaaccattatcttcagtcaacctataaccttcacaagagtaaagtccaagcaatatctttgactgagtcaccgcgttcgcactcagttgaacccctttgaatcctttcccttccatcaatttcctccacttatccaacctctcgtgtctctcaattctctccggaccctcgtaagccacgatgttccgaatctcaggcgcaaaaatatactgctcaacccttagctctctgaggtgactcggctggaaaaagtcgcgtccaacgagtcaaaaatcgccgagtaataatgcaaagcctcgagaaatctgcctaaaaaatagggtccgttgtggctcgcttcttgttcaaccaaagtcactatattcggagcttgatctctaatcatggctagtaaattcccaagacaattgcccggaacacggtggagacggttgaccgagttgaccgccaatgcctcgccgactcggcggtggaacatgtggggttcgaggtgttcgagttgttccccaacggcatggaattcgaaagggacttggagtgagtgagccaactcggtcaagcaacgacccgtttctcgaaccgagtcaatggacgatccaacccctgttattcggagaaatggggacccacctgatcgtgctgacaaggcttgcataaatgctggccattgatatccttggagtatgtcgagatcgatgacgtggacacgtgattcggtctcgaaagcttcgaagattgcttgattggctgtgaaatgagcgaattttatgtagggacaagcttggtagactatttggtatatttttaagacttctaaagagtttggggaaaagggttgaaagattttgatgagttggatgaggtggtggtggtggtggtgggtgttattatggaattaggtgtggtgagagttgcggctagtcttgctgataaggcttcggtgaaacatgcggcgactcgttgcattgaatcaccgagtggtgtgacaatggtgttgaggtggtggagaaatcttctggctaacatgtactcctctttggatactgcttctgcacaggctagaagaagatgcactaattgaagcccactgtcttgttcatgctgcatgcatacgtatatataactcagtcataaattagcatttaacttgaaaagagaaataaaaaacacaatacataaaagggtaagtttatcatacacccatttttgttattgttgttgttttttaattgtttttacatttaaaagagttttttagttcaatttagaactattggttaatttttagaaaattttaaatagtttatagttttaaaaataaacttcaaacaattatttatattacacctactaaaaaaaataaaatttacatgtgatcctaaataattataatttacagttgttcataaaaaaaaattaaaatttgacttaaaagctaattatctagctagttatggaaaagtagtgtaccaaaacaccctttttagagatatactaaagattttctcaaaaaaattattagaagatggatacaaatttttgttaatgactacatacataaatattgaaattcaaacaatttaaattggtgcagaataatttaaaatttaagcaatatatattaaaatttttaacaaaaaacaattcttgaatcattgggaatggaaccatcttaaataaagttaatttatatttcttactacataagtatatgttaagtttgtgtataatttgtacgtgcacgtatcatttttcttatttaaataaggagataaaaagagagagagagacaaagatttgacctgatcaataggaggagggtgcatcatgagattgttattatgattattttggtgcatgttgtgttggtgattcttctcttgctgtcgttctagctgcaactgttgtgataagggaacactagtactagaattatgattatgattataggtagtgttgttgttgttgttagaagtatgatgatccgagtgttggtggttgttggtaatgatttgaatgttgttgttgttgttgttgttgttgttgataattagatgatgatgatgttgatgatattccagatatgatatcagagaccttagttaaggttgttgtggaattattctgattaataaaatcctccaaaagctcctcaatcgccggaagagcaaggctagtctctggctgctgctcctgttgttgtatatattgattgttcactgtgttcaacaccttatgaagtggactaagtcctttactacctgttccaaattccaatccaattttcaaattacagataaccattctcatcaaatcaaaaagagtataacatgttcaattaagacatttctttagtttatagcattaatatttacctctgctggtgctactattgaaagcatttcctagaggagaagaagaatataatcttggtggtgatgatgagtaaatgggtggcagagtactctggccctgttgttgttgttgcattgaactattatagttgtaattataagaagaagagagttgtggcgaggacatgtttctaacaggtgacatcaccatgaaatcgggcgaatcgaggttgtccgagaagagaatagaatcccacattgtgttgtcaggagattgaacaacagcttgatgatgatgatgatgatgatgatcttcattgttgatattgttgtctaactcctcaaatttcagatttgagaaatccaaacttggtggggttagtaagttctgttgttgttgttgttgtatatcagtagtagaagtagtattgtttgttatgattatgttcttatttggtactgatgaaattgatgatgtttggtcactaatactatttggtgatgttgttgttggtggtattgtggtgcacgagttttctctctttagagatcccatgcttccacatagggagttcatcattgcttcttttctttctttcttatctctcttatattaaaataataataataataataataaataaaaatattaaagttcaaatactagattagataccttaaaattcaataatgaagattgtatagatagaaagtaaacttttgctctttcttgctaatgctatagcccctaaagattagttttggaaaagggtttaggggaaatgagagagtgtttcttctctctttttatttggaaagttttgtcttttagtaaagatatattaattattaagaaaattttgattattaaagattttggggttattaattattataagtaattttaccaatattatcactaaccctctttacaaagttgttttagctgtaatttttgtttgaggcttaattaactttgtcattatttgtatagttattcaagccggcacagatacgaacaatgtgtggtttggaatcttattagaacctttttattatttatttttccttattggctggaactatttcttgctgtttaataaatatgtagaatatattcttgtgaaaataataataatataaatattaagaatgaaatatcattggttactagagaatgtaaatctaataaattataatattgtgccaagtgtttgtttagtattacattcttttcataatattgtttatattttatatttccaataaggttagagacccttttgatcgtatctaataataatatccattgctatagtattgtttagaattaaatttactatgtcttagcaaaacaaggtgaatatatataaataaaatcttcacaaggaccgcccacacaccctacctacgtaaatatatttatttttcccattgttttcagaaagatttctttaattttataatatataaatccatgttatgatcatgcatcgacttagtttaatccctgtgtatttagaacatcgtgttatattgtattgtattaatattatttaatacaatattat

SEQ ID NO: 295994 - DNA, 2467 bp, Cannabis indica
cacacacaccacacacacacacacaccacacacacacacacacacacacacacacacacacacacttgagatttgccaaatccattcgcatattgtaatctttaaagagctaccacagattctacaacacttgtgatgtattatctctagtatcaatacaagtaaacggggagtatgtcattacccgctaactaaggggtcaaacctctatacatctcgtgtctatttgttcttattgtgtaacacgtagtaagcatcaatattaaatttgacttcactgttggttggccaaatctgatgtcaacagtgacaacaaatgaaccagattgcattttggtaacaacatgagatctacaaggtcaaaagtacattgactttgaactaatttttattaaaatgaagttcaaagtaataaggtgtctatataacataataaggaaaaactctatattttgtgtgatccgaatcattagggatacaccacttaagccttttaggagtttgttgctcatatttggatgtggtattctttaagattgtgttggtttagtgggagttagtatttgagatgttctatcaagttgaaaaatattgatggtttaattctgtagataaagtatggaattaagttttgagtactttgaatgtactccttctattaaggtttaagcataaggttacaaagactaaataattaatcccaactaaggaggaccagttagagatggtcatgctaagatcacatgtgcatgtaatttctatgcaacacatccatgattcatctgtgtggtttgattgtattgatatacgtgagcattgataggtttagccatgctaaatgtggtgaaaaccgctttgttcctctgttagtataatcaatggactggatttttttttaatacctataattatgatagcaaaatttaagcgcttataagattatacactatcagaaaatatatgtagcttaagtggaagattgttagattaaaatcctcattgtgggctcatatgtattagtgtattgctttttgaagtttgacccaaataaagtaatcattttagtaacagtgtgtcgttgagtattaaagtgtcatgggctaaatgtgtagataccttaagattttctaatttattgaggggctaaattagaaatactaaaacataaaaacctaaatatgaggttatatattggtagtggtccccaagaatcaagagtcaatctaatctcttcttctcccatcaagagtgaaatttagaaaaccttaagtcttattttcttgaaagatcattatccaaaatcaccacatagatcacctttatcaatgaattaacgcttccgttatttgaattattatctttaaatcaacaaatgttttatttagatttatgtttataataatatataatatgtttgtccatgaaattaattttgatattacatattttatgagcgatgaagaaatctaacaagcgagatgagagggggatgaggtggttgggtgctcgtcgacgagagggaggacgaggcaaaaatctcctagagagagggatcgaggttgaagatgatagaagaactaaagagatttgattgagatttggggttttaacataactccactatagtcgagtatactatactcaactgtttaaaattgacgggtacagtatactcgagggatcaaaactgatggctattcttctgaaacgcacaattttaatttttatctcatagccgttttaaactgatatgaatactaaacgaccatttaaaactgatagatattctcaactataggtgttagttttaaacacacttaatattattagcgacggttctcgaaaaaattaatttgaggaccgacgggggaatagtccactttttatagtagtgtttgtttgacggtgatcataactttgggtttgaaatggtggctcgagattttaatagttttctggttaaaggatatacctctttctcacacgacatggttgaaacagagttggctgaagctatgagaatttgtgaggctctaagttggatcaatgagcatcggtagaactgggtgtttagagacgggttgtttgagtgtggttcaggcaatttgtaacactattgttatgatttctttatttggatatgctatttttgattgtaaagttttgattgatgagttgaaaaatgtttctatttttttttttcaagtaataaactaatatggtagttcataattttactatagcttacattttatatcatggttgtctcttcactttggagtttgtttaaactgagttattatattatttgataacaaagattaataatgattaataaaattaattttccactaaaaaaataaaattgaaaatgaaaatttgatgtttgttatgaaataatataaaataatataaagtagatgagaagaaagaagaagaagatgaagagagaaagagaaagtgaatg

SEQ ID NO: 295995 - DNA, 2444 bp, Cannabis indica
ttttttttttttgagaaaaattactgtaattatagtttattcaaatataatcttactattataaattttgaggtataataattaattaatgcagaactcatacaacttaatgggaagtaaaagtgaggtaacaccagcattggcagcaagaatatatggtgacaaatcggcatttttcgactgtggcttccgaggagttcaagacaccttatgggacgtaactggtcgacattatttcagtaattgttacatcgaaggagccgtagattttatctttggttatgctcaatcttattatcaggtaaataaataagtaaaaatatacataaaatctattcttttattttagattattttaattaaatttaattaattatttgcagaatacactgataaatgtgacagttgggaagatgatggaaaatgttaagtacatagggtacataacagcacaagggagagcaacagagaatgatcctggtgggtttgtatttgaaggagggtctgttgtagggagtgggcaagtgtatcttggtagagcttatggtgctttttcaagagtcatatttcatgccactaaatttgcttctaatatcattgttccacaaggatggtatgcttggtttaacaaaggccatgagtaagtacacccttaagttatatttactattttttaaaataatataatcatgtgactataatttacaaatatagagtatatttaacaattttaaactacttaattaaaatttaatttactataacattaaacatatatatatatattatcactataagaatgcatataggcatataagcatatatattaattcatcattagatggttgctaatgtatttaattttttctaaatttcgaattgagttagatttatgtgactttaatataagatcaactaattatttgaagaaatgaacaaactgcatggagatatattttgcaattattttatagattaagggtagttttgtagaagaaaaaaaaaatcagcaataaaaatctaaagagtcttaatttagagaagacaaatcttatttattctaatatacaaattacaaagtgttccatgcatcatcaattttatttatgtatttttacactatttaattacatttttattaattatgaaattatatatacaggaatacttttacatatgccgaggttcattgtgaaggagctggatcagacacatccaatcgtgtttcgtgggaaaaaaagcttagtcaatcagagttcaacactacttattccaaatcagtattcattaatcaagataattggatgcaaacacttcctcaatagctatagcctcaattaacttttatatttatattttttacaataagttttcgatttttaatatttatgcgaaaatatacatagttaggtcgttttaccaagctggcacctacctaaagtgtcattaagtatcgggttgtcatacatggtatcgtattgatcatgttttttaatattcgtggtaataaaacaatgcttaaattataggccttatgaaaatggtgacctatgttttggtcaatattttgatgttttgtttagtacaaattttcaaagtgttttatgtcaaaaaagtctctctctctcccccacattctcacactgtcacgtcacacataagttacattctcctaaatcaaatatttaggtattcaatctgttatggtaaaaaaatatttgaatttgagcgataagctaaatgccaataactaatttcaatgatgcaacttattaatttttatttttttttgtgagtgttattaattgtctttatatgagttgtttaaaagatgttaaacttatcaattaataaatataaatttgttcacggtattatgcttcttgaattttttacattattagacttaacgacttgggcctttgattattgggaacgatgtggccatggtcaattataaggaacgagatccactgctgtcgacggtcgtgtctatttctctctaacttgggattcgccacctatcgaggcatttgaagttcaacactgatacagtcatccgtctgagagtgaccgtacaagatgggagtcagagttgtattgtgtgaccatgataggaaaagattatcttttcgattgtgtggccctcctcaaccacttattctcctgatgtggcagaatgcttttgtcattctccaaagattgcatctttgtttgagaatgagatacatgaattaatcattgagtctgcttgtctatgagtttttaatgctataattgctaaatgttgtgttgattctcatttaggcattattgtgaaaggtatcattttatataattcgatcgattgcgtaaagcctacggtagtaacggaaccgtgaaaagtatagagaaagtatattttttttctattatattagtattagttagtgatctcggctcag

SEQ ID NO: 295996 - DNA, 5744 bp, Cannabis indica
aattaaataatatttcaattattgttaaacaaaattaggtggacaaataatataatatcacaacctgccttgttatcacaatctgccttgttagcacaaggaaaatataatgtcagttattttaccgccacaaaaaagtttggatgtagaaaaatataaacgctaaattataaagtatttatatcccaataactctaaataataataataatttacacagattggaaaaatgattgaaacctcatttgacaaaatttaagtgaaaattaagtgagaagaaagctggtattccgtccatggtaagagctgtctcggtctctccctaagttgtttagaatgtattatctatagtaggaggccataatggagagcataacggcagttgatgaggtgatcagaagttcctacattggtaaacattatcaacaagttgtagggaagcacatacagctgaaaaatagtcagctccattattttatagtttacaatcaaaatcattttgataaactagttttcacaactaattgcatgcaacaattttccacgaccaacatgattgtgagtgtctttgtctaagagtagatttagaagcagacagataaaatgtaaataatgaaatataaaaatgtaggattcttacattttataatacgaagtgagagttcatgccaagaaggaaatgaaaatacctggttattgtaaagaattgcgggaatgtaaccgcccacatattcgatcaaattcaaaataccagtatatgcctgcagatacaaacacacacatgaaactattaactataaatgaggaggttagtacataacgatgagcacaagataagctatactaaagatgtttctgacatgattatagacaatctactaaatatagaagtccactacaatatatctggtatgctaacactaaaagctgatctgttatcacccaaggggcactggcaaactaatttactagaaaaacagaagacattatcattctatggaaaatatgcatcaacaagttaaacagatatcacaccagagaggcaaccaagatacagccaaaaactagacaaagggagcgaagcagccgtttccccatccgcagtccccttcccgaatcttcaccatcttcctgcagaaaagatcaactcgagtatcaactaatttgaaagtcaatgcttcttgcttctgacccacataatttgagtaaaaatgtcttcattttgcaattttactcactgtaaatgtcggcgatacagctggttcaaaagacttcagcttctcaaatagccgataaacaaatgcaaaacctagaaattgcaaaggcttatactcggcattgcgcttgatgaaaatccaaagcatctgcgcaaaggtaagaaaaagattaggatgcaaaaattgtgattgatacaagccataatctaatggttaatgtacttgtagatgtaacttgtaagaaaggctggaatagtcagtcatccaacaatatagatcctttagaaacagtcataagtgtcaattacttctgaaaaaggtaaaatgctcaactttaagctttctagagtgtattggaacatgtgtctttgtctaaaacgtaagaactagatacaatgtggtccaatatttataatccttactatctgccaacagtaatcactaaaacaaatacagatgcagagaacaaatcactctctaaatcaccactacttacaaagaaggcagatattgcaaggttgatgcgtatatcttgcacagaagacttggtgaatctggaaagaaatcattatacaattagaatgtataagaaaattagtcttacacaaaaatgtttaaacgctatgccagacgtgggagatttaaaaagcttgaggtctaacatttaaagatccacgagttgttaacatagcatacgaaaagccaatacagatttagaaataagttcactagtatattcacaacgattgtgcacaaaaaattcctatgtaaaagcagatttggatgcacattttgccccaattttgctaagagactgtattcatattgcataattgtcagatctccattctcttgaagcaaacatctgaagcaaaatagatttaatatggttctggtgatgtgaagtgattgaggaactagctggggccaaattagaagatagataccttggcacatatctaacatgaaaattatgatttttgcctaagaaaaaaattgtctagccatcctattcacttccttttggaagttggtggacttccagatgttaaaatctcaaatcattaagaaatccagaagaatatatattctcaaatatatgaacacagcgaaaaagtaaatatttatagagatataatctacagtacatatatatttatttatatacacatattaatagacactaaccttggtccccacggtacaattggctgcttatcagcatatttaacatccttcgagacctgcattttccgttcgttttataaggataactaatacaagttgaaatagatggtaatggtagtgttttattctttgataatatcttcaaagacaaaagctacaaaaaaatacacattctacacattgtatttgtagtacccaaaaggctataaatacgtatgacactaataaaaaaggaaagttagtttctttaaatcttcacactgtatagatgaaatgttaacagcagacgaggttacaacaagaacaagcaatagagaatctagaattgtttgaaaatgcaaatgaagagagaccttaccgaaaagagaactcatgaacaaagtagagtagacatacacacagataatgcatatgcggcatgatcttgctttcgatgttgttagtgtattcaattgtaataacttgacacattgcaaatgccataaagaaaaggaatacacgttttcttttttccattaattttaatagtttcaaatcaaactataatggaaaaccatcaaatagacaaattatcacactgtaccttgaaggaaccaaatgtcatgccctttttccgattctgtaactgtgccatcatgaccttgtcatatgccttttccagctacacaaaccaaaaaaaaaaaggtacaattttaaatagatgaatatcatttcatttacataatagcttaaagagagttgtaacctactctggcagcagttgcctcatcacctctgctctcagcatccttaagctttcgcttatacttagcctttattgtatcaaaaccctcaattgggttaacaccaagaacctgaaaaacaagaacagtgaagagaaaacccaattgtgtgcacatatagaaatatatataaatatatatatttatatataagcccatttgtcaatcaatgtgaacaggtgcatatattatcatatatgagctcaaatcacctcatatggatttaagtcactgtctggactagaacttccagctgcagaagcagcactacaaactacccttcccttccatgttaatgtcctctgaaacctggccaatacttctagtgtcattcatttaaaacaaaaggtaaaaaaaaaatataaaacaaacaaacactaaaatattattgaatgcatcttatccaccaaatacccaaaagaaactgataagaaaaactaccgaaacactatcaatgcaagagtccaagaactaataacaactacgttacaaacaaacgaaacgataagataactttttcccgagaaaattgtacctgaggaaggaagatggaaaagtggaaagcgaagcatttggagtaggattccgtcggggaagatgaagcttgggattggggcagcgaagggaattggagattgccaaagccatttgctttgactcgaaaatcaatttgggagaaagtcggggctccaaggtttaatggagttttaagccgtcgtccccgaagtggaattcgcacatttcttgttttcgcacgtgtcaggaagaaaattactgaattaattattattagataatatatttagcacaaaagtagaaaatctgtcatcaactgttcgcgtggcctaatggataaggcgctcgcctccggagcgggagattgtgggttcgagtcccaccgtgaacgatattttagtttgttttttttaaaaaaaaatttaaaaaataaataaacaaagaaattaaagataagaaatataagtccgaatatgagtaatacttaaaataagctaataatttgatgtgaagaatgatttgttacgtttgagtttggagaactgattctagtctaaaatatcgattttgagacccaaaccaaaattttataagctcccaagttcaatttaatactagaagatttgaaaaccatagatttaggataaacagaaaagctgtatacaaacagcaaaagttcaatttaatactttgtgtgttatatgtttgatatttgttatgttgaaaagggttcaacttcatatcgtttgataagtgacaacagtcaataaatttataaacaaaaaatttaaaaaaatcactacaattatagtagtttactctttttattgctaaggtaatagagttacgtctacttagagctttattatcataaaaagttaattgtcttacaagagaattcaagaaaaaatggcaaaatctagctttgcttcataattaataaagagagaaagtgtgaagagaaagaagctctgaccaaataaagagaaagtaaagtgtgaaaaataagttaggggagaaagtaaagctctccttctataggggagaaaatcaaattaaactacaataaaataacaagaaaatttgtacaaaattcgctcagaaatcctacactagctcgcgagtcaattttgaggtatgaaacttcagaatagcggaggatgtgtgagacacacttagatgcaccttggatttaactttaatttgcaactggaatcacatcattatgataaaaaaatgagagttatgaccatttctagagcagcgtgcactgtagaaaagtgactacgagaacaacctgacttttgggtgcccaggttgacgtttatgtcaatctaggcgcccaagacttgggaacaaaataagatcgatgcccggaacgaaattgttgtttgaaggatagaacaccgagccctaggccaatgtcaatctgggtgcctaatgtgcttgcacactggcacctagtgatgcctaggggctaagttgttactcgaactatattttctcttgattctaattctcatatcttatttttggagcaaaacaaaaagaatgcttgagacaaaatttcaatcggatcgacgaaaccaccaaacccgtggctacgtcaacctgggcgcccagtaattgggtgatgttaacttgggcacccaaatttttatcgagggtctagatggcttcgtttgcttcccaaaagtacttgtatctcccttgtggatgaaaataagggaaattcccaaacaacttctctagaaagaagtcctggagtgccctcagttgagatacgtcaacctgggcgcccattatggcctcagggcatgcattgggcacctaggtacatattcgaaattgaattcgttgatgctcactcatcttttttggtgaaaagtgctccgcgaattttagtttcgtcaaatttttagggataatgagaaaagttctatacaaacggcaaaagttcaatttaatactttgtgtgtttcatatatgcttgatattttttgatgttgaaatgtaacgccctaatgctaaggcacgctac

SEQ ID NO: 295997 - DNA, 830 bp, Cannabis indica
aaaactcaatcaaagtgcctgagttcaaatctgcagctgaagcattatagtgatcgtcgattgagaagttggggtcctcatcagcttgctcagcactgccaccagtaaccccctcaactggaggatcagactctttagccttagctacttggacctccttctcgggcttcatcttctcgcatctcatcagcatggcatcacaatccactggcttcatataagaaaaactagcatctgggttggctaacaagaattgataaaaaatgtttgtggcaagctccacatatgagtctagttccacaaacttataaacagttgcacgatcattcagatctttgacatgtatactaggtctttattctatttctcaaagctttgaaagagtgttcgaaggttggtcctttcctcaattagctcattggccgtctttatttcagcctataggtcttcttgcaatatcttcacaaaaggtacctcgggaagctctttttttaagacctagaccttttgttggaatcataaagccacttgttgacatcgcccaaggaagcttattcattcttgaccttgtcctgaacttttttttgacttggctttgtctgcagtggcttgagcaactaaggcataatgcaattcaagataagtttcacgaaataatttgcacaaaacgtataagggatcaaaaaataccttggtcatgtctctaaggaggcttcccgccaacatttccagaggaagcatgtttgatcccttcagcatttcatttgcttcagcctagaaacaatcttggtagctcctaaacactgttggaatttattttaccaggatct

SEQ ID NO: 295998 - DNA, 5270 bp, Cannabis indica
taaatatacattggtatacctatcaaaaagaaatacctaaattgtgagtattaaaataggtaaaggtaaattcttaaataatttaataataatagttattggtgcaaatatttcaataataaatatatttatttattgatttggggccaaaaataataaacatatatgtcttctcataaaagctactcccaaaacttttgttgcatgaactgttcttaataatataaattaagcttataaaagttttctctcttccacttccacagaaccgaaccaagaagccaagaacataatctcattctcatctgagactttgcccgtttgattacccaactgaacaccctaaccagattttgaacttcacaccccaaccccactctcttctctttcaatttattttcacgattttaccatttggggctttttttctcttgtgggcaatggagtccacaaccacaccatcttgggaagaagatgaatggaatctctgcaacgacaacggctttgtctataagcgctggaggaggtcccaacttgacccattaggcgatgccctcccacctccgccggattccggtccggatcccgaggcggaggagatggctcggagagagcggaagaggaagacgctgttgaagctcaaagctcagtaccagagggaaattgaccagtgggagtatttatcgaataccttgtgtgcaatggaggaaactacgcttcagctccaacaacaacggcgtcaaacggtggttccggactcttctccgttaccggtggttccgcgaacggtttccgtttgtgggtcactggttcaagaacttgtgttgcaggtaaattgggaattttctacttccttcttcttggggtttgtctgttactataatgaaattggaattggggaatttaggtattcgttatttgggtattattagaacgtaaaatgttagctgaattggacaaattcaactatttgggactcaattgagcttaatttttgtttgttttagaaaatggaagaggaaagttttgaacttttattctagggtgaagttttgaaatagatgtttttaaggttatattacatgaataggttaactctagaatttcatgacatgttaataagaatttcttaccaattataagacagagtattttgtatgttggtatgaccaaataattcactttgatcagtagacttgtatttgaaaatggaatcaaattcttgaaagatagtattattaggttatgcatatggtttcttgaagatagaaaaaggaacctaaaaactaactaagctgtggtttgactttgactttgacttatccaacctgttcattacatccaaaaataaaaagtaagcttcctatgcaaagtgcaaactccttgttttggttgcacttaactttttgattatgagtgagagaagtgaaaacaggaataacttttttcatgttgtgaaagtaaaacctttcatttagcatatagtattgaacacactctccaattactgtctttcattatgcaggtggaaactcaggaagcaattattagagatgcttcaaatctttgtgatatagcagaagcaatttgcaatgctcatgaggaagagacaaatcagtctttaatcgatctcccgatatgggctgtaccagcttcaccgcgagagcttttagcatcactttgtgattagtgggtattttctttttcttcttttgttgatgattatttggttgggtttttattagtaaggaaacaaacaggagggtcttccactgctattggtgatccctaccttcaaaagtaatctcactgtttaaaattttactgtaatttgttgtcgtgtagaatttctttctttttttttttaccttttgtagtcatttgatttagtggaaagtttgtaagtaatcttcctataatgaggataagaaatatgtgcaacttaaaactgagtgttgtttaggagtaagcattgtaccatgctgtaagttctctatagcctgtatattttgtcatgaaatttactcatcatgtgtttggattgtcttatattttcttatgcttattagaaattactttgattattgctaccgggcttatttagaagtgaatgattgaggccagagaatagtacaatcctatgcttttccaaaggcatgttattatgcctaacaatatcttgacataatctcattatgattgaaaaactagtgaaatcctaggcttctataactgttttgaaatgttattaacttataagaaacttacttatttctatactcgaatttgagtgatcagtcaatgttataatttgtatttgtgtactaataaaatatgcaattaatttgtattataaaagaacttttcttttttgtttggtttctactgaatgccattctttgacgagagccaaaaaaataactgtgatttctaaggtttccatctaagaacacaacttaaaaataaaatgtggcaaaataaaagaatccaaagtaagcttgaaaagaatacgaatggtggtgactcaaatgattccaattttgctctggtacgatttcctaatttccaagggttgtgagatcaacttcatttagtagagaaggaactacttcaattggcacaattctgaaaccagctttgtcgcatgcatcctctaattgcttcacttgcaaagaaccatcagggcaaaacacaaccacagctccaccgctacctgtaaatttcgatgcagcttctacgcctcgggctacttgcaccatttctaagttcatagcaccaagaacatcatcgccaaacatgctcctgtacatcatccatttatcatgatttagtataaagttaataaaatgcacaaggactttaatttgaagattcacagaatgttctttatccctattgacttgtttacagggcatgtacttctgataaaaatattggtaagatacctacctagtacctagtgtaaatgacagttggataatcttgaattgaagtagagtataatccattaatagcctctatagatgcctaagacgacactagctgacatttcatatgtggttgaacttaaatagagagtataatccattaatagcttctttctataaggtgcctaaatctagtattgctatggacgaccaagagtcctacaaaatttagtttaaaatttaattagagataacatattaaaatacactaattggtgttggtgtatcaagtaatagtgttggacaccatttatcagtatgtcattgttggttgaatttaaaatagaccacacttactagagaaatactaaaaagtattcctcgtgtttagtatcttcctcggtgtcatattactgttggtataattaagtatcgggtctcatataactcgacactactggagctcggtagcaatgctccactcttactataaaacatcctaaaccacacaaaacatgacacctacttatgttgggaaacttaaggtacggcagaagtacatctaagtcagtcaaaaccagatatcccttgccttctaagatcaaaattgcggttcatcagagttttaagtttggtgtagtcctttttaagcaatgccgtccttccctcctcagctacatttgcaacttctttcattgttgatattataaactcatcaccatcaagccacctttgccgaactgtgctgtgtacctgacatgtatttaaatagttctacagttacagtttcacactcacttttttaatctaatttgcccaaatgaaaaccacaaaaaatatatcctaaccttgccagaatcacttggattttcagcatagatgagatatagaggtgggaggagactggtgtccatgggtgtataaataccatgacccaacttatccaaatgttccttactaaaatcctaacaaaaacaaaaccaaggaaaattatacgtagaatacaaagtcattaaactcagaaatcattttaattttttgaaatttctaataagataaatatataccatgtaaacaagtcctccataaacctgggcaaccctatcttgaagaccagcaacaattccaagctctttctcagcattgagaataagctgaggcctaatttccactctgattaactgcctaacattgtagaaatcaagaagacagcttaaggcagcacatacaatagcacttgaacctgaaagtcctgtctgaaaatgtgcaaattataaattttctctctctatatatatatataagattccaatacatagtggcaagttcatcaaaaaatgcagcttctaaggaaagaagtgggtgttaattacctgtcgagggatattagtttcatatgaaagagtgaatttttcggcatgaagatcaattttctcttctttacaataattacgaaaaactttacaaatcgccataagaagtctcacaccaccatagtaaccttcattctccagccgatcaacctataaaataatataacaaaaaactttacataggaatatgatcgaacacgtacgtagcatcacaaaacagagtataataataccaagtggtcgagagatctaaagttgacgagatcgtgaatcgggtgaggtgagatgatcaattcatcagaaggttccaatctgaccgaagcccagaaatttccgagagagaaagagatagctttaccgtagtagacatcgctggggttccccagaaaaccaactctggcgaaggccttgtgctcgatcgttgactgagaacccattttgaattgccgctcaaatctatactgaatattgaatattgtaatgtaaagagtaagtttatggctttgttattggtttggtttcttccgagttaagagagatattaactcagtgagtcgtggagtttccgagtcgaggttataaatagatagaaagaatttatcatcaaaaacaaaatagagagaagacaacgtaatgcgtttcaggtctatatttattgttatcgccacgtcagcataagcacgtgaccattacacttcattgttggatggtacttgcttgctaatctaaatctaagtctgtcggtgaggccgttgcacctcaaccagcgtgagaaatttagttgagtgagggcttgaataaatgttaagtcaaaactaataaaaataatgataaatgtatcttttaaattttcatcttcaacaaaataaaataatactattgacaaaaataaaataaaatattattaatggtattattttattttttaataaagtattatttttttattatttgtattggactactttta

SEQ ID NO: 295999 - DNA, 3756 bp, Cannabis indica
aaacctaaaaaaaaaaaaaaagtcatttttcctcaaactttagaatggtgaatggtcattgattggcaaagatgggctttttattcaagatcttcacattgggcctgtataataggattggaagccttatcatttttgttccagaataaagtaatggattcttcttcaccagtcaccacacccacacgtttacaaagctgcatacgtcgactctagcttctcccactctccactctcaccaatcaatcaccattcacgattcaccaatatggcaatagcaacaacaggacacttccactttaggtgaattgaaacacaattatatccaaaattggttccaaattccaactaaggtaatgaaggaatcacgaacattggatcagctggccaaactaattgcaacgctggtggtgatgatgatgtacacgtgtcaagcaacgattagcccttacaatctccatcccctgatcctaatcccgggcaacggcggaaaccagctagaagccaggctgaccagcgcttacgagccgccgagtctgttgtgcaaccggtggtacccgatttccagaaacaaggatggttggttcaggctatggttcgaccccagcgtcctattggctccttttaccaagtgcttcgctcaccgtatgaccctctactacgacctgggcaccgatgattaccataatgcccctggggtccagacccgggttccccatttcggatccacccaatccctcctctacctcaaccctcatctcaagtaagttaagctcacacctcactcacccacccagtttcctgctaatgaaatttatctatcaaactaaaaattacaaagaaatgttcaaactcacaataaatttgttcttacttcttttaacatttttggttaatattatatttaacaaaccaaacatcaaaatactattacatttagattgtaaggacaactaataataaattaaatataatggaactactgtggtgtgactaaatctaaaagatattaaacaactaaatgatacatattgattagaaagaatgagaatttaacatataaataattgtttatgattaaattattgtttggtgaagttaagtttgctttgctttgttttatgaagttctaaattagtgaactacacaaatttcagagagataacagggtatatggcacatctagtggagtctttggaggaaatagggtacgaggacgggaaaaccctgttcggagccccatacgacttccggtacggtttagctgcggagggtcatccgacccgagttggctccaagtatctacaggaccttaaagctttgatagagaacgcaagctcctccaatggcggcaagccagtaatccttctctctcacagcttaggaggactctttgccctccaattcctcaatcgaaaccctctctcatggcgccgaaaattcgtcaaacacttcatcgcaatctcggctccatggggcggcactgtggaggagatgctcacctttgcttccgggtactcgcttggagttccactcgttgagccattgctagtaagggacgagcagaggagctcggagagcaatctgtggctgatgcccaaccccaatttgttcggtcgggaaagggcattggtgattactccaaacgacaattatacggcgtacgacatccccgaattcctaaacgacattggattccctcaaggggtctatccttacaaaactcgcatactgcctctgatggatcggaatcaactggcggcgcctggggtccccgtctcgtgcgtgatcggaagtggggtacggacaccagaaactctgttctacgggccgaatgggttcgatgagcaaccagagattgtctatggagatggagatgggacggtgaatatggtcagcttgttggggcttgagtcgttatggagccattctcagaaccaaacgcttagagtgattaaaattgttggagcttctcatactcaaatactaaaagatggagctgccctttctgaaatagtacggcaaatttctactatcaattcccagttcagttttgggaaatgacaaacattgtattattttcattcaactaatgacaaattataaataataactatgtctattgtttgtgtcaaattcaggatctaatcttattctcattgatttaattttttatgtacaaagcaagcttgcggcaagactaattacaagccataatcttaggaaaaacatttcactaataccaaataaatgatatatgcctatatagattatcctataattaatatgaaataatatgatatcaatgccaaatcatattttaacacccccttaagttggagcacgcaagtaaaaatgtccaacttgtgaaccagaagatcaaactgcttgtttcccaaatctttggtaaaactattcaccaattgaattgtcctggggaatataagatggcgcaataagaccatcttgaataatattacgaataaaatgacaatcaacctcaatatatttgatacgttcatgaaagattagattttgggctatatgtaatgtagattgactatcatagaaaagaagaatagcctttagattatgaacacctaaactcgaaagcaaaccattcaaccatttcaattcacaagtaatagatgtcatagaacgatattcagtctcgacagaagaaaaagatattgtatgttacttcttaatttttcatgaaattagtgaatgccctaaaacacaatccaaccagtgagagatcatcttgttagaggataagatgcccaatccgagttacaccaacctgtcaaagacaactcactatcatatcgcaataatgccttggtctagagaattctttaaattacgaacaactagcaacgcatcattctagtgggtttgtctcggttcttgcataaattgggataggacatgaattgagtatgccaagtcaggacgagtaacttccaaataaataaggcgcccaagcaaacgacgataaggctccagattcgaaagacatggccctatcccacgagtcagtacatgattttgttcaattgggaatgaaactggctttgagcctaacaattcagcttataaaatgatatcaagtgcatatttcctatatatgacataaaaacaatccaaaagtgcttcgagccacccccaatgcctagaaaattattaagcacacttagatctttcatatgaaaataattgctgaaatataatttaaaacttgttatcgcagtggaatcattatcagaaattaccaaatcatcaacatacactaagacactggccctttggtgtaagtgaataaagaacactcagagtatgattgaaggaaaccataccccttcaaagctttgaaaagctttgcaaacaacatcgagggggctaccgtaaaccatacaatgacttgcgcaaacggcaaaccataatggaatctttagattgaaacgcaggatggagtttcatatatacctcctcatctaagtcgacatgaagaaaggcaatataaacatccatttgatgtaactctcaattctttgaggcagcaatggccaagaaagcacaaactatcaccaattttgctactgtagcaaacgtctcattgtagttaatgccttcaatttgatggttaccaaacataactaatcgggccttatatctctcaatacttctatcagagttgtatttaattttgtatactcatttatgttgggttttatgccctaaataaaactcttt

SEQ ID NO: 296000 - DNA, 4165 bp, Cannabis indica
attatgttcataagattgtgtgttagcaggtacaatttattacatttggctaaactgaaatttgtgtataaataagaaaagtatatgcatccatgttgtatagaatagcattgaagagagattcaaaagtagaattaatcttgtacaggaaatgaaattgtcttgcatattaaattgttcttgaaaatataaaagagttataagtttctattttgaagggtaatttctccttgtggaagtaattggttcggtttaattaatagaaattatgttttttgataagaaaaattaataaagtaaataatttaaaagataattacagcaaaactatgtatttaaacaaattcgtagcaaaaatacttaagtaatcaactttgttatagtttacttttatactgaaaggtagaatttttttcaaaaatattgtatttttttcataaatactgtgtaagtttcatactgtgtactgtgttaaattttcactattgttttacgatttttttttagttgttctactgttatttttaatcgttctgttttgtagttttactgatattttataaaaagacagtattcgtgtaaaaaattccgtctcacattaaaattgtaaattttaacccaaaatttaatattttttttttttgtaaaaatcccaaaaaactttccaatgctaaaagtcatatatatggaagagagagagagttgggcggaattaggattagaaagggtaggtaggtaggtagggttgaagcacttagtagacttttgttattttatatttatttaatttgtgtagatatggaaggaagggtatagtattagtgtccctcttttaggggtggacagaaactagaaagggtttaaaaggcggctttagtgggaaggaatcctgaagtgggttttaacttttagctacttcaattcaacccatatataaagtaataaagcaataccaatatatcaaatattaaaataccaatgccccctcaccatcaaatgctgcctcaataatatatttttaattaggatgtattaacacattagaaataaaagaaaattacaaaatttaaaaaaaaatatatctaaaaaaaaaagaaaaaggacaaccaaaatatataatcttattcagattactaagatataatcttattcagattgaaaaaaatataaaaagaacaaatattataagaaaaaatacaaattactaaaatataattttatttagtttgagaaaatataaaaagagcaaggattataagaaaaaaaaatacaaattactaaaatataatcttatttagtttgagaaaaccataaaaagcacaaggacaatgggaaaaaaaattacaaattactaagataatcttattcaatttaaatatataaatatatatatatatatatatatataaaacatggactataagaaacaaaagagcaagaagtttgacacatgcacatatttttttaaggaaaccctttttttaaagaaccaaaacaactgttacagacgaatacagaaaacgatatgtccaaatatttgcacctacaccactagtaacagaagtagctagtgtgtgagaacgccattcgcgaaatacaaaatagtattacaagaactactactaccaccacctaataaacaaacaaatctcataaataatagactgataaaaaacattaagattcaggttattaacccaactaacaacaactgttgaatcacagtcaacccgtaacaaactaaaaccaaaccgaagagccatttccaagtcaagccgtacagctagcagctctgccactaggaccgcaaaatcaccaacagcgccgacaacccacgaagcccacaaaaccccagatccatctcgaacaacaccacccaaattaacaaaacctgtacctggaaccaccgcagcatccgtggccaatgcaaagccagccaacggtggcagccacctagaagaactttgcaaaatagtctctatagccacctgaaagaagcatatctccctatgatcttggaactccgacagtgcatcaaatgcaagctcaggcagaatatcaactcgcaaaagtgtacccccaaacaacattgaatttcttcaaaccaaacccaccaaaacaacatcaaagctcgctcaaaattgccacgagaaagcacctcagacaagacccttaatacctctgaaactagaccaccaagacacttatgtaagctcgaccaaaggcccacccgcacccacatctgcactaaactagaacaaacaaatagagcatgttctggtgtctctgaatcatcaccacacctcaaacaaatcagcgacaaaagaatctttcaaaatcatagttgggaagccaccggtaaagctaagttaaaaaggtgccaaacaaagatcttcactttaggcgatatattcaaattctaaacaatattccaccatcgagtcataggagtggtatcagccaccccgtcctcacattgtagtgaccacgctaaagaatagccacttttaacactatacacaccatctctatcatagtgctaacaccatgtatcactccttgatccccttgccaaaggtatactcagaataacctccacatccatagaaataaagaaacgtcgtaacttcaaaacatcccaagacctatcttgagtaataaactcactaacccgattgtcatcatcgcctcattgcataatagttttgaaagtctgaggtctagggatccaaggatcaagaaacgcttagacttgtgttctgtcgctaattgattatctaattcccttatttaacaacttaagcccccaaataaggctagaccataagtcaaaatataatttttagtgagtgagtgacttgtcttgtctagcattgatgtgacttgtgaagaataagtcgccttgtttagtgagatttccgaaaatcaattatttgttagagctaaagaataataatttaaagacaaagagaacaagaataaccagaatttttacgtcgttggagcattaacgagctttagtccacgagtcattattattattatcatgaggctagaaaaatcttaggacaagaagatatgaactctctattttgcatgagaaaagtaaataataaaattctaacccttttgcatgtagggttcgttgcatatttatagtgcgtagagatcatattagttactattttttttttctctaatggggtgtttacaaataatatattaactttggacttatctggtgaagcctggcccatgaggcgccttgtgtatgctgacgtggagccacatcacaataccaattgttaaaacttattttatcttcgtgggaattaatgacacattaactacttgattgccaattactatctttgcttattttgcaagatatgatcttcctttggagattcttggaaagccatcccgaatcttgtgcgatttggtagtaaataaaaaactatgcctggcttctagatacttgctagaggcttcttccggccacgcagttttatgtcttccatacgctgaccattctagatggaatctcgcctagacgaatcagtcattcctcatcccattaggatggtcacttatggatccagctagtttttttttatttaggccaactattgggtctgtaatatttaagttgtatttattaaaggttgggttgctccttactgtgtggatggatgggtggagtgtaaagctaaaactttcaagaattccagattaccttcatctatagttgacaactttctatttttttttaaattaatgctacacatggcatcacattattgatctgtagagttaacttttcaacatcatatttcaacacatggcatcacattattgatccataatctaaagtcattcgtaccagtttacttttcaacatcgtatttcgcgacagccatgattacaaaccttgctctgatacaagtttgttgtgcgaaacggaaacaatcaataattacgatttagtttacaataccaacaaacacgcaatacaatcaagaaataataaatcaagagatctcaagaataacagaaaagaataacaccggtgtaacgccctgtccaacagggacgccacgtgtgtgtgtgtgtgtgtgtgtgtgtgtgtgtgtgttgttttaattaaattttattaatatatata

SEQ ID NO: 296001 - DNA, 2658 bp, Cannabis indica
tttttttttaaaaaaaagtggggatcaaatgtctcggatatataacactctcataaactcaattaattgaagtaaccagtggtagtctaaatggatgagtgagaaagagaaactgtatgatccaattggtcaaatttgtctttgaaacctcaaacaattttataaacatgacttacacttgcaattttctagaattgtatgataagagtgtttgttggtatatatttgttgtactatgagtttatctgtactttgaattaggggtgttcatcaaaccgctcaaactgctcaaaccgcccgcaccgcaccacaccgtaaaaaaaatgcagtttgaaattctttgcggtgcggtcacggtttgaatttttcctaaaccgcgcggtgcggtgcggtttgcggttttaaattgttaatatgcggttcaaaccgcaccgcaccgcacattataaaaataccaatttttatatttatttaggtccaatatgtgaatgttcaactcaaagtccactaattattgtattgttgacacttatttttttttttacatatttatattcaagccttatggtattttgacaagttttgctcaaagtttgttgtatttgtgatagtttaattatttagtgatagtccaaaccgcataaaccacaaaaaccgcaccgcaccgcactattttttgcggtgcggtttttgcgggtttttagtttcgcggtgcgggtgcggtttgggaatttggaaaaaccgcacgtgcgggttggtttgaaaaatggtcaaaaaccgcaccacccgcaccgcgaacacccctactttaaatgaataccgcatacaaactttgaacaagaattttgtaattgtgttttagtgtcatctatataacatagacagatgagtaaaaaaattgtaatgaaaaatagagtcacaaacacaaaactttacattgagatattaatcttttattatgtacttggtcacagaactttacattgagatataaatctttaataaacaaataaagtgaatcattacattaccaccatttttaatcaactcaaagtctgtatttggattaaacttcacctcctctcctaatagaaaccaaactcttgacatagaaacaacccaaaaaagcaaatatgtttctatctagttctaaaacataaacaagttctcttacattcctctacgaaggttgcaagacaccaactgtggttcaaccctacaatctttccaaactttgattagaatatcatcatttttcgaaaatggtaacactcgaaaacaattctctaatggtaccttaacaactttggtaccatccatggtggagatatgaagaatgttgccattgaatctccaacacattacaactgaatctttccatactgacaggtgaggcaaataatcaggaaccaaaggttcatcaaaacttggcaaagctatgagctcaacttcctcatcactcatattaaaagtcagaatgttttcacatgcatcataagagtaagaccacacaaaccaataacaaacacctctccaacatattccatcattaagttaggtaccaataagagagtatattatgtcttgataaatgttgagctctctccatgaatcagaaccaactgtgtatgcctcaactgtgcaatcttgtccatcgagccagatggcaacacatttgaaatcattgtttatagaatcaatttcaaatcctatcttgggataaggccctttgattgtagtgttatttggttctgggagaatcatggattctttcaaacaaggattgcataacaccattttcccaagactatttacttgcaaaatgagtccatcgcagtgataaatccgattccattgattctcatcattgcacctttcatcacgaataagaggtaaactaatagatcctgggacaggtacaactgaatagaacaacttaacatcatcatcatcatcatcatatattatagtcaataacgggtatttgatcaccctcatcacttgataatttgcatcatcatcatcatcactttgatcaccctcaacaccatcatcatcatcatcatcataggttatagtcaatgattgatatgtgattgagttatgatcgacatggaggaaaggcgactataaaataaggatacagaggactggtttttggtcatgacgaggtgcttggaaacaaattccttgttcttgatgaaacccgagatcagcgaataacagaacttgttcacaaatttgagctgaaacacagaatccgcaggtaccaacaacataatctcctccaatatgtctattggcaaatcacaaaagcttgccatgatctgcattaaccataaatagactttcatatattaaaacaatatgtcctaaaatcacaccaagaattaaaacaaggcttactgtgaaagtttcactcttgaaagaaaaagactaataaggcatttatttaatcacacagctggtaatagaaattaatgttatataaattaacaattaacccaagatctatttgtatataacatagaacacaatagtagtatatgataattgagtatgtgtacctgattgatccatagcaattatctatgtttgatccacagcagttactccaatttgatagtgcaatactatcaactaagtcttcctccctag

SEQ ID NO: 296002 - DNA, 5707 bp, Cannabis indica
gatttagaacttttatttgattcgtgttggttttggagatgtagtttgggatctgggacctcattcaatctatctgaattggttaaaattagtattgaagcttgatttgggattttctttgattctgtgaaagttatttttggtcattgggaatgtggagggattccggaactcctgctgattctttctatgaggtccgccctgagtgtactgatgttcctaaaactcgattcaaaatcaaggtttgtcgtcttttttttttattattattcttcttgtgggcatttggatcaatttaaatcaaacagtagattttgttatgacaaggattgtccattgatttgagttttgagatattgaaataatgacatttagttttagctgatatgatccttatttaaatgtttcaatcttgtgtgaataatgattgtgcagatttcttttaatgtaaaaaatggattgtgcagatttcttttattggattgtgttatgacaattcatagaccatagctttcagtgtgtttttttcttgagtttgagaagcaattttagtgatatcttcatctctttcgatggtcatgacaaatattgtctattggtttgagttttgaggcgccgcaatcaaatgttttcaagatattgaaatgatgacatttagattagctaatatgatccttatttaaatgttagaatcttgtgtgattaatgattgtgcaggtttaatgtaaaaaatgcctcattacaatcatgattatcataggttgaacttgatgagttgtttagctcaagggtttttttttttgctccaagtccttatttacaatgccacattgaattgaatgtcaactaatgaagtttctttattgtttctatctgcttttataggctggtaaaacattaagtgtgaggaaatggcaggctgcgtttactcaagaagggtatctggatatcggcaagactttaagccggatccaacgtggggtaattgcatcttcatatttcaatcatcactgtaaattttagtttcatttcatattgatctgtgaaaattcaattatcataataagcatgttgatattattcttgagtactctgaattgaagaggctggctcgtgttttttttctttttcgggatattgcaattacttcaaaactgatcattgttcctactaccatgctaaagcattgtactacatttgttgttacagatatgtagctattctgtccaactatgtgatgtaatctgaagattattgaattatcacacaagtaatatttaactttcttctaccaattataagaaattttctgatttgttgaggatcactgacctatgatactctcatatgttctatttgttgaaactttcggaagagagccaatataatttgttcctttttttacaggacaggttaaaataagttgaaaattttagtagtttaacttattttttttctttattaaaaaatcgtagaggaacaatttgtgtgattagttatagtaataccacatcattatattttatttatcatctttagggagttcatccgtcgattagaggagaagtgtgggaattcttacttgggtgctatgatccgaagagcacatttgatgaaagagagcagttacgtcaacgtagaaggtaatgtgcatattttgccaccgtaattgatttgtaataatacctaattagtaattttgtgaaatgaatacatgtgatgagccgagatcggggtaggctgaggagaagtgtttattttgactattttgtttcttattgactcaccataattgaaatactaaagtaaatctcttccactttgctgtcttaatgtgatatttttggagcttagaggataaaagaagatttggtcataatcctttgcatcccctattagttatttaggccctggttggctaggcttttaaaagttgcttttgggcttttgaagctccaaaagcacttccgctactggtgagcttaagcttttagctctaaaaaactcttttaacagaagcgagttttagtagcttactacgggagaatgttgttgtaccgtatcagcagtagtactttgtgataagttgataactacttatttcagtgcacaacttctaattttatttttcacaagacattgatacaaatttactgctggccagccaagttagaacagaacaatagaatatagaactagagaataggcaaaatatcgaagaaaatggagctagataggaatggaaagatctgattttgatattaagtgaatgaaacgatatagataaccatagaaccagaggtgttcggatagacctttactctcccaagagcccatacattttttccacccctctcattcaatctcttctcttatatatactgctcaactcatatagcctacccccttccaattgcccatttaccctctttattcaatctcacaccattcccacattcacacactcaccgacccaaccacttcaactagctctcacttgtacatcttttcaatggtgttttcatttgagtgtgcatgacattgtttttgtgcatcttcagaatacaatacctaaggtggaaggaagaatgtctccaattatttcccgttgttggaagtggtagatttattaccgcccctgtaatcaccgaagatggtcaacctattcaagatcccctagtaattcttgaatcaaatccaggcaagggacctgttttcccttctcaggaaaataacacggctatatcaaatactgctaataatttggaacccgtgaaggacaagaaagtaattcagtggatgcttaccctacatcaaataggttggttcggttgctgttatttaactgtgtagcagcgaatatcgttcatgatctgctaagaagccttatgtttgagtatatattgtcgtcaggtcttgatgtggttcgcactgacaggacattggtcttctatgagaagcaagataatctatcgaaactttgggatattcttgctgtttacgccttcatagatacagatgtcggctattgccaaggttagtaaagttttattttaaagtacaatacgcattttgcttggactgttcgaaaatcattaaatataacagaattaatccttaaagacaagttgcatgtataaaagaagaaaaatgtgctaaagcaccaattgtgcccaacaccaccgaaatatgttataccgctattgttataattcactatcactaatatgaaaaatcgctaactacttataaggtgtcacctcatgtaatgttgggaaccgttggtcttaatagcaatgctcgtaacagaatgagtgacatttgataaaatatatgaacgagcagtatattgtatatttcgaagatggataatatacatgtttttcttgttttaccctcaattcaatactgcattgaaaaccaacataattttaacatttttgtcttgttgagcaggaatgagtgatctttgttccccgatgattatgcttctcaacgatgaagctgatgcattttggtgctttgaacgtctgatgcgcagattggtacacatttcttcaataaaatttacttctgtttggctatatgtttcatagtttgctttcttttgtttcgaatgatcatcaacacgtaaaatatattcgtcccgagtgtacatttgtcaagcattgagagagataagagtgaaaatgagaatgagaaagaaagtgttgctttcactctaatgccgggagtttcggttaacatgtattctttctaattttatagcgaggaaatttcagatgcaccgatagttctgttggagtggagactcaacttagtaatttagctgcgattacacaagttattgacccgaaacttcatcagcatttgggtattgcctttaatttctcattctttagttcgaatggatattagaagagatattgacaataaaaatgtttcgatctttttccacagaaacactcggtggaggtgactatttgtttgcgtttcggatgcttatggttttatttcggcgagagttctctttctgtgattcattatatctttgggaggtaagacttaactcttatgtttgtttatagatttctaatatatttgttactttgtttcaaaagataaatttgatacattttgatagatgatgtgggctctggaatacgatccggacttgtactctttgtatgaagaacccgagggagttagcgaaagagttgaaggatctagagggaaaccaaagtcagtacgtcagtgtgggaaattcgagagagaaaatatgaagaataaggcaaatagttcagaagctccgctccctatctcggttttccttgttgctagtgtcttgaaggataagagcacgaagctactgcaagaagctcggggtcttgacgatgttgttaaggttaatccgttgttaagctcggggttttgcgcgtttctaacttgttgtgttttaatcatatttctctttatttgcagatattgaatgatataactggaaatttagacgcgaaaaaggcatgcaccggtgcaatgaagcttcacaagaaatatctaaagaaggtatcaaacacgatagcaaatcaattagaacgaacatcctctaattgaaaattacaatcaaaatataacaaagaaactttagtaaaaacacgagttaccttattagctgatcgtttaacagagaaaccataagagtttgagagatgatgtgactaaataaagaaactatattaatcgagcttctttacgagctatgttatgtatgaattgtagcatgttttgttgggtgtttataacacaagtttttggtggtgttgcaggccaagaagacatgacactagaaatatgaacaaagggctaaggttacgagtcagaaactgaagatttcacacgatttgatttgattttgatttgattttgattttggtgggagtttagtagaaagaaggggtatttatggtccctattatagaatcaaaattaatcttccatacataacattctttcaatacggccttgtacaaatgctatttgtattatatgttgtccttcactgttgtttgtttgtaaccattttcatacaaaataccaactatatatactattatactgtataaacaaaataataataataaaaaaaatgatgaatgattacttttaaatgaacttgcacattctttggaataataaaaaaaagtacaatgtaatgtaagtattgttgttagtgtgattagttagtatattcaaaaataattattatattaaaaattaatatttaattatattaataacaatattatattataccttagaaggtgttccacagtctatgaaaagttaaataagttaaatgtacccaaatttgctacctttgtataggaaatttctccagcacatctctcaaagaaatattttggtaaattcttcttatttgttttggcatttagaaaaaaaatttagttcaattttttctcttttatgattacgtatgttgtatttatttaaaattatatttaagtttttaaataatatttgaaaataaatttcaaataattacataccacgcatataaaaacaattgagcgtgcaaaaaatatttaaattttatttttgacattttaaactattcataaattactctatatactatttttttttttaactttttttttctcaaatttacggtttgagtttctaaagt

SEQ ID NO: 296003 - DNA, 2062 bp, Cannabis indica
tgaccgacgtacacccttaatttctagtgtctttgagcaatatttcacagtattttttacttctcatcagctttatatggatactatgaatcaggttttgcattcagtgcatgtccaattcactaatgacttaaataatattttagtgtgaaacaattattacacttattccaaaggagaagaacttactttcactagtgagtttcgacctattagtttatgtaacgtccttttataaaatcatttttaaaatgataagtaataggttgaggggggttttaaatgatgtaatttctgatgagcaaactgtttttatactaggacgcctcatctttgataatgcaatgattaggtttgatgtttaaatgtcattaaaaggcataagaaggggaaaaggattttctagcgtacaaggtggatatcgctaaggcatatgaccgtgttgattgggaacttttacgtggaatgatggaacaactaggatttcttcatggttgcattggactgattatgcgttgtgtcaccaccgtcacttactctatcaacgttaatgatgatattattggcaatattgtacctaccaggggacttcggcaagacgatccactctcactctttttgttccttatttgtggggaaggactttcatctcttattaagcattagatttacacatgctatttctgagctggtgtgtgaaaggcatgggtcaatgatttctcattttgtttgccaatgacaatttcttcttcttggaagcttcaccagcaggctgtgttcgatttagagacatccttcatacttatgaaggggcgtcaggaaaattggtaaatttaaataaatcggttgtttgcttctcttctcgtatgcctcaagatgtttgtgaatctctcgttagtgtgttgggggttcctctagtaccctgtcacatgataagtacttgagattgccttgctttgcaagaaaaagtaaaagtggtttgtttcaatctattcttgatcgaatttgaaataaattgtttggctataagttgaagcttttttcttcaggtggtcgtgaggtccttttgaaatctttgattcaaggaattttgacatacgctatgggtttgttccatcttcatgtgggtattgtgaatgaaatttatcgaccctatgcttgattcttgtggggtggagatcctaataagcagaagttacactagtgcacgtggtctaggttatgttggcataaggtggatggtggaatggaatttcgggacatgtttatgtttaaccaatctctattggctaagcacgcagccccatctatataattgtcttaaattctttggctgccaaggtaatgaaagggttttattatgcaaatagctctttaatagaagtggttgaaactaaacgggtctcatttttatggaaaagtattctttagggttgtgatttatggaagaaaggagtttgatggttaattgggaagggagacatggttcagattcgagaagatgcttggattcctaatgtgggtcgggcttactcatttcggggtggtccaaagcttcaatatgttcatgatctaaaattagagaatggtctttgaacgctcctttgattaaggagctctttgatgaagccagagtcgaagccaaagctatcttatcaattcatatttcattgtttaactggaaggatgcgtttattttgcattttacaaatactagtatgtgcacgattaagagttgatattggagctttgtcaccagattggggtcaagtgtcagtttcctcaagtcagtcttgctggtggaagtttttgtggtctcttttaatgctatccaaagttaagaattttatttaaaaagtaggccttaatttcttgatgtgttacgctaatttgcaacgtcatggcttgctgtgaatgcatgttcaatatgctttcaaaataatgagtctattgtgcatgccctatggttatatccttctctcaaaggaattagtcaagaattagacaaggcccttgttggaatttattttaccaggatcttagatctactcacaagtatgtt

SEQ ID NO: 296004 - DNA, 3536 bp, Cannabis indica
aaaaaaaaaacacacacacatacagatacacgactctctgaagatactcttttatttcttccctttgcaaagaaaaagggtttctgtctttgtgtaatattatggctatggaagctttgaactctcctaccaccgctacggcgccgtttcacttcgaagacgtggccagccttaactacctggagccatgggccaagcgcaagcgctccaagcgttctcgtcacgatcatccttccaccgaagaagagtatcttgctctctgcttaatcatgctcgctcgtggtggtgccgatcaacagcgccggaagttgactcctactcgtgctccagtcgatcatcagatggcaactacctcgcctactaagctgagttacaaatgctctgtttgtaataaggcttttccatcttatcaagctttaggtggacacaaagctagtcataggaaaggaaatggaggcgaattagatcagtctacgtcttcgacaactaccaataccactaccacgtctgccgcggctgccagagtctctaacggtactggtaaggctcacgagtgttcaatctgccataaatctttcccaaccggccaagccctcggtggacacaagaggtgccactatgaaggcggaggtgcttccgcagctaccaccgctgcagccactgccaatagcgctttgaccacaacatccgaaggcatagggtccacctcccacactcacacctcgttaagtcaaagccaccgcggatttgacctgaacctacctgctctgccagaatactcccgtgatttctttgtctccggcgacgaagaggttgaaagtccccacccgctcaaaaagatccgcctgacgatctcacctctgaagatcgaaatccctgaacaccactcgaattagcattctaattgaacttctaccatttatattttgaaaaattcgtttatcaaattaggaaaatggaactttatgttttttaagactcatttttcctgtacatataagttgcagaattatcttaaatattagcttgttggtcagttgtaatagttaaaattcaattaattcaattgtttttttaaaaaaaattttatgttcaactttctgttatattcagtaagctctttattatgtatttttttttttatgaatattaaatataattgtcggaatattatattgggaatgagaaaggggaagggtgtgcaaagagcatgattaggaatgagtatgcagaaccgcgtggggggaagaagtgaatgacagagtttgttgagttcagttgaggccacttgcacatgttggataaaaaacagatcaaattgatttaattagtgctgcttatgcgtgcttctgctcccactctgactctttctaccgtaacaacaactaataatggacctacattcacgcccaaaattaatctctttcttttaatcattacattattataagagttttatcattacgtttttatatacctataggatttggggcaattactttattgattaaatttaaacacattaatatataagtaaggtaagacaagaaaaggggagtgagtgagagtgaggggtactgattcggatgagatcaaatttggtggggataaaaaatgaagaagataagaatggtttttctttcttttggtttctgatatttttggattttttttgggcacacataaatatcgtgttcttttgcgtgtgggactgataactgattaggatgacaggtgggctgttacttaatatggtttctttcctgtattattgtttgatctgaatttctttcctatattttttttttaagttaaatttccctatctcattgtggcgtgggattttgtttgcgacacgtagttgagtttattaaaaggtttggaaaggtgttttttcaaggatacgtattagagatacatgtgtgaaaacagagaaaactggagaaaaaaaaaatgaaagtggaagtgtcctccgtgttgcatggtaagatcgcataaggccacgatgaagccagcaccatcagcggtgtttaacatgtgtatcaataacccttaacgcgttacgtgttctgcacaatgatctatttattctttctcttttctttgattttcttatttttaatttatttttaagttttaagtaatagtattaccatacatgccgttctactactttctttggattcttttaataattttattgtgctcgattaatcagattttaatcatgactcttacaaaatattaaaaatatcattaatttgttatgattttattttaaacagtaactgagtgtttttttatttttgatttctcgtaatttggaaatttaatttcttattgaaaaaatatttggtaattatgccttcaagatttcagtaactaagtttttatcgtttcagcaatttttttttttatttttggatgaaatatttgtattttatatgtatttatttaaatatataatagatggaaaactacaaaagctattcacaaaagaatatatatatatatatatttttttttttttgagaaaaagacacaaaagaatatatttaaagatttaattataagatttttttttttttgaaagaagatttaattttaatagtttcagacttgattgtcatgttttctgtttcttctaaaagatggaattgggaaaaaagcgaaaaaacttaatgaaaacttcatgatagggatgcccgactttttctaatacttttacaaggcctccattctattggtcaaccaagggagtgccaactgccaaaccatccaattacaataagcaccaaaagtatataaatatttattattattataaagaacattatatctacttaacaaataaataaattatgtatttccaaattaaacaaattatttaccaataggtaaatttactagtgcaattttctattttgattagtaaaaaggtaaaacgtgcgtgagaattccatttacatctacccaacttttcttccctttaaacctcaccttagatatttacttttctcacaactgaagaagattacaactgaccaggccgaataaagttggttgctttgaacgtggttactttaaggacgaagaatatgaaattattacttaatcaggccttttgcgtgtttcggaaaaacatgaatacaagtagtgattactagggttgacatctatttttctactcatcccatctaattcaagtaattagatttaaaaaacttcaacttatctctaatctgtttaatatctgaaatatttttagtcaaattttttctcatagtcatgtaaattatagttatttaatacatcctgcaaaattttaagaaattcaaaaatgtttaacacaccgaaaattacgctcaagcagtgtgttgcacgcgtgactattttataatttatacgcgtgtaaaatagactgtttgaacattattttctatattgtaaattattccgaatttctcaaaattttgtaggatatcttaaatagctataacgtatatgaatatgaaacaaaattaaactaaattttt

SEQ ID NO: 296005 - DNA, 4770 bp, Cannabis indica
tttttttttgatattaagaagcttattcaaccaaaaaccttaaaaagcagtcacaggggaactgtctcccttccaacagattttttgcacacattgttcactctagccaaataggcaagcctatcagcaacagagttttcctcacaaggagtaaacttaaacaaaacataagaaaagtacttaaaagagaaacacatttgcgaaagattaggtaagatccccatgcaagaggcaattctttgatgttcagagcctcaacaactattgctgagtctgagacaattaccaccgaagagtaccgttcctcaatagccaccaccaaagcaagatgaatagcctccaactctgcctccagcacactgtgaacataacaaaccgcttggcaggagatcgccttagtctcatcttcaatcacccaaaaaaacactcaaaacagttgaatgatccaccaccgaagcatcaaccatgaggcaagcctcaaactatccctggccactgtgaacatcaggtctttcgcaatgctgagtgatagccacctccaaataaaactccccgaaccgtttgtgaatcctgcaagaaattgcagtagggtccggagctatgttccgaaaaatgagatcatttctgcactgccaaattccttcaaacatacaagcagcatacctcagcatgattgggtcgccgaggttgttaagccaaaggaagaggctctcaaaagagtcaaactgttggtttcccgtaagcaagccccaaggacattgaaaccacaggctgcgagcaaaaaaacaatcctagaagagatggatatccgtttccagctcattgttacacaagcagcaaagtctgtcatgttgataaaggaaggtaagcttagttttgagagcgagacatcctcccacagccttccaaagcagcagggagtgacgaggatgtagatccaacttccataactttttccaacatatcttttcctcctgaaaccgatggcattgagagagccagtatgcgtttttgacagagaagagccccttattgctgcttttccagaaaactcgatcctcatcgccctccaaaggcttaatgcgtataattgcttcagccacatcgtgggagaagcatgctcttatcaagtttacatcccatgtctgggatcttggcaagaatagatccgaaacagaggaaaatttatgagtaatagcataagtaaaactacctctaacctcctccagactgaaccccggcacccacggttttgtccacagatcaatatcaccctttccaattagaattccagcaccaggcacacacagatcacgagcctcaaggatccctttccaaagagaggaatcattcccacgcttatcaactgtccaaaaatccatctcagtacaatattggagtttaggatgttgacccacgaccgattatcctttgtgagcaaacaccacgaaagttttgcaagaagggccagattaatgtccctaaatcttctcaaaccaaggccaccatttctttttggctggcacagatctccctaacatttgagggccaagtatcggttgttggggccaaccaaatggttccctttccactaaaatcggacaacaaaactgtccagttctttgcaaatcaaaacaggtattcgaaaggtggacatagtgtaacaaggtatactttgcagcacagattcaccaaggtcagtttgccagcttgtgagagacatttagacttccagcccttaagcctagacagaacctttgtcttaagaaaagaaaaatcgtcctgtttcctggcagatgcaaagagaggattaccaagatacttctctttacacgacaacggagggatttgcagggagtccgagatttcctttcttaaagcactacagaccttcagggaaaagaaaacaccactctttactctgcctacactttgacccgaccatgcttcgtattgctcaatacatgacatcagattctaagcttcaaacaaggatgctttgcaaaagtagatggcatcatcggcatagaaaatatgtgagatagggatagaatttttcccgaattttaggcccgagatatcccctctttcctcggccctacacactaacttagagagaacctcgctgcaaaggatgaataggtacggggacagtgggtctccctgcctaagcccctggcctggcctaaactgcttcagaggagcaccattcagcagcacagaaaaactcactgaagtaacacactgcataaggagactgcacacctttgcactgaagccattagccaagagaaccttatgaagaaaatcccattcgatccgatcatatgccttgtgcatatctgttttcacagccatgatacatttcttgccaccgatcttttgcatagtgtgaagggcttccgcagccaacacaaatccctcggcaatccatctaccctttaggaaagcgtgttgaaagggactgatgagtttttctaggataggcttgagttgatccgttagagggcgagcaataactttgtacccaaaattacaaagactgataggacgaaattgctcaaacctggatgggctttctttcttgggaatcaagcaaataaaggtgtggttcagttccttaacaaagtaggagctgtggaaaaagtcttgaaccatttcagagatgtcgttacccacaatgtcccagtaagtacggtaaaaaatacctgaaaaccgtccgggcctggcgccttgagggggtgtaaattataaacagccgccttgatttcagaaaaggaaggcactctacagaaatcctcattttcctgagtcaaaacttttgtatcataaagctccataaagtcagcatccataatcgggtgagaactggtgaaaagagtcttgaagttctccacaaaatagtttccaatatcatcacaattttggagccagtgatccccgtgatcattaatagcatatatgtgattctttctcctttgcagaatggtggcagtatgaaaaaattttgagttgcaatctccctgttttacccaaagttcgcgcgacttttgtttccaaatcctctccatctttttctccaaatcaagaatttctatttggatttgatcctcttccaaaataaacccaggtgtaattggggcattctgaatataggcaagccgagaataaagctccctaagtttcttgttaaaaaaaccaaaacaatcatgattccatcttttcaaagcatttttggccaagtgaagctttttcaccacacaaaagcttcggtgcccatcgcagggagtcacccagaccttttcaattgtcttcccacaagtgttgtcagatttccacacttccaaaaacctaaacgggtacctgtgcttctgtaagctcaaacgggagtcaaggattagaggagcatgatccgaattcacaatcgggaaatgtttcacactggcgtggggaaaatgggtgcaccactcagggcaagccactgccctatccagcctttttcgaacccgactctcagcatttctagcattgtaccaagcgtacgattgcccaatgtagccaagatcaatcccgtcacagtccatcagaaagttttgaagtaactccccctccattctaccaaaaccacgccccctgcttttcagtagcatctataatcacattcaaatctcccataagggcccacgcgagttgcaactttgaactagatttgtcaaccaattccagaaagcctttttttgaccaccatacggggtgccatatatgcagaatagatgccaaggagccaaacctgggtcgatgtaaatctttatgcaaaagcccgtaagaaaagtatttaacacctgaatattcagccctgccctccaaccaacacaaaagcccccagcaataccagtagctttgatacattgaacattggcaaaaccacatcggttttagatctctatcatacatcccttcttaactttagtttctaaaagaaaaacaacatccacaccttccctacgagagagaccccttaaggttctctctgccgccggtctgcggagactgcggcaattccaagcaagacacttcatggcgcaggtgggggcatggattcggccgcctcctcgccatttccaaaattttggaccaaagtaattgggacatcaacacactgagagagaatttgttcgaagttacgtcacacctccttttcctcgcctaatctggctttacgagattggagccccattcgtctcgtcgacgacacagcccccctcagtttcttccttcgacttttgccttttgaagtttccccaggttcaaaggaacctgtattaaacacagtcgccaatggcgtgtcaatagagcctctctgccctgtcgatggctccctagaggtatcagtaacggtagcaagttgtgcattcgaattcttgaaaggagaatcatgataaatatcaggggttgggctataccaagttcacgccttgcgtttttttgtgcccagaaggtgtgtaattaaatcagataagttttgtggattagtgataagtaagggttgggccttgtagagatctgtgacattagaacccaaaagttggcaatacagcttttaaagctcagggtcattactgggtgttaggttataattaacctatatttcgggtctttaaagttagcattatctcgtctattggtgtcttttggagcagttttacgcttgattttcattatttcaggttcccggggtgttaaagttcgaattcagtcaaatggcgaaaa

SEQ ID NO: 296006 - DNA, 2110 bp, Cannabis indica
acactaactttgtatgacaaaacatattggctaatacatgtgctatcccattagcttccctaaatacaaacaagatccctgtgacgctatcaaataacaatctaatataccatcaacatccctacaactatccttcttctgttgaattaattggacaacttgtagacaatcagattcaatattaaatcttgaaaaaatatgtattccgactttcagaataacttgtattgtctacagttcaacttggagaggttggtattcttgttgtaaagttgtggtcgaagcaaagaccacctaaccattttcattcctaaccacacaactaattccagaacaccttgaacctttcttctcacttgcatccacatttatcttcagcaaaccaacctcaggtggactccaaactatttctctatattgattcctatctttcccattaccaccagtcacctgtgcctccctatagtcattaatatattgagcacaccattccataacttcactagcctttggaatagttccactatgctcagagttattcctaatgtgccataatttccaagataagataagaaaatattcaaactcttcctgctgccaatccttagacaatctgataaggatagcaaccacatcctccttgccaactctctggacctttggcttgaaaccacacatcttctacactgctcagttcgcctcacaattccacaaagcatgaaaaaatcttctttagcaccagcaaaatacctatggcaggttgtgtcaacagacatccccctcttagataaagtgaaatgagtgggaagccatgaatgcaccaccttccacacaaaatgtttcacttttagtagaatttttaattgccacaacattctccaccatgctgccatatgactatcgtagctctatagccattctatacccactcttcaccaagtatttctcttcttttttttgtagtgccataaaattttatcttccactttccactccgaacatggcattattaagatcaagtcagcgtcttcctcattaaaaatggcttgcataaaatctttatcccacataccagttgcatcttttaaatccactagatatagaccctctagaatagtaggctgatcataactttgaaagttgttggtcttggcagccatgagtcttccaatattccacactattcccattcctaattctccatcgatggccactttagattatttcttttcctcatactacactctgccaaacaaaggacgtgtgtgactcacatcttgcttccaacaccgaaccattaggaaagtagcttgctttaaaactctattacaaagagatgacagaaaacgaataaatgtccatatttgttttataagaagagcttgattgaacattttcaagtcaagaaatccaaatcttcctttttcttttggctgacataaaacagaccatgtgtgccaatgtatattatcaattttctaagaagaatcccaccaaaatttcgctgctattttatagaggttgtttatagtagtttttgtcaaatggaaacaactcatggtatatgttggaattacttgtataatggcttttatgagcacctttttcccgtcacagagaacatagatattttcccaatcaggaagcttgttccataacttatttccaatcacatcgcctagcttaggaaagagaaccagactgaagtaatacatctcataactttatcaatcatttcctcccaatatccaagtttcaacatcataacctgaataaatgaccaatcaaccgtatcgtacaccttaaccatatccaattttaaagtcagcttcctactattttgaaaatgattctttctcatgcaatgaagcccttcgtagccaatgatagtattgtcatgaatcaatcttcttttaacaaaggcactctgtaataccctagaattatgaaatggattagcaaaaccctaattagataattatgattaattgaggaattatattattatatagttcaatatatttaatttatttgattaattatatgttaagacctcgttggtgagctaggggtattttagtaattttgacacgaaaagggtaaaataatg

SEQ ID NO: 296007 - DNA, 3789 bp, Cannabis indica
aaaatgattaaatgagcgtaatttattaattacatagattttattataacatgtgggtattatatatatcatttgaaaataaaatattttcgagttcgatgagcgtaaaaacttgatggtttggctttgaacaaaatacccctaagtcatcagttgagtgttgaaataaaggtaaaataataattttctaggttttaccttttgttttacttgaaattctagttagtcctagctgaataagatttattttatttgatttaatttattggattagttaattaagagataggatcaaattgtatcacacacaaaatactcacctttttctcactctctctcctttggttcaagaaaaaccagaggaaaacccagcttttcatccctaattttagtccatttcttgctgaaaatcaacactaggagctgtccaaaagcttgaggtaaatttcttcacttgttattaatgatttctagggtttagggttgagaattttaagaattttgcatgattttgggtcaatagattgtgttgagttcagagcatgttcttaggcttaattcaaggttgtttaaagctttaattacatgagataaggggttgttatgctttggttgggtgagttgagttcaagaactgaaaaactcactcaaccatggtgtttttgtaattttaagttaaatgttggtttttagtattgagatatgttgtatatatgatattatattaatctagaaaatttgattaggtttggaagagttttgtgttagttttaacacaaaaatcagggtttgtttgtttctgcagtgggaaacggttaactgtttctacaggtactatgaaaacggttaaccttttgacctagtgggaaaccccattttctgaaaacgatgagttgtttgtggtgttcttgcagtacctaggttttcgtattttattgatatttaagttatttttccaagatattattgataggggtttatctcgttttaagtttaggacctattacgggtttgattaagttatttatcaagttgccattgtcatgacatagggcccgagatcgtcgagcaccattccactcaggtcagcccgcacacctgactttggactaaggtaagaaaagtcgattgtaccgcatagcatgtcaaaagtaagatacggtaattaccgttatttagaaagagttattcctctcatttgaaccgctattaagtttcttacttatcggttgcttcattaggccacgatagtgacattagaaactcattggtaatgagggttaagtatgctttataaagtattaggattagcttgtcttattagacaaatagttgattacaatgtgaatagtttcttaaattatatgtttcaatgcatgttcattgttatttagtactttatgttatacatgatgtttgtgttacctacttttctttttgagtctttgtgactcacgggtgctttgtgacttagttgacaggatccgtcttttgtaatgttttgagtatataataattttttgtaataaactattatggtggtattttagtaaaattttataactaagggaatcccccaatctagtaatatatttaacaaggaatctatgttatactttaattaattttccaaagttctaattaatcaactctttcttaaaacattagtttattattataaactaatttataaagcacacacgtgacgccttacgggttagggcatcacattcgatgtagtggactgccctaccgcctacaacactattttaggacgacctatcctagttgaaatcaaagcgatgacttccatctagcatctgtttatgaagtttctgtgtgacaacagaagtgctggaacggtgaggggtgaccaaaagagtacattcaagtggtatagtgtctccgccaaaaacgttttcatgatgagagaagaaactggagaaaaaaatcttgagatacatgtccatctaatactgggggtagtatgggaaaaagatgagttagatctctcagtgggagtggaaagaatgattgaaccactagaggatgtggaagaattttcatcagcgagacggatcccaccaaagtcatcaatgtgggacggaacctgcctctagtagtcaaagaaaaatagtgacaaaaatcaaagccaacttggtttcctagtgtggagccatgcatatacgacgaggatcagtccccatgtaattttccataacctaaacatagattcgaacgcagatccaatccaatagaagcggagatcgttagatccggtatgttcaaaagccgtgaaggtggaggtagagaagttgacatccatagagttcctcagtgaagctctatacctggtgtggcttgctaactcatttttttgtctgaaagctaaatggaacctggaggatgtgtattgactttgcggacctattcaaagtctatccaaaagattgtttctcgctcccctagatagaccagatggtggatgcgatgcccaaatacaaacttctatgcttcatgtatgcatactttggctataatcagatcaaaatgtatgtagcagaccaagagcacactagttttcaaacagaaaaagtaatatactgctaccttgtgatgcccttcgggctcaagaatggtagagtgacctatcaacgcttagtgaggaagatgtttaaggatgccttgggaaaaaaacatggaattgtatgtcgacgatatactggtgaagtaaaagacttttgggggagcatggaagtgatttagaggagggcttcttgataattgggaaatacgaaatgaaactaaacttgaagaaatataccttttgagtttttagggaaattcttaggtttcatcgtcaatttccacggaatttaagcatatccggagaagatagataatcttctagacatgccttccctaagaaaacataacgacgtccaaattttaaccgaaataattgcagcacttagcaagtttgtgtccaaagaaactgacaaatgcatttcgatttttaacatccttcgtggaagaaaaaaaattgaattaactaatgagtgcgaagaggcttaccagccatgtctggacgacacggttgtatcattcagtgatgttgattctacacaagtccattaccctcacaacaacccactgtttatgaaagtgcaattagcaaacatgcttgtagcatgatccatgatcgatgatggggcctcatagtacagcctcttcaaaaccgctacatagtaattatataattagaggtaattgagggctctaattacgctttttaattcttatagtcctatgagaattgataaaataattagtaattaattataataaaaaaaataataaattttattacttaatatttaaaattaaaaaaacttagtaattatattaacttaacttcttagttacttataattacacaactaatttacaaacagacaaaattgtaaaaaccttcaattacacctaattgtgtaatcaccacttatgtaatgacacatttaaccataagacaatatctttaagaagtttgagtaaaaattatataatatataaattagtaattatcaattttttattaggatgttcatataatttgtaatgtatagtttcaaattccaatcaatttgaaccgaatcagactaaatgaattcgacctcaatgatttggttaatccaaactgtttaaaatattcgatcacaattttaaaatttttgtgaactaaatattaatatttagtaacaattttaagtaaaatattaatattgactt

SEQ ID NO: 296008 - DNA, 3059 bp, Cannabis indica
cacggtaaactattcaaaaaatttaaaaactgacataaatgatgttgtgagagtataacggacactcttataataatttttttaaaaaatatatatatttttgggcacgaaaattaacttgtaaaagaagattaaatgacacttatggacaaagaataaagacaatcaacaagtagtcatgaaactaaatctaactggctatagtgcttaatagttccactataatgtatattgtattataattaataataagtaatggaaatgttatatgtatacttacttgcaggttttagaagtattatcagattttgttgaagtagtagagaagtttctggccatcaatggtggtggtggcttaagaaaactactacaaaaatttggtagacccaaaaggtgtaataataagattgtatgccatctcttatcactataactctttcaatatatatgtgtgtaaacttcttctggttttgaaaggtgtaagaattgagtggcaaatgtacatatttatagagaaattgtgaaagagtagtgaaatggtaaaaggtacaggtggtgtctagtatctttacttagaggtgatgtattgttattggtataattatgtatcgggtctcatataatttaatttaataattattatgaaatatcactagctatttacaagacgtctactaatgcttaatagcaatgctgaaaagaatactattagtggttattactattacgaggtgtcatatgacttaattattattattagcaaataataatagtaataataataataataaattaaattaagtaaaacttgggaggaggtatctaagcttacaatttttggtcctaatatattaaatggaacttcaaaatatgtgttttatttaatagggtgtatttaaaaaagctatttaaaaaatataaaaataaaaaataaaaaagaaatagcaactttattaaaatttaatatttagaatattatgaccaaagaggtatcgagaatgtttagccacaaaatgagctactaaatttgataatcatctaacaaaataaaaacttacattatttaaagaagaaagtaaagattgactcttgaatatcaagccaaaaccagaacacatgagtcacttatgactcttgaattgtaagcatgctatctgtctcaatcttcacatcatgcttcgaattattttttatttaacttagagtttccttgactcccataaaaacaatctcacaacataaatactatccctgtagactgattttgctgccatgagtttgcccgagccatttcgtgctgcaattccatagccatacatttgatcttgttgaaataagccaaatacacttatttacttattaaatattctgttgtttgacatgagaatcttccttcaactctcaataatttttctactctattatttaaaatacattaccgaaattttactttatttattttacctcaaactttttcattacaccataaattaacttctgtaggaaatttcaagcctatccctacacccaacagataacacaatcaggtatcaaggtaattttgacatttttatttcgagtcaaaacactctttgactcttatcaatacatcgttgtattgatcacactcaaaatcctcccaagaacactcgagaaccccaaccacacaacacaaaacaaagagaggaaaccctagcagagctttgagtttcttctcaagaaactcgaagtctgcttcaaccctgagatcaagccaaaaccttcagatcaaaattgttttgtaaccacaccaaacaaacagtaagtataagcagagtaaaaaagaagacaaaacattgaatttatagaggttccccaaaagtgttgttaggtactacctctttcgagctcgcctcagaattcttggctcgattacactatcatatcttcaaagatcagcaattacaaaatcagattccaagttacatgtaatcgatagtttattacaaagtatttttcttctttgtgtttctctctctcactctctaactctctttattttcttgtgtatgcactctttcagaaatggacctcggagccctaaccctagggctccaaagcctagcactgtaagctttttttcttttcctctcggtctatcttcttctagtttttttctttttgtatttatagatgtagggagcttgtaagtgagctgaagttagttgcaacggtttccaaccttacaactaactttggttccgagagccaaaaattgttaaggctagaggccacataatttgttgtaatatgttttgttattttattgtaagattattgttgatctagacagtgtatatgtggatttatttcaacaatgtttacatgaatccccatatggacttgtagaaatgtttagttcttctgagggtcttagctcaaactcattaagggttttaccaacttgtgtcaatccttaatacttaagcaaaacttaaacttatttaacgataccactttagttcccatatctgcaggattcacttatgtatgcacttcatcaatctcaatttccccttgagtaatcctgtttatgataaaatgatattttatctctatgtgttttgttcagtcatgaaagacaaagtttttacacaggtagatgttgctttgactgtgtgagtagataatatggtctttcttaactacgtttaactccttcataaggcctttaatccacagggcttccttaattgcctctgtagtggcaatatactcaaatttaatagtggatatagccactactattagacatttatttgtataaactgaaacatatatgattatgtataaagtgcggaattaatacaacatatatgcactataattaaggatcaaaatacctccagccattgattcttgagcttcaaactcacataagctttgatctgcaaaggaaactggttggtgtgggtaatcggacttcctcgctctctcaactctctttagatgaattttgctgtataaacaaaatgagtgagaagctcggcgaccgagaccctatatttataggtgagata

SEQ ID NO: 296009 - DNA, 1710 bp, Cannabis indica
actaagcggtctttacagttgacgtatagaatcttctaaactaatccgggttagccaacaccctatccaacttctcaaaaaccagatttatgtgacgcccattacaccaagtaaactctcccccttccatcctaatttccttgaagttacaataagaaatggccttttgaaagtcacgcatctgagagtcttgtttcaaacatccccctttcttttcgttgaccttaataatctcattatagtcacctccacaaatccaagctccctgtaacatatctcagagtctctctaagagctgccaagactacttcctaccacccggatcaggacttccatagaacccagtaaatctccaagtaaagcccagaccattttccacaatagcgtctatgtcagaaacagtaaaagacttaacactcacctcaaagggctctttccacaagagggccaaacctccacttttacctttggcagccaccacaaaacaactatcaaaacccagcacaactctaattctctccatcgcagcttcattaagtctagtttcggacaagaaaatcatcccaagatgatgatctttcatgtgggaacaaagggtcttcaatgtccaggggctcccaagcccctgaacattgcaaaacatgatatttattgctctcgacgacctagttccaccgggtgcaccgcttctaagatcaccccagagaccaaattcgaaatgctagaaatgtcttttggtaccttatctttcactgttttctctatgggctcagctgcttctttcttggtagtcaaagatggaggtttgagcttagtgtgaatctttttattcttcttagccaccaccttgtttttccttcctcctttcagacttgagttatcacccccaaattcattttcaaaagtgattgggatgtcaaaccactcacccccttcatttgaaatacccgatttcgaactcgcctgaacgccaaaaactttcctatgaactcttttcccagattcatgctccaacccattacccctattcagaaaatcccaataatccgcccttctcttaatacctgaacctccttcattctcaaaatccctctctacccgttggacatcaatcttatccattagattcacaaaatcaaaaggcaaaggaggattagaagccggtacctctactctcagggaattttggtttgcgattcttggaacaagatcgatcccttgttcttcaccgattgtgcgcacagaatccaagatcgagaagtcacctactggttcttgaatactcttcctcaactcgccactcccaatttcgtccctcaaagatcgactacgaatcattccagcgccccttgcctcttcatgtggctttttctccctattccccagaggtctctcttcaactttcaaccatgcaccataggccgctgaacttttaccctcgccaccagaaattttctcagggttatttgcacatgtgctgaagtcgtgacccacttggccgcagctgaagcacataggtttatcattcatacctgaacggcaaccaaacccggccttcagaacaaggaaagggaaaccctgaaaaaataggtttatcaatcgaaatcaatactttgaacagaaaaaaccatttaaagtaatcttagttacttcttctttctgaacttcaatgacctcgtgttaggttttatgccctaaataaaactcttt

SEQ ID NO: 296010 - DNA, 5980 bp, Cannabis indica
gatacaaccagagaagcatattcaaatatctcaacttatttataaagagaattaaaaaatatccatagacttagccaaagatataaccaaaacaacaaaaactctgaaagtcatggatgctgatggaaatagatcaggttgaaacaaaaaaaaaggaattccaaagtcatggatgctaaacatgtggcagaaaccagtacaataaattatgtctttacaaaaaaaaaagggtcctgtcctcacaatttttatttaaaaaaaaacctcaacttacattaatatagtgaaataatacaaacaaatgtggatgaaataaccactaaagacagaaatattacagaatgaggaaaacattttcataaaatactgccattatctatgtgatttcatataacacaatggaatccctttcggttctcacaaattgaatatgctacagtaaactaacaactgtgagttctaaaacaagtttaaaataattaaaagaaaaaacatcactcactatatcaaaccgaagatttttaccaatccattcaacagatgtggaaaaccgatctcgatcaccaagtaaagccagtgtgtctaaagagtcaatctgagacaatgtcatgatagaaacactaaaaataagcacttgaacaatgtgaagacttgttgttttagcttgtttgcgttagctttcttatattttaaaataagcacttgaggacatgatttgaagattttaataaagtacaacagatcaagaggatatttcaattgtcttaccaaagttaaggcataaccaccaagcgtatcttcacccccacatgatagaggtcttaattcatcgagtggaaaagcattctccatgtatccatcaaaagcatggtaaaacatttctctcacctacattgtcaaatcattaaaattgtgtagctacatacatacatatatgttagccaggccgacatcggcccaataacattagattcaaatgcaattaaagaaagagtcaaaagctgggcggataattcaactcaagagtccagcccaaacaaagatactgctacaattaccaaggaaagaaacaaagagaagttgaatgaaatcgtagagaaggggacgcgtgaggccaaagtggatgaaaagtaagttagatcattctgtgttctataaaagatcaactgttagtatcattttattagtggtgtatgttgatgacatcgttattactgaaaataatactgaaggcatctcattcattaaatctttcattcatacccagtttcacacgaaggatttagaggtgctcaagtatttcttggaagttgaagttactcaaagtaaacaaggtattttttagtctcaaataagatatgtacttaatttgttaactgagacaaaaaattgggagtaaaccttgtaatgctccaatgaatccaattgtgcatcttacacgtgatggggaactatttgaagatcctgagaaatatcgcagattggttggaaagttgaattatctaactgtgacttgtccagatattacattcccaattagtgtcgttagtcagattatgtcttctccaacaattcaacattgggcagcattagagcaaattttatgttacttgaaaggagcaccaggacaggtatagtttcaaggatcatggacatacccagcttaaatgtttctctgatgtagattggacaggctccaaggtagatagacgatccacttcaggatattgtgtatttgttgggggtaatctgatctcttagaagagtaagaaacaaaatgttgtgtctagatccaatgctgaatcagaatatagcgttatggcacagtttgtgtgtgaggtaatatagatttattagcttttgacagaatttgggtttaagacttctatcccggcaaaattgtggtgtgataatcaagatgctcttcatattgcctcaaatcctgtgttccatgagcgaactaagcacattgagatcgattgtcattttgttcgtgacaaaattcaacaaggcctgatctccacaggtaatgtgaagactagagaacaattaggagaaatttttacaaaagctttgaatggagtgcgggtcgattatctttgttacaagctgggcatgtttaacacctatgctccagcttgagggggggtgttagaatattagttgtacattagttgtaaaaaaactagggttaaatgtatttagtactttcctatttagcctctttgtatttagtaatttcccatttagtctcctagctttgtatatgaatatatactattctacggaataatacatacaactctattcaccattctctacaaaaaggttgaacaactgttagagggccatcagttcgtggttgatctttatgttctgcttatatggggattggatgttgtgttgggatgcaatggttgcagacactaggatcgtgtgttcatgaccataaggctctcacaatggaatttaattggcaagggcaagctgtcaaagtagcagggttattaggggtttaaggcacaacaactctctgttactcaatttcattagttgcttcatgaggaagaggttcatgacttgtgtcagttgagttctgtgatcgttggtagtaatagagagagtattgaaatctccaactgagaagatttgatgccaagggaagggaatggacttatcacagagtttaaggaagtttttgctgaaccaacacaacttcctcctcggtgtagtgtggaccatagaatttttctatagccagagtcaactccaatcaacgtgcggtcataccgatatccttacttccaattatcgaaaagttggttcgagaaatgaattattttggcttttgtcctccaagcaaaagtctttattcttcaccggttttgcttgtcaaaaagaaggatggcacatggaatttttgtgtggattgttgggcattgaatggaattatgatcaaggatcgctttcctatttccactataaacgagttgttagatgaattggggagcgctactgttttctctaagctggatttacgggcagggtgtcatcgaattcgcatagatcctagggacattcacaagacggcttttcgcactcgcgaggaacactacgagttcctagtgatgtcgtttggccttacaaatgccctgtcaacctatcaggcagcgattgtgatcgtcttctttgacaatattcttattttcaatcgctcaagctccaaacatgttcatcatttgcaaatgaccctcaaattactgcaggataatagtttttacgctacgggaagtaaatgccaattttttcaaagtaccattaaaaatttgggacatttagtgacatctcaaggggtccaagctaacccagtgaagattgttgccatggtcgattggcctattccgagaacactataactaataagggggttcttgggtttgacaagttattatcgacgatttgttgctcattatgctactatagtcgctcccttgacagagttgttgaaacgaggataattttatttggtaattcgattacatggtctgcctcataccatagtatcagatcgtgatcccatcttcactagcgctttttggaagaaactttttgagctcatgggcacaagattgaagatgagttcggcttatcaccctcaaactgatggccaaacaaaagtaaccaattggtatttggaaaagtatcttcgagcatttacagctgacaatcccaaacaatggagtaagtttctttcatgggccaagtatcattacaatactggccatcactccgcgatcagaacgactccttttcaggcggtttacagtcaactcccaccctctattccttcttataaccaaggttccactataattcaagtgatcgaagaggatttgatgagtcgtgatgcaattttgcagtagctgaaacaacacttgcatcaagcccaaaaccgaatgcaacagcaagctaataaaaagcaccgagacatagagttccaagtgggcaatacggtattgtttacgctccaaccttatagacattcaactgtagcaaaacgtctcaattccaaattatgccgcaggtatttcggacctttctctgtgatagctcgccatggtctagtggcttatactttggaacttcctcaagggagtcgcatccaccaaacattccatgtgtctcttctcaaaccataccatggccctccacctcctaagcgctactccttgcctgagttgagggtagcaaatcagccactaatggtcccatttgatcaacaacaaacctgtgaagcaagttctgatacagtggactcttagctcggtagaactttgagactttctgtcaaatatatgatgtttccaatcttgaggacaaggttgttttggaggaggggagaagtgttagccaggcccaataatattagattcaaatgcaattaaagaaagagtcaaaagctgggtggataattcgactcaagactagagtccagcccaaacaacgatactgctacaattaccaaagtggatgaatcgaagagaacttgaatgaaattgcagaggagaaggggacgctgcgcgtgaggccaaagtggatgaaagaattcgttatggtggtgagatgttgagcagctagcaaccaatttcagttagagttgtaacctttttctttgctgagataaataaaccattttgaaatttcaaggggattatctcgaatgttaagctgaaagacatttgggagttttatattgactcgaagaatacgctcaccttatttggggtatcaatatgcctatcttcattgatatatttccatttaatcctaatgtcataaagtctacacaaacaaacaaatacattcggacattcctcttactagaattataaccagtcaaatatgaatctttcatgtacttaagaacaaaaacgattggttttcgaacatttcaaagcataagccaccaagcatttattttaatacaaaacagaatgctggggtattgaaaattcgagtctttcctcatttcccaattcgctctgatcagtatagccatgcacactaatagttcaatcaaataattaataaagaccaccctataaaagcctaaatgcagatcagtggaaatttagaaaaccaaaaagcattcaatttaaggggtatgaaatcaaacagtaacttggaaaggtgagatttcacaaatagccaagaagatgtcttgaattgggattactttacctcatctctgagctgtttagcttcctccggagtgacgccgtctgcaagagttctcaaaacgaaaacgttaggatacaaaacgacaaagaggaacaggaacaggaacaggatgactccaaacttgggtttcggagcttccattgctctcttctgagcttgttttttttcctcaaaacagcgttcgctgggtaagcagaccacccggcgccgttttcaacttttatttagtgtggaagtaaaaaagcttggaaaattctaaaattgcattgatgcattcttgtttaatgtataatatagtttttttttaaaagtattttgtaaaattttaagaaattcacataaatttaatacattgaaattatggatcaaatattgtattgtatatgtatctattttattttactagatgagagttacgtggcgaaccacgtaaatattagttttatataagttctagtggtttttgtttaaaaattcagtaattaagcaacggcaacaacaatagtagatagatctatttaagtttttcatatttaagctttggagtgttatttgtttatgaatttattgaaatacttgaatatttattgattctgattttgaattgttctaatttattcatacttgaatatttatattgatgattgttaatgaaattagtgtgtagctttatgtttctagaaaaaaaatatattttttaatatacagtttaaattttatattgatgattgttaatgaa

SEQ ID NO: 296011 - DNA, 2311 bp, Cannabis indica
  modified_base (2286)..(2286): a, c, t, g, unknown or other
acaatctcagagtaagcctagttaaattttagagaaagaattaattggaaaactcagctcattgagtgagtgctacaacctttcattaaataggcaaaaataaaattcagggtaaatacatgagccagtaaaggcagtacatgtgctacacaaatatctaggctcaacggaaaggttgttagcaaaaacaatgattacaaatgattacacaatcacccttgggattctttcattcacaatgtccatcatgcccttgtgccacctcatcagtagaatcaatttcttttacaccacccctcaaacgatatggtgatgcagtcacattgagtttgtcaactaagaatttgaatcttgtgggactcagtccttttgtcaagcaatttgcgatttggtcatgtgaaggaatgtatcgaatttccagtttcttttcttgaactttatctctcacgaaatgaacatcgagttcaatgtgcttcgttctggcatgataaaccgggttagcagcaagtgcacttgcagttaatttatcgcaccagataactggcacagagggcatcttgaatttcatctctgttaatgaatttttacagccatgaaatttcagcagcaaggtgaggcaatgcacaatattcagactccgtgcctgaacgggaaacaatagtctacttcttggatgaccatgaaattagagaatcgccaaggaaaacgcagtaaccagcaaccgattttttgttgtctaggcagcaggcccagtttgcatcaaaaaaaccaaccattgaaagactgtcacttggagcaaagtgaagatcatgatgcattgttccctttagatatctgagtattctcttttcagcactctaatgtacatccgttggttgtttgagaaattaacttagcttgttaacagtaaacgatatatctagtctcgtgtgactaagatattgaagtgctccaatcacacttctgtagagagtttcatgcttgagaggctcaccatcattaattgacatcggttttcttgcagtaattggggtcacactgggtttgatgttttccatttgatatttttgcaacagctcattgatgtatttaccttgtgataggtaaaaactcgtgttgtctctaaacacctcaattcccaaaaagtaatgtagtggaccaagatctttaagtgagaaagtggtgttcagtctgacaatgaaaacattcatctcctttgtgttgtttcctgtgacaattatgttatcaacatataccaagaccatgatgacataattggtttgtttgagcttgaagaaagaggaatcagctttagagttctcgaatttccattgtagaaatgttgctctaagcttgttgtactaggccctcggtgcctgcttaagaccatagatagacttgttaagtttgcagatgaagtgaggcctttgttcatctttaaaaccaggtggttaacacatataaacatcctcatcaagcactccattaaggaacgcattgttgatgtcgatttgcctcacttcccagtcatgagccacgacaaaggtgagaacaacatgaattgtggctgccttaacaactggactaaacgtctctccaaaattcacaccaggtcattgatgaaaacctttggcaactagttgagccttcaaccgttgaaggctgccatctgcattatatttaattttaaagacccatttgcacccaattatagtaaatgcatcagatggtggtacaagaatccaggtgcccttgcgtttaagtgcaataaatttagtggacatggcagcattccaccctttatgttggagtgcagctgcaagtgaagctcgttcgacaacagaatgatcaaagtgtgccttggccaggaacacacgaggtttaaaaatccctgatttcccttgtgtgatcatgggatgacttggagcaaagggagcttggattggttgtatcttagaagaaggagatgcaggcagattgatgtcaggttggcatgcagatgttggtgtggtaccctgtgctacatggtcaagatcatcgtaagcagggtaaggtatgggagagccaggtgaaggataatgctcacttacagtgtgttttgttgactgggatggtgatgttgcagcagggagggacgaagctactttagctccaaagggggccatgacccctcccaaaattttggacaaaaaaaaattttaaaacaattttatgtcaaaaattttattttttcaaaaatttatgtatttgaccccccttaatttctttctttcttttttttttttntttttttttttttattttctttgtt

SEQ ID NO: 296012 - DNA, 6651 bp, Cannabis indica
acatgaagcttaaccctaaaaaatgttcttttggagtttcctcaagaaaatttttaggcttcattgtgaatgtgagaggaattgaagctaatccagagaaaacaaaggtcttaatcgagataccttcacctacaacgccaaaagaagttcaggctttaacaggaaggatggcagcactcaatagattcatctcgaagtcaactaataagtgtctcccatttttcaatgatttgcgaggcaataagaaatttgaatggaatgaagagtgcaaaaaagcatttaaagggataaagaggcatctgtcaacacctccagttttggccaaaccaataactagggagagtctatacctttatcttgcaatcttagaacatgccattagtgcagcattagtgcgagaagaaggtaaaaaccaacaacctatttactatgtcagtaaaaggttactgggggcagagtcgagatacccacctctaaaaaaactcgcactatgcctaattcatgcatctcgcaaattgcggccatattttcaggaacatcctattaaagtcttaacaaatcaaccattgcgacaagtattatcaaaacctgatgcttcaggaagattaataaaatggtcgattgaattaggacaatttgaagtaacttatcaccccaaggatttcaatcaaagggcaagatttggctgacttttttatagaaggagtaaacttaaaagaagaccctggtatagaatgcgaagaaaaaatatggaaattgtttgttgatagggcttcaaatgagatggtcgggggcaggagtaataatgatgtcgccagaaaactttaaattccactatgcactaaggttttagtttaatacttcaaataacgaggtagagtatgaggccttattagcaggattgagaatagtcgagacactaaaagtcaaaagcattacatgctttattcacttgctgctgatagtgaattaagtattgggagaataccaagcaaaagacgtgaaaatggccaaatacttagagaaagtttggaagaacttggagaagtttgattattttaaaatagaacaaattctataagagcaaaactctaattcagatgccctagctaaattggcatctcaatttgacctcgataagttaaacttagtatcggtggaggtcttagacaagccacacatatgtgaagaggaagatgtcgacatgatagatactttcccaacatggatgacaccaattgtcaagtatctattaagtggagtacttcctacagacaaaaccgaggcacgcaaactcttatttttgatcccacgctacacgatggtggaaggaaaattatataggagaggttattccatgcctcttttgcgatgtgtgttactaagcagaagcttatgaaataatcaaagaaattcatgaaggtttttgtgaggatcacgcaggttggtagagcttatctaaaaagttaatccgtcaaggatactattggccaactatcaataaagacacacacgagtatgtcaagagatgtgacaaatgccataggttttcacgtataccttgagtaccaccaaccgagctgaggatgatgacctcgccatacccatttgcaatatggggaattgacctaattggggctttaaattcagggcgaggtggagcaaagtatgcagttgtggcaatcgacttcttcaaaaaatggacagaagtcaaacccctggttttaatcacgtgcaagaaggttcttgattttgtcatcaagaacatcatatgtaggttcaacattccaatcaagatagtatccaataatggaactcagtttgatggtaatttattcactgaattctgtgaaaggaataaaataattaagcgcttctcgtcagtatcgaggcctcaaccaaatgggcaagtagaagctgttaataaaaccttaaaggatactattaagaagaagttaaatgatgctaaaggaagatgggttgacaagattccataagtgctctgggcccacagaaccacagagaaaaaagcaacaggacacactccattttcattaacatttggctcggaagctatgttacttgtagaagtttacattgcaacccataggcgtgaattctaaaattaggaataaaaccaagaacttcttaataagtccttggatctacttgaaaaaattgcaataagtcacaaataaccaatgcttcttatcaacaccgtatcacgaggtacttaaataaaagagttcgaaagaggcgtgtttaaagtaggagatttggtgttgagacgtgtatttgcaaatgtttaccgagttttttggcaaccgaataattataaagcttaagaaagtaatgaaggcgtaaaataacaagactatagacgacaaatttttacgtggttcaggcgttaattatccttagtccacaagtccgttttcttaggctctttggccggagattgtacatacaaatataacagggatggactttactccacctcctgttttcctcttgaagaagaagaagcttagtgggaatattctagagttgataatggaattattgtaatgtgtttacacagaataacccttcggcccttaggcaaaaatctgaaagagaagaagtcaaggatcggaaaccgaatcccccaccctgtatccctttaggtgtatttataggtcgatccttttgcatgggcaatttggggtggatcttcgcaaggatgaacccccaacgttggattggtaggtggcatattttccatgtggcctttactgatgtcagattgcactggttgtactggtggtgctttgaacgtgtgtcgcttcagggctgttcttatttgaagtacccttatccctagtcgttggatggcattgcatagtacacaaggacacgcatgctatgcatggtagcgcgacatggcggacaactcttgacattgtacatagaaaagcatggtcattgggtccgtagcctgatacgcatgggttgagcttctgcgggtcaaaggcgtaccccgaaatagtgcatcctatcttgaaaagatcaattttcctagtgtgagcatagggtccccaacttctagggtcgaatgagtctctggatcacaggcgtcttccttagggctcgaatctgaaaagacttctcgtgggggaatctattctgtgattcctctcaccttctcggagcacggggtgaggcacttgggcagccttaacgatttcttgaatttttctagattaatttccacatgtcatgcttgcaaaaatgcagataacatttaatccgagctctcaggacataccgtggtctgagagcttgcaattttttctcctattggattttttgcgctcgtggattttttgacaagacttttaatgttgtatgtcaacagccgtcaaaccgaagcgtcattatgtgggaggcatgatttctcctgcttccttgtcagagttttaaaagatgaattctaaactttgttgcgcgtgtatatctggggaactcaaaatgacggcgattggacttgggcagttttttcttcgagcattttctacgatgcatgtaacgatgggagtcatccattgagaagtgaggtatcctttaaacttctcacatctaatcatcagacatctcttggggcgaaccgaagcgtctactttgtgtgaaatgtgccccttccagctgtcccataaatactaacagtaatcaatccatttttaactcttttcccgtcgagttataaccttgcaacttcctttcttctcagtcacattcgaacgctattgtcttcgaacactggttattgccaaggacgccacaccgaaattgcctgccttatcaactggtaattttctcatctacttgaaagtttttgtgggaaacacaatggtgtacttgcttctgggacaccaattcccagtggtgtcattcttgggattgattgggtcaagtagtgacccttctctttttgttgtgccaatttgtagataggtacaccgtgtcttcccctgcaccggctggtccctccaatgcggcagaaagcagttcctctgccaggaagaggcagaaactcgttgtgacagattttggcatggaaggatcaggggatcaccctcggcccccttacgcccaactaattctgggccagcctagggccctccctcgagctccgtcaagaacgcctactgtgggatttgccttccctaggagggtagttccttttgaccctctgaaatgcagaggaagaaagaggcaaatcgggctttgaaagggtgtctagacacgaagcagctacaaattttccaacaagagacactgatgtcggtagtctgtaaggcagagcttacgaagaaatgcatgttgtgccccaggcgaggcagaatgtagaggttaaggccctagagaaccagctagcgtacaggctggggcgataggccgctcccttcgctacaaagatcctagaccaggtggttaggatcgcctctaaactgcccatggagacttgggaagcctgcagcagtgcggatgcttttgcgctgtctcattctgcaaagcggcaagccgttggggtaagttttctaagtgcttgcgttttttatcttcccctgccttctattttgacatttcaaacttggctttatttcttaataggaaaccttgctggcgaagatggccaccgtggaggttgggatgctagtggaaaagttaaagagggtcagggtgtcaaactgtgacctggacgctgccaacgagactctctaggatgagctcaccgacgtcaagttctagatcgaggtcctgcggcaggccaaccaacagttggagaaggagagcgcctaccaagctcgcttcattctgaacatgaaggtcgttcacaacctttatacagagattgtggagcggatgtccggtgcgggtccttcctcttcgtcaggtggtgcacagccatcagcctccagccaacccattattgaacctatttattttttcttttctttgtatatcccttcccttaactacactttttcagccgtagagacaattaacttgcacaggtcgcagggggtttttagtagtttgaataggataattcttactgttccttttttaaagacatgctgtgatagattgtttagggagtggttgcatttttcgaagcatctagttccaatggccagtgtttcaaacttttttccctttactcttgatcgtcgcttggttgattcagaaactgtttctttttttccctccctttcttagggctctgatgtttttcgactcgtttcccagagggtcatttgttcagagctggataggaagtggcccttttccatgaaacgaggtcttttactgtccttttccgagtctgatttttctacaagattaggtcctgggagcattatttgcgttttccctagagttaggaaatttccttactttggtccttgccaatttctcgttctagccttctatgcaacttactgggccaaactcttcgtgaagttcgcggagatatgttagtagggattcaggcgcgttcttttgatttcaaattttttttggcgaatgtgcttcttttctccgatttaattcttgagcttagttagtgagggaagaacttaaggttatttctcttggggagactttggttaagtgtgttccccacttttgttgcatgttaggttgaacgatttcggcagatggaagtaggatgttgtcgctgtcagcaattggatatatcataacccacaaatgagttgagaactttggggcttaaagtctcagccattttctttgagtctaacttgtgtttctttccaatttccgaagaggagtgttgggtgtatctttgctttgcacccttccacggaggtctttaagaaatgcatggccaccttcaggcttctgggaaggaaaaacctgagtttaaggtgagaacctgattgtatatcaaacaaccctttctatggcaccaatctcgtaagggagactctaggctagtcattggtttcttgaggggaaagctgggcctgtgcccttaaacgatcttccttgcgtaggggtttacttcagcaaacatcatgtcgagtctcgtggcagtgagcttttggctttcactaaggaaggaaaaaagcgcatgagctgggacattaaattttctagtaaacaccaaagggtgaagtattgttgggttcacgggagtcatgctagacttttgtgaagcaggcttcaactttcggggaggaagggtaaagtcgcctaaaagttcaagcgtagactttgcttgaagggataaaggggaagagcatcacgaggagtaggatagacatcaagcagccttccaattcgggaaggagggttgaagacgcatcgtacccccagtgatatttcttgcacaaaaaacaacgtgcatgcgagagttatgttgaatttttatgtaacaagcttcaacttctgggaaggaaggctgaagttgtataaaaattcaagcttagacttttcttgagaggatcaaagggaaaagcatcacgaggagtaggatagacttcaagtagtcctttcgatccgggaaggacggttgaagacgtatcatacccccattgatctttcctgcacgaaaaacaacgtgcatgcaagagtcatgttgaa

SEQ ID NO: 296013 - DNA, 7500 bp, Cannabis indica
tttttaaaaaaaatttacaaataatcttaaataactacaatatcacactcataaataaaatataaacttaaccaagagtttaattatctaataagagtgttgtcttcacacatttggcatccattcaaataagaaaactagattttttttttttttgaaaataagcgtgttcatacattcgattaaaaaacgttagacctctcggtcattacataagagatcctccggaactgatgaggccggaatagatccgtacaacttgtgaaaattagccacattatgggcaacaaaattacaagttctactagcatacaaaaaattacagcaaatacaagagggagcagacttaatacaaaaggagacatagttctcaagcgaccaatgtgattccatcccattgagagcattgataactatcctcgagtcactctccaccaaaacaaacttaacacctaattctagagccaccggaacagctaaacaacaggccgctgcttctccacataacgcatccgaaaagtccaaccgagccgtatgaatctgaatcacttcacccaggcgaattcttgcaacaaccgctgtgcacatgctctcaaggcccaccctaacatcacagttcaattttatccaatcctgaggggaggactccaggacaccctcaaggttggatttgggcaaggcaataaagcatcatgtaactctgcataagaagtacaaatctggtcaatacatttcaaaacatccgaaagtgagttattatgtatcaaatcattacgcatcctccagatggtttcaacaacaattgaagcatacagaaagacttcttctactcggatacctcgaatacccctattagtgagattccatataaatttgatccaattccaaacccgaatcccattgttacagataggataaatgccccacggtgaagcgcgccaaagatgtactgccacatcataagagaggaaaaggtgttccatggattcctcccgcatcccacataaaggacagcttgtgtcctctatgtggaatttttttcaatcactgatctaacagggagcgcattagagtgaatacaccaccaaaggattttgtgccgctccaaaattttgctattccataacttattccaaagcgatggagaaacctcacaatgaggggctctttccaaagcttgagacaggtaagtcgatttgcacgtgaaatgcccatttctttccaaggtccaaatccatttatctactccttggcccgagggtttgccacctttcaaaattgcagaaacagtttcttggtcaaagagtttatttagctttggtacatcccagttgccattagacctcaaaagatcagccacacaattgtcagtggttgaaccaatgccatttggttttgggataaaacttttatagtggggaatccatggatccttctagatactcgtctccctaccattagccaccactttacaggcccttttccttagaattgctttaactttcacaacattttccaaaactaggaatccgagtctttgtatctacatctgagaaagtccttcccttttagatacttggcttccaaaattttacagcataacgactgacaacctttcaatatgctccaacctcacttggtcaagaaagccaagttcatttcttcttttttccttaaagcctaaaccacccaatgacttaggttggcaaagcttatcccaagctttaagatgtagtccacgattccctttctcgaaacccaccaaaaatctctgactaaaccatcaatcctcttgaccagccgactagataatttcgtggtttgcatggcatagataggcatcgccagacccacagacttaatgagggtagctctgccagccttagacaaagtcttagccttccaaccttgtaatttagaggtgatgttgtccaggataaagttgaagtcagcatccttctgtctagatctgaatagaggtaatcccaggtattttacaaccccctctggagaatcaatacccagcgcttcgttgatacctcttctcataccattaggggtatttttactgaaaaagatttaacgttttaagcttattaactttctgtccagaccaagagcaaaacctctctaggcactcccaataacacttagcttcatttaaattggccctaccgaccaggataaggtcatcagcaaagaacagatgggatagaactggaccacctctacttagtttaattccctgaatattcctctttccatgggcctcttccaatagtcttgagaagacttctgcagcacagatgaatagatatggggatagggggtcgccctggcacaggccacacgagggcataatcttccccgcctgccccccattcaggcaaatattaaaagtggtggtggagatgcactgtgaaactcaatcgcgcaacttctgagggaacccaaaacactcaagggcatgatcaatgaatctccaactaggcctatcatagactttaacaagatcaattttaattgtaaaatatccctctctgctatttttccggttaaaagaatgaattatctcttagactatcacattattatcttgaatattattatatatgttatcttccaattaatcgtcttttatattaatgaaatccatttcctttctaataatacaaacaaatgtcttagaatagaagacctcaaatattaatgcacacaccaatgaatcaatgttagaattggacaaaaatataaacaccacactgacacaaatatatttatatgtatatcaaaatcattgaatacattttcacgtgtgagaatagtatgcgtggaccaaaagtagtattggtaatattgtctggtagagtacagaaatgcttcctactatagtaatattttttacccatttaactcacttttactgtctatgttaattttagaaaatagagagatctttttaccctaataaatccattccttctcagtttaggtaatgaagacagaatagaacccaaactatatttgtcactctctttggtcatcatcacctaacgacaatcatgaatttgactccacatgcaatatgacaaacaatatgatcatgggtcatggaatcgtattagaatagatttaaaataaataaaatactataatgaattattgttaataatattattattttgaaggaagagttatttaccaacaaaaaagaggtggactaattataacctcttataataattttttaatcaatttctacgttcgaaatcacatgcaaaattatttttttcgatttttttttttcaaaaatagaattcctaatattttagtttatcacacatgttcaaaaaacttcaaacgtatttctaacacggtaaactgttcgaaatttttaaaaatttatatgaatttacatgaataatgtggtaagaataacaaataccgtcatgaaaaaaaactttcagtatttatttttaagtacggaaattaactaaaagattatataaaaagagattgacggtaacacttcactactaactaattaaaaaaattaaatagaaaaatgttatatatcttatcattaatgaatatgaaaatataattgaaaagaaaagaaatattttagtgatacaaaaatcagttactcttgttttgttcaaactatctctaaactacttagctaatttacataacataattgtattttttttcctttttggaaagggtttacataacataaattatcaagtccaatattatatatattatgttacttggcaaatgtgacaagaaatgctcgaaaggcattttcaatatactgaccaaaataaaggttgtctctgtctgggacactgcctaagttccgattattactaataaagcatattagtttatactaaactttacaggtccctttaaagtaacaaaatgtccagcaacaaaaacatagtcatgaatatattatatagtatatatatgtatgtatatatgtctttaagtattaacaacaccaccttctttagatacctcatcaaggcgtcgatccatgatcgaagaaacggtctcaagaaatgcatcttcgctagttcccgggagctcagcttcatttgcttctcgaataatctcttcgataatagattccttcttcaaggtttccctgcacattatgcttccaattgaaaagggactcagccttctctccgctcctttcttcagaagcatggttgagattcgaaggtttcgagcacactcgggcgggagctcccacccgtgagacttgagaagttcaatatctcgcttggcatctagtgatttgatgtagtcgattgtgccctcagaataaggtttgcgagcttgtggccagtagagccagtcaaaggtgcaatcttcaaactgcagttaacacaaatgtgaatggcaagcctaaaagctctaattaacacataatgtgaatctaaacacttttctaatttggataaatagtgatgaattaggttgtatagagtgcaatccctattgaaaacttgcatttgggcagctgtatttgatgaccaaatatacaaggaatctatacatatctcaaacttaattatcaaagcagttacagagagacatgcccataatttctgaagtgtaatcttcaatctaccaacattagtggcttaactgaacaaatagttgtgaaagtaaattagattttataaacaatatgcaaggattaataatgtcacgaaacaaattagactatacagagtgcaatcctaattccttttggaaaagaaaaatatatataaacttgatctctcaacttaataatcaaagcacaatataagcaaactacattagatattataaagcaataaaacggtagaggcttacattctccggcaagcaatatccatgatcaattggagtgagcacaattgggcttccttcaccatctttctgaatcagtatgtttccagcatgcctatctgcatttgccaatcttatgtccaacacagaaattttatgaacctcagatacagggaaagctcgaggacccatatcctcacaacttccgtcgttcttcacaaacacctgcagtgacccaatctttacattcttgggatgaccatactcatagccatctggatgattgaatcctctgtgcaagcacttgaccataacagtaagaggcacaccagcaaatcccttctcgctgtaggacttgcgaggtccatccagtggatgatccaaaatgtatgcagcaacttctctcaatgctccttctcctacccgtgttccttttttcaatccctcgccatccaaagacaagggcaaaccacgcgggttctttgcagccattggctcttcatcaattggcttaaaaacagaaacatagtttagaccagatgaatcttgcatgaaataagctcctccagatccatctgaagaccgaatggggtcattcccttttgctaaaccatcaaaagtagacttaagtagctcttcaattagtgacagttcaacaacagaatttacaactagaggttccaaaagaaaatctctctgtactgagtttttctctacaatctgctgccttgcaagctttgtgctcaatttgttcactaaataagaccttgtctcacctaaatcggatgcctcaatagacacttcaaaattcttctcaacaggattggctgttactttggcagatttcctaaccaacaggtgaatcatggcatcgctatttttgcaaatatcattgatgagtctctgatcttcaagctcctcaccattgcataacagttcttgatcattgagatttggaaacccttctcctttcttagcaatttgctcttttacataagccacatttcgattcctctcaacatggaactcaaactccttcccgcatacagtgctaactgtaatagcttggagatcagaaagccttagcaccaaatgaaccatatgtccatcagaaactccatagtctcttatacaagaattgttccgagccagttctcttccttcaaacacgagtttttgtgtctttacaaaaaatcccttagaagcctggattttcagcttcactgacgcaatagaatcagactccataatacgcatgggaatcacagaaccagcaacagtaaggtaaatcaagattgaatgaggggagctgcttatgccattaccaggataattcaaagagacttcatatcctggacttagagctacccttgcaatcgacatcattgatccttcaaatcctaaaccaatcaatcctactgactaaacaaaaccaatctacagacctcaaactgtaaaagtacaccaaatgtagtccatggcttcattctggaacagtattttaacaataaaatctaaaacagtcaatcgcaacggacagaacccaaaattggtgctttaagttctcgactgcaaacccagaaaaaatccaatttcgattgctgaaaagaaatatcccagactctggaatacaaaaaacctacaaattaacagaagaatatttatcattatcaatgttaattaactgatcgtagtatattaaaagatcaaatgaaaaaactatgaccgaataaccttacatgctttccataattaaatttgagaaacgaaaattaacaggagaacaggaatgaagagatttaacgtttgccaaaagcttaatcttttttcctcgtgatcgaaattgagaacataatatgatacaatgacagaagaaagtaataaaaaaaaaattgtcaccattgcatgagaaatgaaatcaaaacacgcaattaaatcgattaatcattctcgcttcatcgttctcatttccaaacaaaaaatctcacatgataaaatcataaaaatcactgtcaaaacagaaagaataaaataaatcaaagaaaagcaaagaataatcttatcttaccgaaaaaagctaaaacgttcaaaacaaaattccagtaatcggcagcaatggaagaaattttcgatcgatgaaagcaaaagatttcttgagtactttcctcccaaattttcccgagaaaccggaattttcaacaacacaattacatttttcccgagaaaaagaacaaagaaaacttagagaaagagagagagtgtgtttttgaatttggatagttggaaaaataacagattcggaaatgggtatttataggactgtaaaaagctttggtctcgtcaatgtcttgtaacgaaagtcacgccctatcattaacgtcgttactactcttaacacttaaaacttaacagacgttattttctccttcatttattttattacagcattttatttattaggataattattattattttagactttatattttttttacaaaaattattgatttgtattaatattattattttagtaaataacaatttaaactctgtattattttaaaataatatcttaaatttaattttcataaaaataaaatttttagatgggttttatttaaaaaaaaacaaaaattaagc

SEQ ID NO: 296014 - DNA, 3959 bp, Cannabis indica
taataaataaataaaatatatttctctttcacaagtacagtggacaaaccgccatgtttgctctaaacccaacaattttctttcattttattttattataagttagataagcacaatatgttgacaaagtcacttattatgcctcttactaaagtcaaaactattaaattagagactattatcttagtttacttgtccccattggaagaaaaaaaaaaacaatctttaaattactgccctacctaaacaaagtcatacccaaatctcagttacccatgaataataatacaataagattatatttttttgaaataacaagttacttttatatttaccattttagggaaagacaaccaaaatcacaccctcttttctatccacatatttcaaaatcaaaccatataaaaatccatcaataaaataaaataaataaaaaaatacatccccattcatatttccctttttttcttcttcactcaatttcatgtccataattctccctttcccatcatcattatcactacattataactctcaaagcttgcctttttacctcagttatggtttcaaatcatttaacccacttttcaaaagagttgtttgtagtagtaataatagtatagtgaatctagtccccctaatgatacacaaccaattcatgagatgaccaatgattaatgtttatcttaatagaaaaggcgattgccatgtgtcaaacagggtgtccttacacgtggcaaacaccttccaaataggtttttaagcattgtgatattaaaatagtattgttattagaccatcaccaatataaacaatgggtagaattgcaaattgaatttatcattctagccaattaagaaaaggaaaaaaatcatcaaagcaacgattatgtcaggaaactttttcaacttcagcattggtgatactgttaggcaatacttggcaccactttaaaatgatgttttaaagtagttagtaactttatttttttcagaattatatattaatatgaaatatatagtatctaatatattaaactacactaacaatataggataacacttctatgggatgttaatatcttttagcatttgtcacggtggtttattatttattatttttttcattaaccaaataaatgtagtataaaattatcaacttaagtcaaatggttacagaaatttggggttaattaatttgattttgtattaatttgggcccgcgattatcttcgaacgtttcacaacaaacacgtcatggtgcggcggctcctccacttgtcagtcggcaatggacgtttctgttggcgggttagtacctcgaccaatccctcttcaggcggtgctgaaatggaaacatttactattgggctttctcgaagttaatactgatactgtcattagttctttagataatttagtaactcgggtatggtgattcgtgatcatttgagaattactatagcttcggcaagttggcacttggatggttattttgttcctaaagtggctgaaactttgactatctacaacgcgttgatttaatgcatctccttgggtgcggtatcattattcttgtctgactacttgaatattgtgcttaaacttaaaaataatatttttattatttttctttgggtctaattttaaatgatatttttagtctttgtaataggcttaaagatgctagttttgtgcattgtaatacatcttgttgtaatgttgttgtctattttttggccaaacttactctcataacatggaaaagtgtaatgtggtggccaaaaatttttatttgtattcaaataatagcttacctctacttttataaagtgtttgttgcttttagtggttgagatatatttttttaaaaaaaattcattgtattagtcaagagtttaattttggaaaaataaattaacattcatgacctaaggtttactatatgtttgttctgttggaaaacattagacacactgccacgtcataataaataaaattaattcaaataattttgaaaaagaatataaataatttttttttttgaaacaaaagaatataaataatttaaagcaacaagatatatgcttatattcgtggagattttataatttattatattattattatttacaaatgcccttgaaattgaaattgttttttatttgtttgatgaacaaaatcaataaaagttgatatataaatatttgtttaaataaaatacatatttatataaaataatttattatgacaacaaatatatatgtttatattcgtggagtttttgtataattgttattataataaatgccctatatgaaaaatgtttcggttgtttggtgaacaaaaataattgaaatattctttcattttaatggaacattgtttttaacacatttatcacatgtagttttataattagttagtaatttttcataatttttattaaactaaaataagtggaattggatattaaattacaccaataataatattacacatcataaaaatgttaaacaccataaataccctttaacatttcccattataataggtataattgaaatacttatattataaatctagtttttttttttttttgataatataaatctatatagttagataaatacaagagaacataaaaaaaattaaattaagattatgggaatgtgaacttgatgatcaccaacaaacatcaagaattttatattagaatttctcctatataaattgaataaatatagggtgcatgcatgaataaaatttatattatgaatcttaattagtattgattcttctacttgctaggtatatgtatttttcatacatagcattaaccaactacctttttttttggttaataattatatcaacaattttgctttccccctcatctatttattgaaattgggtaattattgcaagacaaaatattgtaacatgttttccttcataacaataatttgaaaaaaaatccaataattgtacacaacaaaaggataaaaattattggtatatatttgtatgaattctctttgtatacatagggttataacatgcaccctatctatcatcatcaaaaccgaggcccacattacgtacaatacatatataatttttatatgttattagtatttgttaagctagattattctaagtgttaaaaggttaaaattattagggatattaacggtaaaattttcttaacatttataattgtaacacatatgactctaaataaaaaaagacacaacgaaattattttatcttacgattttgttacagtcaccagctcagaaacacgtgacaatatatttctttagcttatttaatacataatataataatatattgccacattgttttgagttgacaactaatgaacaaaaaaaagatacgattgtaataaaatcgtaaaataatatacttttgctgccacttttttttaaattagaatcatatgtgtaataataaagtagtttcgccttaaatattctaaagggataattgcggcaaaagtccccaaaaacttgaggttgatgccgattagtcctcaacctcaaaaattggcggtgaaaatacctaaggtcccaatttttgtttgtctgttggtcctttttctaacggatccgttaaacccaaataaagtgccacgtgtcaatttgttattggtccaaataataattttaattaaaaaaatttaaaataaaataaaaaactaaaaaatatattttaaaattataaatttattttattttattttatttttaattttatatattttttttcttattcatcttgttcatgaacccaaccaacataaagttcgactgattgacttcctgaaattttcaaatcaactccaaatcacaaattaaagaaatctgcattcagaaacttaaaaaagaaaacaaaaaaaaaagcaaaaaccatctttaacatcaccaaacaaataca

SEQ ID NO: 296015 - DNA, 5613 bp, Cannabis indica
tctccactctagcttggacagccaaatcattcacgaactttaagtattctctcttcacaaaacaaatcttaagacttgaaatagagtaagcatagacaagaaagaaaattgaagcaagccttcagtctggtagtttcttttttctagagcgttaacagccacaagacagtttgtaaaaataacaatggacttttacttcatttcaacaacccagaaaattgccaaatgaatagccttcagttttacttccaaggcagggataccttcaaagatcttcactttagtttcccaagccaaactacttttatcaatagctaggatagccaccccacacctctcatccctgaaagcaccatctgtaaatagggtttgtgaattgaaagaccctttaagcactcaacttctttggaccaaatctaatttccatcacagtctcctcatggtgatttcttcttgctggctctcgatacttcttttcttcccaccatgaagaataacatttttatagttccaaatagtatcacacactgaaacaaaataaatcaaaactcgcatcaaaagctccccttttagatcttggcataaaaataacaaaacttcaagcaagttttgatcaaaaatccaatcaattctaattggaatcggggagctaaaccagagcagcctagacaaatgatagttgacaaataagtgcaaaggattctcgaccttaagattacataataagcaatttgtgttaccatcacaagcaaatttatcccttataggtagagaaccattgcacaccctccacaaaagcaagctatgtctcagatgtaaattgtttgaccaaatcagtttctaggaaggactagcatgatcaagacagtcaccttgatcaagctagtaggatgatttagcagagaactaaccactagagttaagcattgtctaatagattagcaacagactgacttgagactaggagccttcagtctcatcctctccatgacagctctgaaatcatcatatccaagccaaggaaaccaaggttaccactaaatgtttacatctcttccattggcaataatcgtacaagccctttccaagatgatttatctggcccccaggatccctttccatatcgcttaatcagaaggttttggtttaacaaaccaaaaggactcccaagaacaatacttttcctgaaaagcactagcccaaggcttctcaacattataggccatatcccaagccaatttagccaccaaagttctattgatatccttatacttcttgaatcctaaacctccctgctgtttaggttggcatagagagttctagttcttagttcccaagaaatgatacttctccaccccttccgttcatcagaacctatgaatcaaagcatcaagctgtctacacaaaaaagctagaagcatgaaagtggacatagaatagatatacaaagcaagagccattgaattaaaggcgaccactctcccaaaataagatatggctctcatcctacatccttccaatcttgctctcagcctctctttgaggaaaaagaagtcattgatacgatttctcgacaaaataagaagatttcccaggtaaaaaccagtcgcattagtcaatttattcgcaatgatttctcaatttctttttacctgccactagggaaattcttcgataaaggatactcaacttattcttactacacaattggcctaaccacattccataacttgtaatgtaatgcctcaaggtcacaaccgcctattattttctctcgcaaagatcattgtatcaactgcaaacataaggtaagaaatcaagatgacacctctcgcaatattaatgcctttgatttccctattatcatgagcatgttgtgacaacctttataaattatcattacataaaaggaataagaagggtgagataggatcaccttgacgcaaaccttaagacggcttgaaacgcttcaaaggcttaccattaaggagaactgcataagaagcactcgaaacgcaggtcataatcagtctaaaaaaatgctagtgaaaccatgtgcacgaagaatagttttgagaaacttccattcgatcttgtcataagccttgcgcatatcaattttaatcgccatcaactccccttaatttgcttctattattcctaatcgtatccgccacctctagagctaatagagtagcatttgcaatccatcttcaggcataaaagttgacagaaaggggatacaatcttatccacgatccatctcaaatacgacaaaatacaaaatacaatcttacacgaaaaataacagaaacttatgggcgagaataaatccaccctatttgcattgttgaatttcaggataagagaattgcaattgaaatttaagtccgggtccatctaatcaccttatcacccacaatgtcccaacatttcctaaagagcacacctgacataccatcggaccaaaggccttaaggggatgcatttgaaaaatatagcttgagatctaatacactgagggaataacatacagggagtcattctcttcctaggaaggagaaggaacaaccaatctaatttttgagttttataaacccaaagtgtatgttgcatcaatagaaccactgacattgcaggataccttacagacccattgtcattcttagctacgctggataaaaacacagctttaaaacacaataaaacatgaactttggttccccttccataaggcagaaaggatattggttgcaaatggatttataagctcaaggaaaatccatatggtagtataaataagtacaaagcatggctagttgcaaaggggcttctccaaacctatggctttgattttcatgagacttttaatcttgtggtcaaccacactacaatcagagttattcttataataaatctcaccaacaactgggttttacatcaactagacattactttcaagaaaaagtatatatgatccaaccaccaggttttgaagactcctccactccaaatttggtatgcaagttacataaatctctatatatgaattaagacaagctcctcaaacatagtatgacaaactaaacgctctactctctcataacttaggtttcataatgaaaaatcacattagtctctattcataagactcactaatcaacacattacttatgtcttagtctatttagatgatataattataacatggagttctctctctataattaccgttcttattcaatgcatatagtctcaattttctctcaatgatcttggaccactcatccatttctttggcatttataggttcattatattgatgatggaatcattctatcttaaaagaagtacattacagatatcctctgtcgtgccaagataaaattttccaatatcctttaacaacacccatgattggaggtgaaaaactttcagttgaaggcaatgatcccatactagtacgtaccataattatacaaaaaaacttggttggtgcacttcaatatgtctgcatcactagaccagagataactttaatttctctgtcaacaaagcctcccaattcaagaaaaataccttacaatcacattggaacgcagttaagcgactactaagatatgttggcactctagatcatgatcttcatctctaaaagccctctaacctagatgactggctattgtgatgctaactaggttagtgatccagatgatcgacgtagtacctcaggatattacatttttcttggtcaaaatttgattacatgatcatcttgtctcaagaagtagcactaaagatgaatatctcatcttacaatagagattacgtgatttagttactactctcaggaattaaagtccctcaaactagacctccaattgcttggtgtgataatctaagtaaaattttgatgttagctaatcctatttaatttacatgttcggacaaaccatatttaatttgatctcttctttgtaagaaaaaaaagttctcagcaaattactaagttttcagatcatttgcatagatatgatatagttgttgatatattcatcaaagccttaggttgttctcgttttacacttttgaggtccaaacttagtgctcaagattccacgacgctaagtttgaggggggttgtcaatattagttagttttttattagctaggctagtaattagtacaattgttatgtaattagctcttacctaattgcaacttgcttagcttataaatactctatacttatgctaaacatttttctaataatgagaagtaatttcattcaccaaatcttttgtttaacatgagtcacacaaagtctcaacaaaaaaaaaattaaatttagaatgttttgcgaaacaatcagcaaactgattgtaagatggaatatatttgcttcttcaagattttgtcatgaataaagtgaatgtctagctctatatgcttcgttctttcctgataaatattatttgggactctatatgcttcgttctttcctgataaatattatttgggactagtgtactagtattcatgcatgttgctgtggcaccatatatatgaatgatgtgggtgcatggcaaagtatatatactataacaatatttcaatggaaactagcttgttgaacacacaattgaccaagcaaccacgatttgtatcatccgagtaacaagtccaatatcatgctatatggactttatatcatctgagtaataagtccaattaatctgcgtcaaagtaccccataaagattaatctgtcattgaacttaatatacaacccatagtgcaaggtactttttagataccttaaaatttgcttttgctctctttgtattgtagtaaaagctttcaggtattatagagctccaaatcacgtttttgtagtgagttttaatatttaacttagtaccatcatggatggacaaaggtattccagccaccatatatagatgttggacaggcttttaaattggtcattttattctttcaccagcatatagtattctataatatataaatatgtatgtatatttatttgaattgcacctttgatggcaaggaattataatcaaacaatgttttaatttactaatttatgagtagtgttggatatatatattaaatggtatataatttttacataaattttaattaattgtacagttataattaattaatgtataaaaaatatatgattcatgtcacaaattttcttaatttatatatataactataataataagtaataatatccttgaaaaaaaaataatactaagtatctggttgtattttaattgagatgcacgtgcaagcaaagtcattgaccacaacttgctggccgccccggatctaattctaaataactatttaaatggggaatacaaatttacgtatccaataataaaaaataaataaaacaaggactcttaattagatatacataatacattatacatgcaagattaattaagattaaaattggtatatgtagatcatattcaatcaaattaattaatcactataataggaccgatcttgaatatataattttttaagaactaaagtttttatttataaaaatatagaaggtaaagatgtaatt

SEQ ID NO: 296016 - DNA, 4205 bp, Cannabis indica
tggtttagaaagtaggattaggtgagtgtatggtaaggtgtatggtgttccatctcaaaaccaataaatgagtagtctatgtatgtatgatatttagtcacacattatcaatgtgaaactctctaacaatcccggtattttcatttaccaagccaactaaaatggggtactaagatattggttgaaaaaataactctatttatgaggtcatttttaatggtcctatagaaggactcaaaaatttaattaaaaatctgtaatatattatatgtgttaaggttagaactccttctagccattgttgaagaacactaaagaaacaagaaacaaaagactgaaagtaagagagaaagaattgagttgaaagaagagagaaaagagaagaagaagaagaagaagaagctgagaaagattgttattgcattactttgaacgagagagctacaagagtttatatacaagtaaaggccaaggcagttgaaaaacagaaaagccaacagcaataacaaacaaccaaaacagttataaccgaaacagttataactaactgtcatgacactccccctcaagcttggaattggtactgggaccaatagcaagtttgttcttgagcagagcaaatcgagcagtggaggtggcctttgtgagcccatcagcaacttgatcagctgcagggacatgttgaatactaaccatttttttagtaagcttctctggaacaaaatacaggtccagctcaatatgcttagtacgggcatgaagtacatgattagctgttaaaagaatggtgattaagttatcacatgagataatagaagttcttggaagctgaattgtgagctcagtaaacagagagtgcatccatgtaatttcagagacaacttgagcaagactcttgtattcggcttctgtgcttgatctagaacctgtatgttgtttcttgcactaccatgccacaagatttgatcccataaatattgaaaaattagaagtagaccttagatcatcggggtcactagcacagtctgcatcacagaatgcagtaacatcaagttcagtggggttttgaagtgttaaaccatgagacacatttccacttagatatttgagaattcttttcactggattccagtgatgatgaggaggattggccatgaattgacagactttattcacattatatggtatttcaggtctattaatggtgagatattgaagagtaccaataatagacatgtagtgttgtggattgtcaataggatcaccttgatatgctgaaagtttcaaaccatttgtcattggtgtaggagctattttggcatcttgcatttgagctctgcataataaatctttaatgtactttccttgagaaagatgcaggccagaatcagtgtgttgaacttctataccaaggaaataatggaggctaccaagatttttgagagaaaatttgttgtctagagcctgaatcagtgaagaaacatgttcagcatcactactagtgatgattatatcatcaacatacaccaagatgagaatcacatacttggatgtatgttgaatgaagagattgtaatcaaatttagaggaaacaaatccaaaagatattaaacaatactgcaatttcttgaaccatgcttttggagcctgtttcaatccacatatagccttattttgtttgcataccagatgaggagcatcaggcaattcaaagccaggggttgtgacatgtaaacctcttccttcaaatcaccatttaaaaatgcattatttaatatccagctgttgaatgcatcagccctttgccaaagcaagagacagagcaattttgactgtcactggtttgacaacagggttgaaagtctctgtgaaatcgaaacttagttgctcatgaaatcccctggcaacaagtcgagttttaagcttattaacagtcccgttagggtttagtttaatcttgtaaacccacttgcacccaataggggtcctacatcaggtagaggaacatatgtccaggtgacattcctttttaaagctgccatttcattattcattgcatttagccatttttctagtttcatagccattttgacactagttggttcatgaatggccagataaaccttaggtttgtagatggtagatttggctcttgttttcattgaatgcttatttgctgtaggatcatgagtaggaacagatggttgaggcacatgcaatgttgaagtgggagtggtgacaggtatgctaggaattggtgccatatgttcatcagaggtggaaacagatgggctatttggctcttgtgttgagatgataggatttgggacaggggtaggttgaatagctgttgcagcaggataaaacacaggatatgtgtagaaggttctgagttatcatcagggaatagaaactcagctatgtatatgggcgttgatttgggaatggtggcagaaggtaaagattcatgactgtgaatcggtgcagatgaggtattagagatagtaggcttgtaaggaaacttagactcatcaaaaattacatccctagagatgtacattctaccagaagcatctaaacacttataacctttatgatttaagctatacccaacaaaggtacatggagctgatctaaaattaagcttatgtttgttataaggcctgatgttgggataacataggcatctaaaggttcttagattggtgtattcatgttttatattgtacaacaactcaatgggagattgttgctgtaagacaggtgttggtaatctattatggatttaaacagcagctctgaaagccttatcccaaaatttcaaaggcattgaggcatgagcaaggagacttaggccatgttcaacaatttacctatattttctctcaacaaggcaattttgtcatgagtggcaggacatggatggctatgaagtatgcctatttgtcttaatggttctgtgaaagatccaaactctccccccaatctgtgtgcagagttttaatcttcttacctatttgaagttctgtctcagctttaaaattttgaaaggttcttagggcttcagacttatttttgagtaggtatatccaagtgaacctagtgtagacatcaacaaaacccatatagtatttgtaaccactgtgggaaatggtgtgtgaaggtccccaaagatcagatacaattatttgtaatggctcagtgtagacagtttgagatactttaggaaagggcattttgtaaatttttcctaaacagcaagcttcacaaatagagctagagattttattactatcagaaatattactagaattcatgacagattgaacaattctttgactaggatggcctaacctattgtgccacaaatcaaaattcgacatagatggcttattacactgagtatacatgttgttattagatttaagactactatcatcaaaggtaacaaagtaagcatgtttctgatctttaagactgggagctaaacatgatgagggagactgagggagcacctgaaatcggctaggatcaaaagtatataggccattgtggagggtcccagtcaggattatagctttggtcctcagatccttaacataacaaacaagaggatgaaattcaaagaaaacatcattatccatagcaaacttgaaaacacttaataaattcttagtaatttctggtatgtgcagcaaattcttaagaatttaaggtttatctgaatttggagacttaaacaaagtagaaccagtatgttaaattgccaaacctgatccatttccaacatatagtttgtgaccattgtaatcagtactctgcaccaggttattcacatcagatgtttaatgattggtagcacccgagtcagggtaccatttcatgtcagttccttgagatgtttgagcagtgtgagcttgcattgatttggttccattagggtgggaaaaacaccagtatagctcttatcaaaccaatagaagcactcaagagccaaatgtccagttttatgaaagatttggcactgaaatttggtttgatttgttcggaaaccctccccccccccccaagattgagtagtaaagtttccacgtccagcattagtgctatttgatccacctcgagagttgaatccaatgttagatgctctattatagtgataactaggaaaattgagtgttgaatatagtgttggaaattatttt

SEQ ID NO: 296017 - DNA, 5158 bp, Cannabis indica
gaaaaagatcatcataattacatcatgactaaaaaaaaagcaagaaatactttttttactagaaatttacaatgagtaatcttaaacaatgtaaaattattttttataactaattaatgtatttttcgttccaaatctagtttacagatagttagcgtcatcccccactaaattttatatatattttataaattacgttttttaaataaatacccttataattaagctcaagtctacaaaaaccaataacagaaaaacagttacaaactacaacgactgaagcatagcaagctactttcactgtctcttactctaacagaatttacaaagaaaaaacttcaatatcaacaaatccaactcaactgaaccagctcagaacagaccttagcaaaaaagaacagaagagcatcatgctgcattttccatctgtgagctaagagttagagagagagctttctttatagagagaagaacgttactcaccattgttgtaccagcaaagaaaagaaacaaaagagagttagtaaaaagaaagaggaaaacacatttgaagagagttaatacaatatattatctgccaaacctaattctggcatgaaatcttgagagactcaaagatctgtacctgttattgacgatagtggaactcgagcatcactaaggcaagctcgaaaaggatgtagcctatctcttgggtgaatctttgtcaaaaatatggtgttttgtaaattgttttcattctctctttgattctgattgatcatgtgcgtgtgtgcatgtttggatatgaaaccctaatttttctctctgtgttttgtgttttctcgaaggagacaagtctcgaatgttctaatcaaacatttgaggtttgctagggtttgcctagggttattggtattgctattgggtcggggttttggttttgtgtcaattttttaaatggacattaatttttttttaataaacaccgtaaaacgtttaattgggcctaaatttgtgttgagtgattttggtgtaggaataggtagaattccaatagtggtatcaaagaaatttttcgcaacaattaagatcacaagaaatataagaagctagcaatattggaagaattcaatcagtaagaaccagaggagggtgctcctcaagaacttgaatcagacaatggagaactaaaggacatccctttggatgatcctatcaaaatatctaaccctaactctgatttgatttctagcaactttagcatgagtagattaaaaatgatattgaaaagtttgatgttttaggtgactatcgaatctaaagaaggaagataagatgattgctggcacaacgaaagcttctaagagttcttgaagaacacattgaatggccagaagaaatctctaagatttaacaagaagagttccttgagacaacaactaggatcattttcttcactctcacaaatgcaatcatcaggttggttgctgaggaggaaactctagcaagaatctagaagaagttggaagataaatttcaacataagtctttgaccaataagatctttcttaagaaaatgatctttggattcaagatgaacaggccaaagaatctagaactaaatctagatgaatatttaaggatgcacagagtttgcaaattctagtgaaaatgaagctctaagtgatgagaatcaagctattataaccctcaactcactatacagagaggcgaagacatctataaagtataggagaaattctattactctagaggaagtcatctctgcactcaattctatggatcttgtgatgaagaatgacaaactgggaagttctaatggtgaactgaacctaagccgtggaagacctaatcaaagaaagccatggaaaagtagaggaaagagtcacagtaggggtcctaacagaggtggatgacatggcaaaggaaagtctaaatatagaggactcaaagaccaaaatggatgttaccgctgtggggaacttgggcactacagaagggactcatatttctggaaaagaaataagaacaagtctgatgggaatggaatagatacaaatcagggaaacaatcattttacaaagaaaaaaaaagcaacaagaagctaacctaagtgatggatatgaaagtggagaagtctacacagttgctttagaatttaaagatgaatggatcctagattctggttgtcaatttcacattactaacaataagaatcttctttatgattacagggaatctaaaggtggaaatataattctaggaaacaatcagacttgctacatagaaggatctggaacattaagccttaaaatatttgatggtgtagtaagaaccctaacatgggtaaggtttatgcctaacttagctagaaatttaatatcaattagttttcttgatgatattggtgttgtaagtaagattgaagtaggtaccatgaaacttaacaaaggtgctatgacaattatgaaagggttcaaagaaagtggtttgtattacttacaaggagaaccagtttcaagctgtcacaacatttctattaagacaccagaagactaaggcaatcctatgatatagaaggctaagacacataagtgaaagaggtttaaaaattacgaatgaccaacatctattatgcaaatacaaagtaagtaaaatagatatctgtgagcattgcatcctaggtaagcatcacaggttaaaatttaaagttggcactcacaaatctaaaggcattctagaatacatgcattctgacttatggggtctgaaaaaacctcaactcatggtgtagttgtaattactttatgtctatagtagatgactactctaagaaggtctgagtttctctattgaaacataagaatgatgcatttcctaagtttcaagagtggaaagtaaaattgaaaatttgactaacaaaagaattaagactctaaggatagataatgacctagagttctgcaatgatttgttcaattcttattgtagaaagacaggtattcaaaggcacagaattgtgaggttaacaactcaacataatggtgtggcagaaagaatgaataagacaatcctaaacaagactagattaatgttgttttagtcaagactggcaactagattttagggagaagttgtgctcactttagcatatttgataaacagatgcctatctagtgctaaagagtttaaaactctagaagaaaggtggagtggtaagccaccatatctagtgccaaagtgttggtaagttagagactcaaatatatttttctaggatacccggatggtacttagggttatagactttgggtgaataaaaatagggtttaaagactattaacaatagatatgttattttaaatgaatcacattttcctcgtgctattaaaaactctactgttgcaggaaataactctaaaattgacagtgctaacactatcaattttgacttggggactaggacaccaaaaaatatacctaatccagaagtgataaatggcactaatctaaacccaaatattgtttaggtgaacagacaaagaatgaagaggatattgttcaggtggaaccccaagagaacttggagaactcgggaactaatctagacaactaccaaatagctagagacagacggaaaagaccacctaagcctaatactaaatacaactataaagtttggaataaagagaattcctatgcactactaagtactctagatggtaacaagcttgaacaagagtattatgaagaagttgtgacttgcaaggaatctaagaaatgggtatggatgaggagatgaattctcaaatcaagaacaagacttgaaaagtggtacctagacctaaaaggaagcacatagtttcatgcaggtggatgttcaagcaaaaagagggaaacaataaaggtgatctagtaaggtacaaggccagactaatggctaaagagttgcacagaaagaaggcattgctacactgagatattcttccctataatcaagtataaaacgataagaatcatgccatgactggttgttcagtatagcatggaagtggatcaaatggatgtgcctactgcttttctataaggtgaactagaggaagacatctatatagaataacctaagggatatgagattaagggcaagggggacttagtttgcaagctaataaagtcgttatatggactcaatcagtcccctagatagtggaacaagatgtttgacaactttatgaaattagacagggattcactagaagctactatgacacatacctgtactttaataaaaccaagatggaagaggtcatctacttactgttgtacgtagaggatatgttaattatcagcaaggaaagagtcaatattaatatgatgaagcaactccggaattcgaaatttgagatgaaggaccttagagtggctactaaaattttggaaatttctatcattagtgggaaaaaagaaggggatcctaaagttgtatcaagaagactacttagagaagccaattgagaaattttttatgaaggaagttaagaagactagtcaaactatcacttatcaataccaagtctttaagaaggattgccctacaactaagatagagaaagaacatattagtaaggtgtattataatgttatgggatcaattatgtacctaatggtgagcactaggtctgatttggatttttctataagtgtactgagccaagtacatggctaacccaggataggttcaccaattagccatgaaatagatctttgggtacttaattggaacaactaaaactatgttgatctataaatagaacaagaattcaactctaattaaaggattctgtgattctgattatgcaagggatagagacactacgaggtctaattttgcttactactttctaataggagggaattgtgttagttggagagttcaattgcaacccgtgatttcactctcaactactgaagcagaatacatatatactacaaaggctattaaagaaactatgtgaatcaaaagaattatgtaagacctaatgctaagtaatggaatgtctacaatatacttagacaattaaagttgcattgcaaaaattctgcattcactactacaaaaatgagtttttctgacgtttttaaatagtcgtttaaa

SEQ ID NO: 296018 - DNA, 2796 bp, Cannabis indica
aattatttaaattttattttcgatattaaattatatatatttttataaaatctacatgtgattcaaaataatgtttacgaaaaaaagcttttttttgaatgttgaaacatatagagtctaagaaggatgtaacatatatttttcttttgactatccaatactttttgaggtgttctaaggtacgcattttaatttaataagtagaaacttacatttgtaaatggcaggatatgttcgtgggtgcaagtgatactacttcagcaacaatggaatggttaatggcagagcttgtgaaaaatccaagagtgatgaagaaagttcaagaagaaattagaagagtggtgggaaataagtcagagatagatatgaacgatatcaaccaaatggattacttaaaatgtgtcatcaaagaaaatctaaggctgcatcctccactcccttttttactccctcgaaagactttatcaagttgtgttaagcttggagggtatgatatacatggaaagacaagggtgctcatcaatgtatttgcaattcaaagggacccaaatgagtgggacaaggcagaggaatttgtgcccgagagatttgagaacaacacaattgatttcaaaatgggccaagactttcaatttgttccctttggcattgggagaagaggatgccctgcagtgtcatttgggactgttattgttgaatatgttattgctcatcttttatattggtttgattgggagttggttggtggtgatgatgatggatctgcaatattggatatgagtgaagattatggaatcactgttcataagagaacttctcttcaactcgtacccataccatattccccttgatctatttacatggccttcatcatattatcaatatatatgatatgtgtgttatatgctttcaaaactttttctttaataactttccaaacctagtaggaatcataatgaatatgatgatgatgtataaatttttattcgttagattttaaaatccctttttagtaaatatgtatttgacaaaagatcagtatactagtaaaaaaaattgagtacgcatatttattttacttttaattgagtacacacatcctacgcctgacggggggagtaatttgaaaatgggagggtcaatagtaaacaaattaattagggggcaaattattaataattatataaaattattatgaataattgaaaatagataagaaggaaagagaatgacaacttgaatgagaatttatgactagaaatagaaattaaatcaataaagtaaagaaaaatacaatagtatttatgatataattaatttgagtaatttagatatccatatatgtataatatttgagtaattgatataattgattacttaaactgctaatcagccatggaaagagaagactcctaatttgagtcatttgcacatttttgattgtgttcgctacatattgaatgatcgagatcatctaggaaaatttgatgttcagagcgacgaaggaatttttctcagatactccattaatagtcgtgcttatcgtgtgtataaaaaaggaaattccacaataatggagtcaataaatgtaaaatttaatgatctggaaatttcaaactccgtccatggtgattaataaccacttggtccacatatatcaatgatgcctcttatgtctaatgctctaaggacataacgaaaaccctaagaactctctcatctagagacgtgccagtgcatctgagaacattactagtacttcaacagacgtaccagctactgaaatcacttttgataatcaaataaccactaaggatcctagtaattcttctaaagtacagttatataagaaaggtcctccaacctggattcaaacagctcgtccacctacaatcgtggttggggatccaaataccaccatggtgacacattgtaaagttctaaatatcattccatctgcttgatatgtctctctagtagattctcacaatgtcactaaggcttttctagatgagttctagaataatgctatgcaatatgagatggggtagttcaagaggaacaaagtatgaatcttagtacctaaaccagatggtttaaacatcattgggaccaagtggatttttaagaacaaattcaatgaatttggcactgttaacaggaacaaggccggacttgttgctcagggatataatcaagttgagggagtggattttgaggaaaattttgcaccaattgctcgacttgaatctatctgattactatttgttgtggcatgttttttgaagttcaaactacaccaaatggatgtgaaaagggcctttcttcatgattttcttcaagaagaggtgtatgtgaaacaacccaaggttttgaagatcccaagtatcttgatcatatgtataaactcaagaaggccttatatggcctcaaacaagctcctagagcatggtatgacaggttaacttctttcctcatttttaatgagtttgtgagaggtactgctgataatactttatttatcaagcattcgcaacctattatttttgttgctcaaatttatactgatgatattatttttgggtttacttgtgataaggaggttaccaattttgttgatctcataaatagtgaatttgaaagggaaatttgattttctatacttagaaatcaaaaaaaaaattccctaaaccaaaatttaaacctaaaaaactattccttttttctcaaaaccccaaaaataaccccctcacaatattctactctctctgcatcatctctctctccctctatctc

SEQ ID NO: 296019 - DNA, 2552 bp, Cannabis indica
ttttttttttttttgtggttgtatattgatagattagaagtcaatttttaaataaatgtatctatatatcaatatatattgtagttatagagttgcactattaatttttgaaaagttaaaaataatttccaatatataaatcaaagttcaaaaataaaccattcatatgtataaaagatatacatgctcatttaagatttttatttgcttatacagaacaaacatcaaagatcctttttcaagttggtatattcaaagcactataatttgtcttaaatccccattcgaatgaaatactacatctacacccctacgtcctcctagctcctctcattattcttgaaaatagtttttggtcaattacattaaaaagagatatgtagagactagagagcatttacattgtactttggccatatgatctgaaaagaagggacatcagacaagaacttttgcaaaccaacccccatatcaagggtggcaagaatgcaaaaaataatgttaggggggccaaattacaatttttcaaaaataaactaagtccttttcttcagcgatttttagccaactaccaatgagaatgcgaaaaaaatgaagttacaattcttattatttgaagcattgtgatagtaccagatggttttttttggtgaaaactctagcaattggaacaaaaactgtcataaattgttataatattgacaatagtacgtagtgtggtaatatggtaataagtcactacatctcagaccaagactatataaagggtatcatttttctttagttttacctttatgagagttgagaaaagtaactctctccaagattctatgtgattagctgtaaagaatctatagtgtgcttctaccattgaaaattaataatagtgaaggtgaagctcaataaagatagtgtaaagcctaattaggttgctcctcgtttgaccatattgttattctaaactcatttttttagttgagtttgcttgtcatttcctttgtttgaccatattgttttcttgatgaatctatcttgcctgtgattataaatcacaaacaaatgggaatgcctaagaagcactgaagtgatgcagttggtggtaatgaactaatggtttctgtccatggttgttagctccttgttttgtaagagagcattgaggattgtgtgcaattaccataccatctagagagtcccacattggtaattgattttgagatagaattctatatttagtatatacatcacctcatactactttctaaactacaattacacattcttaaaattagattgtataaaaatgctaactaattcctttggtttaatgaagtgtaaggtctcactttttaagtttaatttatgataatgttatggcagtgcatcgtcatactcttctaactcatgtacttggtggtttccagtttaggattttcctttgtgcaagtcgagttttgttctatttgagtttttcctttttgttatgataatggtttttatcacccttgtcctttatagtgttagctttaggccatctttattgatttgccccttgtttagtcatcttctttggagatttgtgtcgttttatttttgcttgaattttggtctttgttcccttaaatccatgaatgatatttcttttccaaaaaaaataaaatagaaataaatctaagcaacctctaactatttcctccaaatctaactcacataacaaatattccaaaaatgttaggatagaagtaagcatacttagactatccctaatgaataataaaaatttcttgtcaaattcaacttaaaaaaatagtatatttgattgaattcttataattatgatctaatgcacaaggtacaaaatacaaattaactcaaaaattttgcaaaattattagatttttatccaaaatgtatattaaaaatatgtatgaataaaatattaaaaaccttcaaagcagtcattttattagtggaggcattgcttttactcttattgtaggataattttctattttctgtactctgagcacttatattttaatttttttatatgaagtttacattatatttatagtaaacattttacacatttttgaaaaattctaaacattttgtagcatcaagaataaatttataatcagttacacgagtataaaataaatcaagcatgggtgcaactaattatatttgaatcatattttttccaccttaaattattcaaaatttctcaaaaatagacatgattcatactataattataatatgctctgacatataaaaatattattttataatttttctatatactgaaagaaaatcttccctatcaatagggataaaaacatccatacgatagatatatcgctctcgcccttatcataagagagtttcttatttttcgtatgcatagaaattataatcaaaatattatttatatgatagtcatagtgtatattataaatatagcatgtattccccctgttttcgaaaaattttaaaaattacggtgctaaataaattaaacaattagttgcatgcagtggcggacccag

SEQ ID NO: 296020 - DNA, 1215 bp, Cannabis indica
acaagactatcatcgacaaaaagaggtgagagaccataagaccttatctcccaaagttaaggccttgcaagcttccatttcgtttagaatgttggataagatttgaaaatgcctccgcgtaaaacaaaaataaaagagatggaggatcaacttgtctcagtccccattgaggaagaacacaatcttgtatttccccattaacaagaaaggagaattgtactgaggtaatacataacataatcttctccagccacccaaacattatatcccaattttaacatgactaccttaaggaagcgccactccactctgtcataagccttggccatatccaatttaagtgcaactttattcccattcttgaacctattcttcctcatcacatgtaagccctcacatccaataatagcattatcatgtatgagtcgtcccctaacaaaagcactttgtgatttcgaaataaccatccccaaggaatttcatagtctactagctatgcactttgcaaccaccttgtaaatcacattacataagctaataggtcgaagctcttcaatacgttatggcttatcaacttttggaatcagagtaacaaccgtattattaacacaactcatatcagtaccattattcaacacattaaaacacacctcaatgacatcgttactgagcttcgaccaaaacttttggtagaagagagcagggaggccatccacccccagagcctttgtcaagttcatatctttgactgctttgaaaacttccccaaccctaaactctgtcatcaactcgtcattcatagcttgtgacaccttcggctgaagcacctcgttcattccccttaaagtatcgttgttaatccctaaagccacaaacaattgggaaaagtatctttcaataattatgcgaaccatctccttgtcatcatgccaaatcctcatattatctcgtaaaccttttatttcattctttttcttctacatagacgccttacgatggaaatacttagtattactatctccccattgtaaccataaggcttcactcctttgcctccaatacttctcgtctttttttaataacttattcaagtgttctttcactttcttcaactcaccccaaaaccccctgctgctatactaaagttaactcattaagggctcgtttggaacgtcgtattaggtcgtattatattttattgtattatattgaatt

SEQ ID NO: 296021 - DNA, 3950 bp, Cannabis indica
ttaactaagtcatctaactaataacaaaaaacagttttattggttaacatcccccctcaaacgaaaaggggtagcagccatttgaagtttgcttttgagatatagaaatcgatcagttgaaagggctttggtgagagcgtctgcaatctggtccatagcagggacatagcgaacagaaagttctttggcaatgatttgatcacggacgaagtgttgatcgatctcaatatgctttgagcgagcatggaacacgggattagcagccaaagcagctgcactttggttgtcaacccaaataatgggaggtgctgaaagtgagacttggagttcttgcaaaagaaaggttaaccatttcaatttagctgctgtatttgccaaggctcgaaactcactttcggtgctagaacgagcaacaacctgttgctttttggcagaccaagagaccaaatttccaccaagaaaaaccacatagccaccggtggaccgtctgtcgtcgatgcagctagcccaatcggcgtcagagtaagcaaccaagtccatagtagctactggtttaaggagcaaaccatcagaaattgtgcctttgagatatcttagcagacgcttacatgcctcccaatgaacaacagtcggagcatgtataaattgagatagtttgttgatgatgtatgccacatcgggacgagtaagggtcaaatattggagagcaccaagtgcgctatggtacaaagttacatcaggaaaagggtcaccagcagctagagacaactttgatgtagaacttgctgggttgggacaacttttagcaccatcaagttgtaatttgaccaagagttctgctatatatttactctgagataagtacattctagcttcattcctatagatctcaacaccaagaaagaagtgaaccggccccaaatccttcaaggagaagcatgtgttgagatccatgataagcttgtggagaaggtgattattcggcccagtaagaagtatatcatcaacatatactaaaagaataaccaacatagcacccgaaccataggtaaagagagaagtatctgaccttgaagctttaaacccccattgtagcagtgtgtttttcaacttttcgttccatgcccttggtgcttgttttaaccagtataatgccttatggagatgacagacatgagtcggtttagagggatcttcaaatcctttaggttgtttcatgtagacagtctcatgtaagtctccatttaagaatgcattattaacatccagctgcttaactatccaatttgaagtgacagcaagcgagagaacaatgcgaacagtggctggcttcactacagggctaaatgtatccgcatagtcaacacccggggtttgcaaatatccctttgcaacaagccgagatttgaacttatccaatgtgccatcaacatggagtttgatccgatgtacccatttgttgtctatgatatgcatgtgaggttgataaggaatcaatgtccaagtgtgagctttctttaaagcaccaatctcatgattcattgctgccatccattttggattggataaagcttctttaagtgttcttggctctttgggaaagagagcttcaggtaagggatgtttagaagctaaaaatgacttgggtttcgtgatgccattgagagcacgggtggtcattggatgagttctttgtgtacctgtagcagtagaagttgttggagcagaatggttgattggagtaggtgatatctgagataaatttggatgtatgtgagatgttaaggagggctgtatttgaggggatatatctggtgtgggctcaatatttgtgagatgttggctagttgatggttgttgtcgctcgggttggggtaatatagtagtctcaagtggtatgataggtggagggggtggatttgtgtataaattgggtgtagcagcagcaggtacatgatggtgtggagaagaaaatacagtaggattagtagagttcacaccagtaggaaagtaggaaaaagcagtaggtaaatcagtgggaggaaataagggtacctgagaattggagtttggtgcagaagctatagcagcaggaaaacaagtctcatcaaagacaacattgcgtgctatgtaaattcggccttgagaattctcacaaagatagcccttatgatgagaggaatagccaacaaaggtacacatttcagacttggaatccattttatgcgatctatatggccttaaatgaggataacaagcacatccaaaggtctttaaaatattttactcaggtgctctttgaaatagacattcataaggtgtaataaaatccaacacaacagtaggtaatctatttatagtgaaaacagcactttggaaagctaaccaccaataagacaagtcaagaccagcctgagtaagcatagtgagtcccgtttctgtcacatgtcgatgtttccgttcagcacgaccattttgctcatggtcatggggacatggatgagaaaaatgaatcccttgatcccttaaaaatctttcaaaaggccggtattctcctccccagccagcatgaacacccttaataggtagattgaattgcttttcaaccatgctcttgaatttgatgaaggtatcaaatgcctgagattttaaatgtaaaggaaaatccacgtatatctactataatcatcaagaaaatgcacatagtatttgtaaccttctttagacaaaacatgggagggaccccatagatcagtatggatgagttctagtggctgtaaggcacggttgggagacacatgatatggtaatttgtggcttttaccttgttgacaagcatagcaaaatttaaggtcttttatggtgccagaatgaggaacatgggaaagaattctgcttaatattacaggggcaggatgtccaaatttattatgcaatatattgatagtatttggagtagatgatagcaaagctaaaggagaacaagtagagacataagaagaatgtgtagttttattaatatcactagaattacaattgtcaactaagtcatgattgtgtgaaatacaggaggtattacaacaagaatgaaaattagacttaggtgaagttgcaagaaggcactgaagagaattggaagaacaaccagtagaatcaacgccaagttggtaaagaccatctttaactcgtcccttgagcaagactgtcccagattgcttgtccttaacaaaacaataatttcggtgaaactcaagaaacacatcattgtctttagtgagtttagagacactaacaagattctctttaatatgagggacttgaaggacagatttcaaatgcaaaggacaagaagaagaagataaagaagaagacccaatatgagtaataagaaggtgcttaccatctccaacagcaagagattcggtgccagtatagggtgttgaagtctctaatttgtctgaactgttagtaacatggctgtttgcacaagtatcagcaaaccacgcatgatcatcaccatagtcaggcactagggttgtagaataggctttaagatcagtgaagagctcggtctcagtgagaaaagcacgagagccaacagtaccaggcttgggtgtggtccaagatttgtcgaaacggtagtgacaaacagcagctgaatgtccaaatttaagacacacttgacacaagatccgttgggaggaggaagtaccacgaccacgactcaaaaatcttgaaaacgagtcattggaattacctcgaacagttggtggttgtggcctaaaattcgcatttcttgatgagccaaatgccatatttgcttgcattttaagagaaagatcagccatggtgctgtgatgttccaaccgactttcatgggacatgagtaatgttggaaattattttaaacatcctaaataagaactttataaaacgataaattaaacaca

SEQ ID NO: 296022 - DNA, 6508 bp, Cannabis indica
aaaaaaaattaattagtaatttgttaaaaaataaaccaagatgttgtattctcttcacaatatttatttattagaaaaaaatattaattaaaataatatttgcgtttcatcaaatatttagaattattattgttattcgtgctttcggagtgatgacatgtacaattctaaagtccaatttcagtcaaggtagtcctaaacttgagccaatcaggatagcaatcccgcccattggcaaagtcacgctatggttccagatccaaacgtgagtccagctcaccaacctgtaggaacttattttactaggatcttaatttactaacatgtttatttgattatgcaatatataatctaacatcctaaaatatgacatacttaaaacaatcaaataacaccttaaaatttaagattacttacattaatggtagtagaatataatatctccttctgttcagtactctaaagcttgttccattttgtagtagagtatcaccaagtttgaacctagatcttgttcattaacctaaaaagcgaaagttcttcataaatctcccacaaaggtctgattaccattgtaatatcccaataagcctaatggtaaatgattagggtttatatttttattattggctaattagataataagtgagattatgatcctactaatttgtttcagtataaattttaaatccgttataagtggataaataagcgtaatttattaattacggagaattatatagcatgtgtgaatttaatataagctatttatgaaataaaaatatttataggattagcagcctttgagactcgatcaggcgctaaaaatatcataacatgtttaattaatagatttgatgggaatattatgataagttgacagtgtaagtattgaagtaattaggagtatatagaatttgacctagtgtcctagaaataaaaatttcttaatggctaagaaacgataagataactactaataataaagtttttattaatattaatattatattattactaataataaagtttattaaaaaaatgtatatgattatttatattatgttttaaaacataaataggaacgaaactttcctttttcggtacaacgaaatcctgttttcctttaatttatttttttttttcgatttttaattcaaaacctagtaatttaagctccgctagtagtgggacagtaaattattgaagagggaaatcttgaggtaaggattggtttcgttttaagttaaaaacaattacttttttatagtcactttgtgatttagagtagttacggagattctgatttcatagaatttttctatggtagctatgggactagtttcaatgtttacttgttgaaattgaggtgattgtgacttagaaatcaagtttggaactttttaaagttaaagtctgagctttaatggcattttccgtttaagggctcaattttaatttctgctacgtaaggatttttgtatatatggtatatatgtgtcctgtaaagtttcgaacgatttggataggtttcggtaattttttgaatagtgcaaaatttgagattttcgtgtcagaaaatggtttgccatttttttgaaattctcgggagatcagaaatcgtaattttgtcataactttttacttggggtgactgttttagacattctatatactgttttgaagcttacgacaagctctacaatatggtgtatattttagagccaaaatataagtttgattttagtgtatttataccacgaaattcggtagaaaatcctagattatgaatattaagtagtgttttgggatagacacttattggtttacattgttgtgacataaggcttgggatcttcgatcgttctccaagaaggtcaacaaacatacctgaactaaaacttaaggtaaaaaaaagtataatgtaccacatggcatgataagtttcgaaattatcgattgtctgattaggcaatgacaaggtgaatgagatatacaagctcacctgattaggtgacgtgccatataggtgctaggttatggcacaagcttggctaattaggcaatgtgatatacaagctcacctgattaggtgatgtgatatatggatgacaggctatggcatgggcttgcctgtttaggcaatgtgatgtatggataccggtattcatgttgttcctgtgaggcaatcgtcataaagtcatgactctaaattgaaagtgttgttaggtttcttcttgttggcaatgtctgattaggcacgggcggtaatgacatgtgagtgccagactatggcacgggctcgtctgattaagcgatgcgatacattggtgccaggttgtggctcgggctcacataattaggtgacgcaatgacattatgtatgatgccaaattatgacacaatcttgtctgattaggcaatgcaatatatgatcatttttatatccatgcatatggtttgttaaactacccactctttaatgttattatttaatcattttataatagtgaaatgtataatttgttatttcatgtattcttctttgttacttttctttctaagtctttatgactcacgggtgctctatggtgcaggtaagggcaaggaaaagttagagcaggtatgaggtgacaatcttctccaacaatgtacatattgaccccacccgtctgtgtgccaagttgccaggagttgttttggactgtatctgttgcgtatcttattttttattttgaattattgttttatgtagtccttttgtaaaaattttatcagaaagatccctagaacatgtttttagtgtcgttatgatatccatttttagtgtttttttttagtaaagtttttaatattatcacagatttgaatgattaattaatcttttagtattaaactaatttataaaatcacacaaatggcgtccctattgattagagcgttacaacttggtatcagagaagtcatggttttaaaggtcctgaagactagtcaaatatgtacatttgctgcaaagataggttgactcacggtatagtaagtgtttatattattagctattggattacctacctagactattatagtgtatgtggggaaaagtaatatagtgatgattatgataagaatatgttaatggcatatgcatattgataacgatatctgtttaaattctaaatgattgaaagttctggatcacaagtgcattagatcatgcagcagcggtctggccgtttgaaccgcaagctggggctcggggtaggtggtgaaggagagcatcctccacctccttaaaattaggaatgaatgttttctgccatgcaagagacatttaggcaacaagaggagataatttgagacctcagagagcaacatgctcgtcctgtacctatattggcacctcaggtagtgccacctaatatgtgggatcatatggaaccaatttatgagcagtttaggaaacaaaacccgcctgtggtccagacccactgaaggcagaacagtggatgagtatgattacttctttctttgactttatgcgggttgaggataatgatcgggtacgatgtgctatttacatgttacgtgatgatgttcggatatggtgggagagtttttctcaaggtcattatctgaataccatgacttggaatgtattttgagcaatattataatgattccattcgtgccgctcaagctgaagagtttgctcagttagtttagcgtagcatgactttgactgaatatgctaccaagtttgataggcttgtcaaaattactcctgatgaagtggtgactgaagctgcaagaaaagctaaagtttatcagaggcattgaagagtatatgctagcagtgttgttatggcagcaaaataattaggggttgtgaagacctatcctcagattatgaatttagctctcactactgaggggactgaaatcttgattcgtaaaaagagtaatcagaagaaggatgtgtggaagacatcatctggtactggaatgagtaggagttttaaccctaatgataaaaataggaaaccaaaggggccaccggttttgggtctatacagaaggtttcaaggtaaccagggttttcgttgaggcagaaacgaagcttggccgtcttaccctgaatgtccaaagtgcaagaagcaccatttgggtgaatgtcggtctaaggcctgcttccaatgttgagtagtaggccattttaaaaacaactatgtgcagttacagaagctcgagaccaattaagagaaccatatggttcctgctagggtatttgctttgacccaagcagatgcggaggctggtccttcaactgttacaagtgagatatctaatagtggtattatgtttactattctgattgattctggtgccacacgttcatatatttatagtaaaaacaactgagaaattgagtaggccatgtgatatcatgtctagtggattaggtaccttgttacctactggggaagtggtaatctctaggaggtgggtaaggtctctcccagtgttagtaaaagggagaatattgtcagtggatctgattgaattagatttagaagattttaatgcaatcttgggaatggattggttgactaagtacaatactaccatagattgtaagaggaagatggtgacttttgaatcagagggtgaagctccatttgtttttacgagaaagattcaaggatctcgaattccaatgatataggcactgaggaccagggaattattgagagaaggatgtatgggatacctggctagtgtattagataccacaaaaaaatacacttgagggatcagagaaggtttgaatagtatgtgaatttccaaaagtatttccggaagagttaccaggagtaccaccaaagagagagttttggcttcaagatggaattagtatcggggatgggccagtttctaaggcctcgtataggatggcaccgacataattgaaggaattgaaagtccaattacagaacctgcttgatctgcggttcatgaggctgagtacctcttcttcgggtgcaccatatttatttgtcaagaagaaggatgggtcattatgtatgtgcattgattatcgagaatttaacaagttgacaataaagaacaaatatcatctgccaaggatagataatttgtttgatcagttacagtgaaagaccaacttttctaaaattgacctacgatctggttatcaccagttgaggattcaggaagagaatattctcgaaacggctcttcataattgatatgagcactacgagtttctagtaatgtcctttggcttgactaatgcactagcaacattcaaggacttaatgaatcgagtgtttaaggactttcttgataactttgtagttctagtttattctgaatccgaagaagctcatgagcaacacctccgtatggtattacagcgtctccgagaacacaagctttatgcaaaatttaagaagtgtgagttctagctatcccaagtgagtttcttatgacacgtggtaaccaaggatgggatactagtagattcgacaaagattgaagctgttcaggattggccacgacctaagacagtaactgaagttagaagtatcttagatttggctgggtactataagagatttgtggaaggtttttctaatattgctactactttgactgagctaacccaaaaaaaattgtaagtttgtgtgaattgacaaatctgaacctgccaatcagtgatgagatgtttgtgatatattgtgatgccttaagacaaggcttggattgtgtgttaatgcaatcagggaaggtcattgcctctgcctctggatagttaaaagattttgaacaacgttaccctgctcatgatctataattggtagcagtggtttttgccctaaaagtttggggtcactacttatatggtgaaaagtgtgagatttatactgatcacaaaagtttgaagtactttttcactcaaaaagatctaaatatgagacaacgacgatggttagagttagtcaaggattacgattacaaaatcctctacatcccagtaaagcaaacgtagtgcataatacgcttagtcggaaggtccaagggaaatctatgaattgaaggaaatctcttcaagattggctaaggatatgaccatggccgagattgagttcgtagtcaggaagtttgcaaatattatattgcagtctaatttactagaaaggataaagattggccaatagaatgatcccgaattgtttgaacttagaaagaaagttaagattggtgctacagaggatttcactgtgactccaagtggactattgaggtataaggatagagtgtgtaatttgataaatgacctaatcaagaatgaaatcattgattagtttcatactaccccgtattctctacacccaagaacaacgaagatgtatcatgatgttaaggcattatattggtggtcgaaaatgaagagtgatattgttgaatacgtttcaaagtgtttaac

SEQ ID NO: 296023 - DNA, 974 bp, Cannabis indica
gaaatgagttttatttagggcgcaaaatccaacatgagcatggagcgcatagagcctccaacattagcttgaaaggtttgaaaggatggccttttaactctagaggcacaagcaagacccttgcccttaacttgagggtcatgccgagggacatccatcctagagggtcggttatcagcattgctctgattcaaagctagatagggtagagcttctgcaagagagtgggcagcatacagcagtttaggattagttaaagttggactgtcactaacaataacgaaatcagtggaaatcgaggccaggtgcgaggagtgagacaaagaataatatctattgcaagtagtgccaaaagacacgcactccatggaatggttaaggttaacaagaaatggatgccatattttaatgaaccaaaggggtaaaacaaatggattaagtcatgaagggattcatcatttaaccccttgagagaaataaaaaaggtccacatcagctatggtaatggttgggggatggggatactggaaagggagaggcttctcagaggccttctctttgccacgaaggacaatatcataagggcaagcaggtgggataagttattcatcacatttctgaaggtaggcatggtaatatttcttgttgtgatctagtttgccacaataaaagcagaaatcaaagagcctttcatacttaaagtctaaccatttattaaattctctccccattttaagaaaatgaatgtggatgcctctcctgattagtttgttaacatcaataaaaaaccgaaccctcaaataaggcccagttccttccctgacagtggtgctatccacttaaatcggttctcccacacccgtgtaataagtttagccaattcataggattaaaaataaagattttatttttatttttgtgattaaaaaattaaaaataaaaatatttttgtatagggaaaaaacaaaaaaata

SEQ ID NO: 296024 - DNA, 4434 bp, Cannabis indica
ttttgttttgttttcttaacattgttttggtaaattgcttaattacaattgcagctaataagtgcagtctagagattgattacaagcaatttatctatatccatcccaatattgccatctggctggctgatgcccctcaatctgtcctggaagtcatggaggatgttgcaaaaaatgttgtctttagtttacatcctaactataaaaatatccatcaaaagatttacgtacggatcaccaacctaccagtgtatgatcagattcggaacataaggtgctgcataataattcatattttatcccactcagtttatcttagttttctatttgttattaacatttcattcttttttcttttgagttgtgcagacagattcatttgaatacaatgatccgtattgggggagttgtgacccgtcgatctggggtctttccccaattgcaacaggtcaagtatgattgcaacaagtgtggtactattttggggccattctttcagaattcatattctgaggtgaaggttggttcttgtcctgaatgccaatcaaaagggccattcaccatcaatattgagcaggtgagtacattagtttttcctttacatatgattgttgtgaacatttcatatatgggtgtaaagcctgtaatgaataaattagagggaaaaaaccaacatttcaattatcagctatgaatattatacattagcaaaacctgcagattgtttattgttttttttaatgtatgcctgcataccttgatgcagactatatatagaaattaccaaaagcttactcttcaagaaagcccaggaatcgtaccagcaggccgtcttcctagatacaaagaagttatactgctgaacgatttaattgattgtgctcgccctggagaagagattgtataattcttgccatgaacttgcttattttaatgtttttatggtccacgtcagtatttctgatacttctgttctgtttggtgtacttcaggaagttacgggcatttatacaaataatttcgatttgtctttgaacacaaagaatggattcccagtatttgctaccgtggtggaagccaactatgtgacaaagaaacaagacctcttttctgcctataaacttacccaagaagacaagaaagagatcgagaagctggctaaagaccccagaataggagaaagggtatgtttttgaaaaattttagtcttactatttcccttcacattattgttcaatattatccattatgaatttttttattaactaaagatcatttaataaaaatgaagattgttaagtcgattgccccatcaatctatggacatgaggacataaaaactgcgttagccctggctatgtttgggggtcaagagaagaatgtagaagggaagcacagactacgaggagatattaatgtacttctcctaggtgaccctggaacagccaaatcacaatttctcaagtaagaactggggccgaacatttttgtattttatggtgaagataagtaataaccaaggatatcttcttttcctttttgtttttcttaaggtatgtggaaaagactggacagagggctgtgtatactactggtaagggagcttctgcagtggggcttacagcagcagtgcacaaggacccagtcacaagggagtggactcttgagggaggggcccttgttcttgctgacagaggattatgtcttattgatgagtttgacaagatgaatgatcaggacaggtaaggaaatttactgattttgaaatttgtctgtcttgataattcacccccatgggccaaccaggaaagaggtttgaacaattttttctttctttcagggtgagtattcacgaagctatggagcagcagagcattagtatttccaaggctgggattgtcacttcactccaagcacgctgctctgtcattgctgctgccaatcctgttggaggaaggtatgcaaaagaaaataatttagcagttgggagatacattggaactgcttactaattttactattcatgataggccatgcatgaacagtgaatttactgatgtagttaatatgcttatttgttagcagaaagttgtattttcagctcaaactaaccatttgaactatgctacttttacaagccatctatcctcgtttgcattagtgctttcacacgtttttttaagactgacattttctttgtctatattccagatatgattcctcaaaaacattttcacaaaatgttgaattgacagatcccatcatctctaggtttgatatcctctgtgttgtcaaggtatttgtgcaaactctcttcttaattcattcatactcaatcagttcacatgtttacatggaaggaaattgatgcaatgcaggatgttgttgatccaatcgctgatgaaatgctggctaagtttgtagttgacagtcatttcaaatcacaagccaagggagctcatatcgaagataagactttcagtgaatcacaagatgatgtccaaatgtcaggcgaaccagcagacccagaggtttataaaatgctccacctgtccagctaattacttattttcttttcgcttcaaagccttctcatgtgcttctgaatttaattgtgatcttacactttacagatactttctcaagacatgcttaaaaagtacataacttatgccaagttgaatgtgttcccgaggttgcatgatgctgatatggagaaacttactcatgtttatgctgaattgcggagagaatcctcagtgagtttctatgccttttctgttttgcttggaaattttagttgatggtttagctagtactttgattatttatttgtatctgtttttctcactactttttttttttaattctagaatggacaaggagtgccaatagcagtgaggcacattgagtcaatgattcggatgtctgaagcacacgcaagaatgcacctgagacagcatgtgactgaagaagatgtggacatgtcaattcgtgttctgcttgattcatttatctcaacccaaaaattcggtgtgcagaaggctctacgaaaggtttggaaattgtccacacttaccttatagaaaactgaacgccggcgcctatatgattccaaatgagtttccaattttattttatttttagaagagaactgaatgctgtttattagaattctttactcttagataaggcctcctctgccaagaatcacctgttctttatgagtttttttattctaatgggaggaccacatacttatctattgcagagcttcagaaagtatatgactttcaagaaggatttcaatgagttcctcctgtatcttctccgcgagcttgtgaagaatgcgctgcattttgaagaaatcgtgtctggaactacttcaggactgacccaaattgatgtgaaagtagaggatttgcaaatcaaggtaaatttaatcccaatgtcaaaacaattgaacctttatatcttagcctataagtattaagtaccatatgactaaatgtaaacccttttcttgttacaggcacaagaacatgagatctatgatctaaaaccattctttactagcacacacttttctcgagctaattttgttttggatgaacaacgtggagtaataacacatcgtctatgagaagatgcttcattcaatttgaaccatgggacaaacatacccaactcttatttcgtcactttttatttttttgtctgttaacttgctcaatgttcttataaatcattatttactagagaaaattactatatatttatttattgttattgtcattggcaatctatttgcaaatgtaacaccatgtttttttttttagtacgactaagtatttccatagtacccatgttagatgggcatcgttagctgctatgcttattgttattgtagtatctgataatattggttgaaacttaggcagttgatttcttaaagtgttaataactgcaagtttaaatctaagaggagttctaaaaaaaattctgtagtgcattttctatgatcaatctagctcatgacagttcaatcagattgttttattaggaacaagttttcatcattacattcctttataatgtaatttgtctttatgtaattggaagaactaatacagtaatttaggaaagcttactacgagttagataatgaatagaaataggttgggaattattcatatctcctaatcaattttcttttacttgatgtatgtattttaacaaaatacattataataatacgggtaaatatcattttgaattctgtgttttgtaaaaattaccaattggatcttgtgttttgttaaatagtaaaatgaaccttgtattttttaaaatagtacaaataggacctttgaatttatttttaaagtttaattataatccgatctaaaaatgcttacattttttgtatctgtt

SEQ ID NO: 296025 - DNA, 2070 bp, Cannabis indica
ttttaaaaaattataaataatttcagtatcgaagttaaaattcgaataataacttagcatgtgtataaaaaaaacaatctacgtgtagtaaaatatttaaattaactttatttttaaaacgtgtactatagacttaaggtttttctattttctaatcgagtagtgatgttcacattgatatattttagggttattatatattaggattattggctgctggccatagaggagagaacaaagtgcatttatggataaaatcaaaatttataataataataataatactaataattattttgtaaaataaattagtgatgtcatggtgatttctaaatcacgcaattttggtcttatctttagttttaattaagtactatatttggatttttgcaaagttaattatgacaagatatttatttcttaaagggtatgatcttaatttcattcaattggaataagtacaatgtttataacactacaattcaattcatgaataaatcaaaactaataaatcatttttcagaaataatcaacaacaattaagatcaaagatcactgatatagaaagatacatcgccattaataatagtcaaaaaaaataaatatactgcgaaactatttggccaaatcctttcaacgccccgaaaccaaaaaaaagccatatgcaatctctaaatagaatcatttcccttacgcccaaagtaaaaaagagattttatctcaaaactaattttcattaggtcatttatatattttaaaaaactaataaattattgttaaaagaaaaaagttaagaaattgacatttttagattgatgtctcttagacacagacaaacaaactttataatagaaaaaaaatttgtcatatgaaaattgaaaattaattgggtgaaacgaaaacttcaatggttcttatgtctcacaacaaaagcgactcttaatgtgaataaggttaaccatcaatttctcctaccttaattttagttctaataataatcatatatatatatatatgtatatatatcacaactcatcaaacttaaggaatatttattaatttttagttaattactccctaattttaattttcttcctgaaaagtttgaaccatgtacaatattttacacttcttgttaagccatgaaaaatgtgccacattaacaaaaaacacacacaattcccattattttcatgaaaataagcaaatagcaccatcaaaaattaattaaaaataattatatattatgtatataataaatagagatgttaaataatgtctcacgtacacgttgactcgtccatattattacaaagataatatatatgttactttttttccaagtattatatgtatgtttctatataagaggtaaaagaaagaaggttagagaactgaatagaattatattgtgtaaaagttacattagttaaattaaatatgttatgtcactttaaagtttagagccatgcattatatattattagcaatgtatgtatcatatattattatataatatgttttttaagagtatattagctagcaacaacaagttaaattgatgaacttgtataaaagtaaacatctatttttattcttaattattttgtattacatttctagtacttactagaaacaagaaagcaaaaacataaatgataaatgataaagaaacaatgatcttatttattttaaagaaaataataaaagatgataatattatgaaacaatatataaaaggcttttattgtaaataaacattgacaaaaataaattagtatttttatcttgatgagataaattaacatattatacaataatgcaatattattttttttgaaaggaataatgcaatattataatttacattattattatatttttaatgttgccgaagctcaactatgtgaccggcgtgagatcaggtcaaatcaagggtctccttttgcttagtttttataattacctatcttttttttttttttgaaggatataattacctatcttttagtttctaattaagattaaaaaaaaaaaaggagaatcatgcattttcgaagtggattaatt

SEQ ID NO: 296026 - DNA, 3802 bp, Cannabis indica
tctctctctctctctctcagcattagggtatactcagtcgtccaaccttctctcatcaacctcaatcgtcgcccctcctctactttcctttcatggtagattaatgggtaagtattttttaaaatattttgttaaacaattgtaaaatatattatattgttgttagatctatgtggttgttatttcttttttatataaattttgctgaaattgcgagatctcattgttaaaggtttttttgtgtattcgtatttttctcaatgagttcttgataagttatcgatggattctcgacactactagtcagggaagacctttctcgacaagttgtcaatacgttctcgaaagaatctcgacactaatgtctcaatgttaggaaaaatctttctcgatgggtcgtcaataggttctcaattatttgtcgaaaggaggaaaaaccaaaaaccctgaaaaatttaggaataaaatgtattaccaatccataatttccattaaaaagtaaatacccagttcacataattgaaaaaaaaaaaatataagtgaatgaggaagagggagtggagtaagtgacttgaaagagattattaagtcgaccaagcggagtcgtatagatcttacttagtgctcccactgccctcaacgagagtctgaaatagggaatcgatctacgatagttaaaacgactgcagaagcggcgacgttgactgtggcaccaccacgctcccatggacagtaacatggatattctctgttaagggaagatgagataaaggatgaccggggttatggaagaccgatgctttcaatacaagtctatatttcaatttagattttagatatgtttttgttgattaaaaaaaaatggtaattgaattaaattaattggcaattaaaataatgttgactatattaaaaaaattatgtcaattaaacctttaagtaaaatcatttagaattaaattattattaattttaatttaaagcataaaatatatacacatattattactcaaatatgtcatatattattactcaaataataattttagaaaataagtataaaatgaagttgacaataacttgtttcacttggaaaaaatatatgttagtaagatttttattttaagatcacatatgtcacaataaatagtaaaagtagttctatcaaaaaataaaaagtattattatttttttttttgtctaaaagttcaaatttcattaagctaaaacaagaagtttagtgagcacatggggactcacctcccaaaaactgaagtaaaccattacaagtgtgaaacaaaccccatctagcaagagcataggcaacctcatttgaccttcttgaaatccaattaacagaaaatctactactatccaaatcgcaaagcagattagtaaaggagaaatggagattccagtgcggccgctgactctccactagagcttgcaccaactgcaaaatatcggagtaaaaatcaacatccgcagcaacaacatcccatgccaaacaaaacccaaatttcagagcctccaattcaccatgtagaacatagtacacctgaactttcaccgccctgaagcacttgataagcccatcttcatcaaagataacaaccatcaccgtactgtcgtcgttcgctgaagcataatccacaaagcattttacacggcctggtctaggaagaccccaacgaacaacctctgtaccacgactcttctcactgttcacattaccaagtcttagcaaaggataatgttcttggaaacacttgttcacagcatcacgttgcatagccatcaccaacgaaactttgttatggaaaatatcattcctaacaatccacaatttatagtacaaaattacaccataaagaaaaaaactcatctttttcattccgcatcaaatgttgcatgaaagggagattaagaagccaagagacaacatctctcccagtgccaagattaaaattattaatgcgggatattttatttgctagaaaaccaaaagtacctggggatattacaattggcaatgaaatggcacacttcatcaccagcacaatcaccgcacagatatgatgcgttgttagtggctaacagtttcctatataatttattaaattaaaatgtgtgagactcgatattgaattgcactaattgcggtatattattttttatggtgtttgacaccttaaaaacaaataaataaattgctcttaaaaacaaataaccaagtaaaaatacaatttgttttattaattgatcatatacaataaaaaaaaattatattgagtcggttactaattttgctaaattttttactttactttttttatggaaatatacaactataggatataaaagaaaatccccatcaataatagttcaaaaactattaaagtttaccaaaaaaaaaaaactattgaagtttcacatccatgaagttttacataattgccttaataaaatcccattttattaaaaaaaaaaaaacaaagaaaaacaaaacaacaaaacaaaaaaaaaaaaagcaatgcgaagatgaatcatgtgaagtagtccatgtggcgaaaaaacccaaactccacatggcgctgaactgaagatttcctcatcacctcattcaccctctctctcgcgcgcgcgcgcgcgcgcgcgcacatatgccaatgccgcttttcttcttcatccacaaaactcatagctcataacccttctcttcttcttcttcttcttcttcttctactacaatactacactactgcatctaccccttctcttcccttgcctttcccatgctcagaacggtacacactttccgctcctttctctttcgccaaacaacctcttcactttcattattcccctcctcttctcctccatccatttacgctctcaaggtcttagctatggcccaacatagctcctcttctagttcttctcaccaccatactaatcgccttgcccaagaacacagtccctatcttcttcaacatgcccataatcccgtatgtcccacaaattggaaatgaaacaaataagtttttgcggttattcatcagataattaatttttatttttattttgtcaattaggttgattggtatccgtggggtgaagaagcttttgccgaagctcgaaagagggacgtccccattttcttgtcaagtaaatacaattcttttataatactttcttgtttttgggttttgtttagtctattctgatgattttttgcttattggttctgctacggaaactgtgttgtgtacacatttgaagttggatatagcacctgccattggtgagtttttatacgtaagtgttgtggaagttgattatacaaaaccttcatttaaccattagaaaatggagaatgaactgaataaatcaagtgtcactactcactggagtaaaatttattcacaaggtgtcatgttatggaggtggagtcctttgaggatgagggggttgctaaattgctcaatgattggttcattagtatcaaggtcagtcagtaatgggttttataatctctatgctttgatgtttctaataatctctttttcaatagtagagtctgtaaagattgtatcttaattttaatttatataagtgcaaacaggtggatcgtgaagaaagaccagatgtagacaaggtacatgatatttatagtagtagaccagttgtattgattaggcatactagaaaatactacgcatttagggttcgtttggtacgccgtattacactgtattgtatagtattatattgaattgtattttatgcaatatttttatgt

SEQ ID NO: 296027 - DNA, 894 bp, Cannabis indica
aataattttatgtaattttacaatatatataccaaaaaaataatcaaattttttgactaaaaaaataaataaaaagactttattatttatttatttggttaaaaaaaaagaatataacttttgtttgtgtaaaattatataaacagaattaataaaaaaatcactttaaattttgaaagataactaaaaatttgatgagtagttataaataaataagataatagtatcttaaaactttaacttgggttgctttaagtttaataagatggagtagttttcaaaataagatatataatttggcaattaattaagagtattgttattgggcatctgtagtgcttaatcattttcataggtgacgttctacgattaattaacgatattttataaaattattttcttaaattatatgaaactcaatacttaattattacatcactgaaaaaaatactaagtaccaataataccttttaacaatttttttaattaaatataatttcaaagagaaaaaaaaaaggtaagagttttgtaagattattaataatttacgtcaaagtcaagtcattaagaaaatactttataatagaaatatatattgaaatcattagttgtgtggtgaaaaccttgtgtgaagatatgtttattcttagacactaggccgaacatattaactgacatataatacttgaaaaatctttatttgatgaagcttttctaaagtttcttaagtgtccaagtgatggaggaaattttaggacaaaggtccttaacaagaccgaccacataggctaagacaggctagattcatgtttagggccaacccaacaaaggggtccaaattaaaaaaaaaaaaagtcattttgaaaatttatatatttttagtgtatttttttt

SEQ ID NO: 296028 - DNA, 2510 bp, Cannabis indica
aaaataataaaaaagtccccataaaattaaataaatctagcaagagtaattataatgtatgtataaatattttttaatgataaataagcccctacaaaataaaaattctgggttcgtcactagtattatcttaagttagataagatttaatacttaactacgatcatcaacaatattgtttaaaagttattatcttaagttagataatatctaatagttaattacatcaataactatataataccgataaggatttagtatatatatactggtgagacggcgtcgttttagtgaatgtaaaaccccataaaccccataaaccccttcactctcaatctccttctcattctgccttgcatggttttgattttgagttcttggcaaacccaacaaaacttcacatttccaatctcagattctcccaaaccattcagacccatctcgtgattctcagaatttgggttatttctcaactatggtttccacagattcattacaagtttcacttttgagataaacttctattctcttatgtgctctgctctcaggttcaacagctatgtacaccatgtgtttgagaaaatgtctgtaagaaaatttggctgcttttcaatctagcgtttctgggttttgtttgctgagttgaactttctttaatttcttgaatttttgtgtctatatcgtctcagtgagaaaatgctaacccgtgttacttctcgtttattgtactcttcacatttcactatgaaacatattggctttaacccaactaggaaagttctctgctttttctcttctcaatcttcatcttccttaaccacaaactcagactcaagtttggctctggttgattttcttgtaagtacttgcaaactcaccaaagtacaagctcactccatatctgaatgcttcccatcagttaagtccactgataagccacaatcagttcataaactttttctggagtatggcttgtctgacacccatataaggtctactattattggttgtccccaaacattgtttgctgatgctgataagacactcagaggaaagcttgaggctttgattgagttgggaatggatggtgatgatttgggcaagtttcttctaagaacccaacagtgttagctcgtagtttggagataagttgaagcctagtattgaacttcttaaggatattttgggagacgatgctaacagcaaagattttatgcgtatccttagatgtagatggattttgtgggcagaccataataggttgttggctaataggacctttctaaagagttgtggacttgttggtgctcagcttgcttttgtttttaagatggagcctcgtatttgtcttatgcaagaatctgaacttagagatcttgtttccagggtgttagatatgggagttccgctagcttcgaacatgttccctcatgccctccacgcgattggcggtttgagaaaagagacagttactgaaaagttggacttgcttgtaagtcttggcttttccaaggatgaatctttgcagttgtttagaagagcacctcttgttttaagaacatcagaggaaaaattgaggtttggagtcgatttctatttgaatacagctaagtttaataggtcagtgttgattcgatcgccatggttgttgatgtctagtatggagaaacgagtgattcctcggtacaaggttttacaagttttgaagctgaagaggctgtttgtgaaggagcctagtttttacactatgctgcagaaaacagagggccagttcttgctgagctttatatcaaagtttcgaaattatgctgatgaacttttggcagtttacgagggttataagtcaggctccattggtagtttaaaagaagaagaagaagaaaaatctacaatggctctgatttagctgatactcaaatctgtagaatggtatgagaacttattctttccattcctttcatcaacagaattgaactgagttggcttgtcaaaatctctgttataggtttttgactgaagagaacaagaagagaacactcacaaacctcatctcagtaagattttttccccttgtattgatttcttcataattagttgataggtagagtggtaaaaacaaattatgaggaaatttggggaaaaaagtctgtcttatatttttattgtttcattctattttgtttttccatgttatatgtttctagagtgatgtgcttatatggtagaaaattcttatttaatgatccaagtctcaattgctttttgtgaatttacttaaatttgttttgacagttaaaaataaagatagttcgaaaatgaataaaaagacattgtttatgaatatcattgaactaaaaacttaactacccttgaaagtttacttgataatattcttaagtctttcctaagagagaaaaaccatgttcttcattttctttttgaaaaaagagaaagagaccacttgtcttagactggcctccccctgatatatattgcaagcctcacttaag

SEQ ID NO: 296029 - DNA, 2566 bp, Cannabis indica
ataacactacggtcaatcaatttgactaaacatgacccttaagctagacaatgagttatgctggttgaagaggttccaacattgattattgaagtcttctacaggaatgtcctaatgtgattcagatactacgttttttttaaaaaaagctttaaagtagtaggttttttttttaaaaaaaaacaaccttttattaatgagaaaaaaaaactcaaaacccaaagtgtagagtggcgacaaagggcatcacttcccaacaaaaaggacttaaaacacgagctgaaagtagcccaagctgccaagtcatgagcaatgtcattggatcctcttgaaatcctatagaagtgagcattagagagaccagaaaaaataagaagtatgtcatcaaagactccactagacttccaaattggagctttccttccaatcaatccatgcattgccattttgcaatccgaaaagaaggtgatacttgaccagcttcgctgcaaaaccagacgacaagcatgttgtatagctaccaactttgccgcaaaggcaaaatccaccaaacacttagccgtgagggcctccatcacttcccccaacttgtaaaaaacaatcaccgtaatgatcccaaaaaaacctctaaccgttacatcaacaaagatattatggtgactccacggatggttacgagtatcaaagttggcaatagacataagcctcacctcctacacctcagcaagaaaaagagagaatacctttatgaaaggctataaatcagccaaaatcaaattaatgtttaagtttattacactttggtacaagctagcttatatttaaaataagattttaataaatatataaatatttattattttattaataaatatttaaattaaaattaaaaatatttataaacttaaccaatttcaaagttacacgtgttggtccaatcaactacttcgcggatctaatagagaaaaagtaacaagattactgtttttttttttaaatttgaatcatttttttcgcaaaaaataagtttgtattgttagaaacaccaaattgttagcaaagcccaagaacagggcccaataccaattgacccaaagctaatggaccaaaagataagagaatgggcagatcattgtgtcaaaaaccaggaggtggagctttcggcttcaactgtcaacgaaggggaagaagctgctgaaggtgagcatgagcttctagcacgtgggagaaggagtggagtgagatccaaatggctaagagagtttgtgatggctgaaaggagtttagaagctagctggatgaaccacttttacttttccatttgagatgtaatttccttttctttgctttgtttagagacatataaatagtggttgaaccttttttagttttgaattgtggaatgaatttgcaatagtttgcatttgaagatttgtcctgtcccgaagagaatcttattgctattacaaatattaagtatttatgacatatctatataaaataaagtaataacacacgtgtaaaagtgcttgaattgttaatgtgaagtaatattttttttctctctttaaatgttgcatatgtggcgttactttatgagctattcatggttaataatattgcttaataaattgtagagcattgctattatatattttaaagtgtttaacactataacaatataacgtgttgtgagtagttaacgattttttatattatttattaaattaaaatatgtgaaactttttatgcccctttacatttcaaaaaaaaaaaagaacaaatcaacatatcaccaaagagaaggaaacaagaacaaatcataagagaaagagttaaaagtaagaaggaaagctatacaaaagaatattttagtaatgcataaaaacgaccataatgtattaaaacgacagttacacatacaaaaaagataattagatacactcctacacaagtaactgtaaattaaaatcatatagacgaatgaggttcgtgaaactaagtaagaaaggggtgtaaacgtaattttaaccttttctcctctcaactcaattcctccctgtaatcgaatcagaaccgtcgatgataatcgaacggtctcaaattttcagagattaaatcccgaggaaccatggccaaaacatacaagtgaactaagcttcttttctctctcctttatccatattcacagaataagaagaagcagagagcttcatccaccgtcactccaaaaaaaaaaattgttgattgggtttcgcggctgcggccataatcgtactagtagagctcaaatggggttttgcgcaaatgcaattgctcccactagcagtaatggcggaatatggagcatggcgtctctgaagtcatccttgccttccatttctccatcttcttcgtcttcttcgcttcgccttccggtggcttctgctgctttcccgtctttttctccatctgggtttaggccgtcgtctcgccccaaacccaaagtggttcttcgctctttttctggtctcgctcctcttcacaccgacctcttcaacattgcttcttcaggtaacttgtttaa

SEQ ID NO: 296030 - DNA, 5012 bp, Cannabis indica
ttatattttgtagtcgttgtgcacctggatattgttttggcatgttttgtataaaagattagaaacgggatcccggtgtatgtaaatgattatgtaaattataaagtttaatatttagtataaaagttttaatttgatacgtttatcgagaaaattctttgattggcaaagatagcactgtaattgaaaaagcactgtattgtgccttagcattagggcgttacaattttgccgccgggtttgtctactaaagcttgccaagacatgtacaatcttcatcagagaaagctcggctcacggttcagtaagcccgtacttgtttagtatttattatatatatatatttatttatttttgatatgttcttgcattattttttgcctaaaatagaaaaggtagttattgttttagtaatacccttatctgaattacttcccaaaaatgtctgaaatcctaggatattttcttttccgtagaaagaatgttcatccctagttcaaaattttgggattcagtgattctagagtagaaaaacccaaaactacatgccttacccttcaaaccgcgactagaacatctaaaaaaatattaaaaataaatgacgagagaattaggttgttcaatgagaaacttgacggagaagaaacctcttctcactttaaacgttttatagacgaggtattgattggaagcgtcgccttttgttagacgggcttggccaaagtctcctagcttaacaaagtatcctttggcaagacctttatttttactcgaggttaccattgctttttccccaggtaaacgaaactttgacatcacgtcttcaaaagagcgcaagtccaaactaccccagaaccccactgtaacagcctactagattaggcgtgttgtcgttatttaaatactaattatgcaatccattgctaatcaacgagctcattgaaaatcatgtttagttataaaattttcataattaaactttgaactttatataaataaactttacatatctaggatcccgtctttaaaagttacaactgtattacaaaacatttaacaaaatctcaatacactatttgcttcttcctcactctcaaagcactacaaactcacactcactttttttttacaactcactcttcttctcacacacacactcacacaccttgctcaaacacaaaacacatatttatagagtccctaaacatggacacacaatctaaaacttggtcaccaaggctctttaaagttggccaccaagactcattttctcacaaccaatttttaccaaaaaataaattacaacttaacaaatataaataaataaattaaaagttttagtcgaactacaccaatctctttttttactaaaatttcttaaattcataactcaaaccatttataaaagtatatatgcattgagttcatactctcgttgaacttaacttgagtacttgtcttcacattctttgatctttcactaacaccttctttgttcaaacaacctttaactaaaattagatccttctttaccttgtcgcattccttcacattaactgaatgtcttttgtgacttgactccaccttcacaactcaacataaaatagtattcccaactaatttatacaaatttcattctttcttacccttcacaactaccaagccacctttcttgatagttatttcatcatcttttgccaaatatccataaccacgagtattgaaaactcccaaagagattaagctcttaatgttagaatatgtctcatatgagtcagcattctcacaacaccatcaaacatctttaccttaacaattcctataccaataacttttgagctagaatcattgccaatcaaaatagtacaaccatcatattctttataagaatcaaagcactccctatacgggcacgtgtggaatgaacaaccaaaattcaaaatctaagagtcaaaaaaattttcatcacagagagaacatcagagtaaatttcaaaaccttcaccaataacattagtggaatctaatgtgtctttgcattcttgattcctcattgcttcaagattcttggtcaactctttataattctgcctaacatgtccctttgtgtgacaatagtagcactccacttcccttcaagagtgtgaatgactgcgattgtctttgctgtcatcatatatcttcctctcaatgtactcctaccactacttgattctgaccttgtcacaagagcttaatcagtatgagacatacttctttgatgcttgatactatctgtctccaaaagagcagttgacaccttatccacagttgaagtagtttttccaaccaaaagtgtagtttactaatgtctcatataattttggtaaagaagccaacataataatagcttatcttcttcatcatttttgacctccacactaaataattgagttatgcacttgttaaatttatttatatgatccctaacatgatctccttcaaacattttcaactcatataattacttcttcaaatataatttatttgttagggattttgacatataaagtttttctaacattttccataactcggacagacatgtttcattaaatacactatactttatttcaggagccaaacttaagcgaatagtgcttactgcttttacctgcagcttcttccgaacttcatcaatcatactctcacgcttcgttccctagagtgcgttaaggatcccttattgtactaacacatctttcaccatgctctaccataaactaaaattgttcttcctatctaaaagctcgatttcaaattttgtgaaagacgtcatctttgatatttttagtgtagatctgaaccttggctcttaacaccacttgttggaaggaaattaattaataagtgaagaaaagaaatttaactcataaagttaccaaacccaccaagagaaatatatttcacttataactcaaaattatacactcactatatcattctctgtacccaaatctcaatacatcctttgcttcttccttactctcacaacactacaaactcacactcactttttttaacaactcactcttcctctcaaacacaaaacacatatttatagagtcctaaaacttggtcaccatgcctctttaaacatggccatgaaaacacattttctcacaactaataattacctaaaaataaattgcaacttaacaaatatggataaataaattaatctaaatcaaaatctaataaatagttcaactaagatcaatgaggatgcttggtttggccaaaatatggttgctagagatcacttgggttagcttagtagtaaagcttgaaactattctaaagatgacagagttaatgctatcagagtgaaggatagaggctcttatttggataaaaaaatacctaacattaatgtgtacttatttaactttttaatttaatttttatttatacttattatttataatttatacttaattttattatattaataataaaataatataacatatgtaaaaaaaaattatgttaaaatacaaaattgtaaagcagaaaaaaatcatagaaagaacttatagcatcgattatttcataataaccgactctatagggccttatggtgtctgttattacacaataactgacggcataagggccctatgacgtcggttattacacaataatcgacgtcatagggtctttatgtcgtcggttgtttttacccttacaacgtcgcttggaacagtatcagtaacaaatttcgtgaaaaccgatgttaaaagtctttaaaaatcacctctaaaattcaattttgtagtaataatttgactaataattgaaaatgatatttactaaaagtaataaaagaaaaaaaaaaataagtaaatttcagaccacgattgataacctacacagctgttgatggtgtagtttattttctaataataaatagatattagcttattttctttgatgaataagaatatagagatattgacacggaggtggaggtagtaacatcaacccaaataatatctaaaagcctttaagctagctacataactttcaactttcaagtcgaaaatactaataacgtatatcctcccaagtcatctacatgctaaaatcacgtttagatataattaccaattaattattaatattattaatatagtaagcatactatattatatgaaatatatatataggggatacattgaaaacaaaaactacttaaacggataaagcagtggtcccatctaggatcgtacaccacaatctgatctctgtgttcttcgaaaaaagtctttgcgtgaaagcaaagaagtaaaagatataggattattttttcaccatataataaagaaagaaagaaaaaaataaatatataaatgtataaagaatgaaagaaaaagtgctatatattttcttggtacaaatgagtcaatgaatgtacgcccaatcacaaattgtaaacagttctccctattaagcccactttggttatcgttctattttgcttgtttttttatagtcaccaaattattcttgtttatacaacttggtttaattggtatcattatttcattctcgagtttttccacataattgtctgaagaaagagtattagagaaaagggtcagctcagcatatcccgacacgcaccaaataaaaaaagaaaaggaaaaagagagaaagttataaatcaatatacctactaataattaataatatagaagagagattgagatatgggatgggatgatgggtgatgagaatagagaataagtacaaaagactagaatccaggaaatatgtgagtgaatatgcattggacgtgtatggggaaacatgccctctcatgtgatatgatcccttctcttatcaaatcaacttcattaggccacaccacacaacttgtttttctctgttctcattatgtgaaccataataataataataataataataataataataataataacttaatatattaatttttaaattttt

SEQ ID NO: 296031 - DNA, 5417 bp, Cannabis indica
caagggctttcagttctttttttacgaaactaaagtgccagatcccagagaattgttccagctaattcttatgaattttagacagcaaatacctgcctccacacttcttcatttggtgcattcttggccgcaagcataattgaatatggtttttttctgcgctcatcagcaaccttctgccaatactttcctagagaaacagatacaaagacattagattgatttaacaaaaaaataataaaaaaagaaaaagtcagatgtactaagcatcatgtcattaggaaaactaatttatacaaagaccagtcataaatttacaatttccaatattcagattaattcattctcaaatatgtgttatatcatcaaagatttagacctgatcataaatcttccaacttccgtatcataaatgtaattatcaaagattccatatcaaaaaatgatttgacgactagcacagttgttcgacattcagatgggaaaaaaatactaaaaacaaaaacacctttgattagatcacccatcagactttgaataggtcgatcgtcaccaagtccccctggagcatttagtaattccttgcaaagtgctgatttagcacaaccgggtatacctaaaagatggccattgaaagagaaatcaaaatcaaatgagtgaaagctgtgttaacttaagagttatgcgactgcgaaaaacaaaaagtactcagtagctgcattgaagatatatttatgcaaaataatttcaaataaaatgagaaaacagatgaaatgtacttcacaagaaattattaaaattccaagttggtaaaaaattaagaaaaagaagacctacatgacaaaggatatatgtatggaaatatcactcaaaaatccatcaaatgggcacaacgtcggtaattttttttaaactacttattcacaagtgcatgtttttaatcttttgattcaatatttaaaagtgatgtaataagataaagaaaatgttaacagagcagcaatccaaacataaaatattggcatagctggatgcattttaatggatttacatctcacttttgtattgtatatggtgcatgtaagcttcacttaagagtacatcataaaattacttatttatctacagcaggtatgcaacaaataaatgacttacctggaaagaacacaattaaaccttcatctcttggcactgagtccttaatagaaggactaggacttgatggcgttacctctcgctcaatctccagatcaccttcttcatccctgcctctctcgacgatggctaagaaatcttcagttcttaccaagttacccgcagatcctatcagagcctgattatgaggacttcgctttgcatattcttcaagaaaaggctcaacctcgctaagatatattgatgatgacagctgtttgtttccacacttccttcttatataaacagccctgaaaataaaatgcatagtttaatcattggaaatagtaaacacaatgcacaatattaagaatagttttaagttggtttctcttttataattttggcctttgtaaactgtgaagtgttttgcgagtctagctttcggcacactgccttgctgattttcttcatttatcagtttttgaagtaacaaaatagtcctcttatttcatcaaaattaaagaaatcactgaataaaatcgcaacagaaaccacagtatagcaaactaaacaataccaaaaaagaaaaatgttaccattcatcaagcaatttactcagttccctctgctttcctgctgaagtgccccatattttcatttgcctatagcacaaaaacaaacatcaaactgcttactaaagcaatcctcaattggtttggtaatattatccttacatatcgaggatgagatgggatggtaagagtgctattatacttgataaaaattttatttacatgaacatcaccatcaaaattttagctcaaatagatgtatcgtgtaagaaagagaaagtgtgagagtgctagaataccatatcacaatcacccaaaaaaaaaacaagggaagtctgtatctagaaaagataacttctagaattcctttgccattgaagtctttctttgacagtgaaacaaccattgaagcttacctcaagtaataggccttataagcagctgggccatctttaaagagaactgacaagccattgcgaatcaaaaaggtacgcaactgcaaaaaaaagagacaagcatagccagtataagtttccagctctgccaaaatccagacattggagaacaaatcaaggaatatagaaattaaagagaaaagaataatgtttcaaacaaacaaacaaatgcttgatcttattacagataaaaatacacacatttcaagtcaatcataattatatcctgtaattaaattttagacttttactgttcatgaatgcctacgttatattattaaacttgtaccttgtatgtaagaaatttcattttgatcattaagtttgcatcctcatcggctaatccatccttttctgatgcactgctgctagcattttctactatagcactctttttagaaagttctgcagctctctccttatttgccttgaataagttaatatcaacaaagaatcctgggaaaatatggaaaacatcaattatgtaaaacttcttttgcccgaagataaaacagtaaacagcgagaacatctcagctgtcaagttttacatactccatgcacatatgcatgaattaaaattgactaacaaagaaacttgcaaatgaaaggaaaagtttgcaatgtattggtgctatgtagtctctgttagcatttctttacctgcatataccacatggcaaatccctcttttaataatctatacaacatgtttcttcaaaaaaaatgaaaattcagaattttaggtgatcaattaaatgacaattaagattatatacaacattaaagatatattcacctcgatataatggccacaatcctggtctgcacctgaaaagagccaagattatagtttagaaaggtgggtcacatcaccaataatttaacagaagtgtttgataaaagaaaacagcttagcatataggtagaactaatcaaatacctcatttctttctgataccgtcgaaatgtagagtcactgtgaacatgaatgactatcttatagaaaaggttatcagttgatacagaatcaactttgtggtagttatgataacatttaaaggcggcagggaatcgtttttctctcataatccgaattatttcctggttcaattaaaaccataatatcatatgtcattgtgaaatgcccaaatcacaagacaaagaaaacttaatatcagaaaaagacagaagactcaaaatatagcaatagaacaaaggaacactaaaacttggacctatagtaccacaaatgaagtgcaaatgacttgccaaactattttcaagatcctgaggcaacccattaaaaacaattataaataactaaggatccagcaaaagtgtggtacatctaatatttctaaagtccacggcagattatgcgaaaagtcaaacagatacatggaccaaggaatcgaatcagagcagtaaaattagtggcacatcattcattgaaatttttcaaatcgaatacatcccaacctgcaatttggtggttgagaaatcagcaggatgagattgtaaaaattttgaaacaacggatttatctgcatttcttgaatgggaatcaccagcttcacttccaagccaatctgaatggtcagggcagaaagagtttccaatgctctgaagaagtgcttttatttgctgcggtatgattggacatacacttataatcgtttacttacaaagtctttagtaaataacccagataaacatttttgactgaagaacataacctgtttttcgtcagaccgatttgctgcacaaatatccctaagacttggtcccagatcaaggcagtctgaaacacaaaccaaatattagtgctttaccttagttgattaaaagtttctaggctgaacatttattaccatacacagcagtcttacataaacaacacaaagtatcttgaatatgaaatgattcatgagactacactcaaattctaaatgcacaagtacataatgaattaaaagaaataaaaattgtaagctactagagagatccagattgattaataaggacacataaaatatgaaaagaaaagaagaaaaaaaaaagtatacctccctcaaccggtggaggaggaaagtccttcaatactttctccatatgttttgagctctcgtgactaacaatacgagccacaagaccttccagtatttctccctgcaccttgacatgatcttttgaacctgtatataaattgaaacttggttatctaccccaaataactcatgaaatggtagcatacccaagggtacttcgtattgcctaaggcatgtagaaggacattacagatttgtttggtaaacgcatatagctactgtgatgataaaatgcaattgctacttcaccatcattttggccacaaaatggcagtcctaaaatggttcatgaaacagaggcacattatcttgcgactcaaaaggtagggaacagtagaaacggtagaaggacattcacatctgtttagtaaaaccatatctatctcatgtatttatttttgagttgctaatgattcaaacccaatccacatgtcttcccaaaacctaatagtccttccattactgagtttaaaagacaccggccttgaaaactcattatagcaagatgttatgcctttccaagatcacaggctttctcaaaatccactttatagattactcattttttcctctgcctgtattcttccacttagagcttcttttatattcaaaaacagcacctttgagattatcttgtacagactggtcaccaaatatttatttattcagcgatgtgcatgcctagctctacatttatatggatgccactattatgcctacatatacataaggactcagtgtattattttgagtaattcagatagaaagcaatcaaatagaaatttgagtagaacggttaccagctacagagatatctgcgacttcatcaagagccttacatacaggtgttgccgttccttcttcacaaagcgcatcataggcagcaaaaaatgacgtgacagatttccttcaggtgtgaaaggagagattaatcagaacacattaaactattatatcacatttattatcaaattattagatcccatatattcacagcaatttaagctagtaatcccaatgacagggtctgttgaattctagcacttttaatagagtagtgctgattgtcagatgaaacaaaaccactaaaccaggtaaatcatctaaagatggtaattaaagaggtgtgtgtgtgtgtgtgtg

SEQ ID NO: 296032 - DNA, 2183 bp, Cannabis indica
aaattaaaaaaaaaaaaacaacacacacacacataaacactaatcaaaatgctcaagctgagaatacgtataccttcatatccgccgaaaaccggatcctctgacaacattaaagggctatccagatttacatatctgcaaaatgaaaaggactgtttaggcctttgttcatgaaagggtatctaaagaaaggtagaaagaattagtaattacaacaaaaccaatttaaattaatccacttagtgttgaggaagacacaaattaagagaaagtaaaattacttgaagcatccaagtccacaagtcaaatgaccagcgaagcctgtggcaattctagtctcaaccatgctatcaattacaagattcaagcctgattttcttgcaacatcaatgacctcgagtgtttctagaaccccgaatttcgcaagtttaatgttgataaaatctactaatttatcttgtattactctctttacatcattcatgctctggcagctctcatctgcaccaacatgaatcccatatttgtctcttgcaacatttcgaacataagcaagaccattccagtcatctttgcgaacaggttgctcaaagagaactggacttattcccatgcctggaaagaacaacaatctataattaatgtacttgttaagtactcagtgctttatttcaggacgtaatggcataaactagtattatgaaatgttgagaatgtgaaataccatgcaatttctcaagaaccatcacagcttcttccgaagtgtacttcccatttgcatccaaaataaacaagcattggggctgagctaattttacagctttaataacttcgagttctgcatttatgtttaatcccatatcgaacattatggtattgaacccttggccatagtactttgaagccaattgagaagctctagctggagatacaattgggatctgtagattatgagaccaaatttgagaaccaaataattgtattcatagtaattaatactactatttatcaaaactcaataaaaattgataaataattgccatatttaagattagcatgaatgtggtacgtactgttatggaagtagttaatctatttgaaacaccaccaaataatctccacagaggcacatcaatgctattggcaactgcatcaatcaatgccatttcaactcctgccctgagcttcacaagacattttcactcagaagtcttatatatgagcgttgttattagctaaacactagattaattcagtacgttataaatgatcctatattatttattcaacaaaatatgtaggattagattactaattgtgtgccaacaaatcatgtgacattgtgatgccttttaacatttttcaaccataataaaagtaattaaataaagatgcaaaacatattataaagttttagttattaccataatttaagaacattgtgaattgatgatgagattaattaaaaagaaaaatgagagtaaaaacatcaaaggttggaagggaaagagtaaagttcatactaaaataaaaaacaatgcatatcttggaataactttgaaaatgaaaagtaacaatttgggaaattttgaattaaggattaaattttggtgatgttagagagtctcacattgctaatgtattgaaagataatagaatatataaaaaggaatgggctactcttttcattatcaattagttttgagatggaaccacatccaactcatcacattaattttggattttgaccgagattggtgttgcaattattttttttagtgttctttattttcggattgattttaccaaaggatctagacatttttcctttaatacccgaaattagtagtgtaaatggactataaattcaatcccgaacaaaacccatccaaaatccccagttttcgtcgcttttttggccggaaaacagtccagactcgactgccacaaaccaggtcgcgtgacccgtttgcagacccggctagaggaaggaggagactcccagccgcaaagtacactcgcacggacagcgcgtgggggcgcgtgcgacacctccgggtgtcgtttttcgacgttttttttttccaacgtgcttaaaattaaatttctaatttttctatgatttttaattaatttttgactccgttaaatattattattattttaatgataattatgtagtt

SEQ ID NO: 296033 - DNA, 2546 bp, Cannabis indica
aaaaatccaggggacataatttggtacatgtcaaaatcaatgacaaaaatctaaattagccttatagttaaggtgttcaggaacaccatgagagtcacattctttgtcctaccttctgtactgtacatgcgacagctacctttgtgtgaaccaataaaagcaccctgcaaattatgagaaaatgttaccaaagatttcaaaacaagacaccaaatttttttttctcatacacatttttaaaacagtaggtaaaatgaaatgggaggtgaaccttgccatcaggggtgtagcaagcagcagtaaccatctcatgaagatcagtccaatccacaacttgtctatcgggtatgttccaaatcctaaccttggcatcaagtgagccactgatgaagtagtcatcattcattggattaaactgtatgcaagttactgccataacgaaacacaaaaatcaaaccaaataatcaacatgttacatcacaaccaatccaatttcataccataatcgttgtgagcaaacattcttaaacagctcttgctttctaaatcccatagtctaacggttttgtccattgatgatgaaagaagcaactgttaatcgatcacaaacaaaaaatattcatgttcagttcaggttaaacacaaaagaaattagaaaccttttcacataacatatacctgatctcttgaccaagacaaatccagaacatcatccaaatggccagtgaaattgcaaaatggtttgtctgagagagcaaacaccgtttcaggcacgtgaacatagtcaggaatggtattggtgccacctcttctactagatgaccctttccctttcttcctcctctccgatggcatcaaaggagcatcagcaagagattgtggccgctccggcgagttacaaatcgagggatgaaggggcgtattggcgttcccttcctctctcaatgacataatcccacactcctgcacttcccacactcgaactatcctatcttcccctgcactcgctagaaaatgggcatccatactgaacttgatacaccagatcgagccttcatgggcttgaatctcttgacaacaatgcaaagccgataactccttataagattttcctgtctgccgaactttaatccaatccgaactagcagtattggagttctttgcaggcttattatgctcagccccagctgcagcaggcggtgggggcaatggtggcagagcctccctttctttctcacaaatgaatccactcatagaagaagccacaccctttatgctatttttgagaagagcaacacctcttctcttgctcatcctcaaactccttgatatgtaagaattagaaatacccactttcctattactcccgccaactctgctgccggtaacgttttcgcgacgcattaattctttaacgacgggagaatagccaacgcacttctcgaactcttccatggtgagttgcttccctgtttgaaggtcactgagcctgttccacatcccatcttcgccatattcattgacgataaactctgtccctgtatctaaattcttgatgaggaagaaagccccaaatctgctagaggaaaccaatgaagacagagcaccacgaccaccactatttctgtgcctgatcgaacgtcctacgatggtactcggatgatccctcggcgaaactcggatcgtatcggcataagggcatatacgagcccttggagccaaaatggctgagtaagttctagtgatcctctgttttgaattcataccgatcatatcttgcagccgtagtttctcgagggtaaaagactcgatatcactatccgaacgagacctcacaagcacaaccggaaattgaggagacggcgaagacggagaagatgaagctgaaggcgaagggtcttgtttaggatcaacgtcggagcaggttgcagcattgttttccggtttagccgcgacgacaatgctgctaaccctcaatagatccttctccgctgccaatcccattccctgaagcaaccgtttacgacgctccttgatagagcctggagcagccatccatacatcgtagtttgcagcgcctgcaacagagacgacggctgaggaaggagtgttgggatcggagaagttacgtaggaaatcggcagagcgagcggttgagacagtggaggcgaaggacatgcgacaatcgtcgaagccatcgtcgtcagaagaagagaggtcgagatcgattgcgagtgcggaggagattcggtcgaaagattcgaagaagcggtcgtcgtcatcgtcgtccttgagagcgtcccagttcatggtcaaggtcctgagtcgttccatggtggcacgattggggcgtggctgagacggttgtggagcattgaagatggaacgaaaagaaatgattttgagtgaatggaatgaattttagagagaaaaaatagagaagagaagtttgtcgtaatataaacggtacgtaggaaatgaatgataagcatctacatatattataatgaaaatgaaatgatttaatcgtaatatcgtttacatct

SEQ ID NO: 296034 - DNA, 1361 bp, Cannabis indica
cttatttaaataattgtattaggtcaattatatatacccataaaaaataaaataatggatgttacataaaagctagacaagctagacaagaacattcactagcagttatgcgagtaactcaaagttttggctactaaatagataaaaagttttggctacgaaataaataaaagctagaacagaaatataaaggggacaatagaattatagtagttcagtcaaagctcggtcggcttagtccacttctggtaataatttttagcttaatttattagatttagatcatccatttatataaaaagcaagtgttcattgagtttacacaaccaatcagttaggaccgttattacaattattacacaatttaatgaataaaaaatgtttaaatgatatatgtaagaacaattttgtatgttcgtcttaattgcaataatgtgtgcgacttactaggtcgcaacttgtccattcgtatcctaacacgcaagctcacagattatgtggtgttgtactcgtataataggccttcaggcttatttagttgaatgtctcgatcaccttggattgcatgttggacattccttatatcgacggcttaaaacatgcgagttctttagcgagtcctcgaacacattagtcatatataaagaagtgatcttcacttgttgcaaagagatattcttgctcatcgcatacaattgatatgcgtgattagtatcaacttctctcggtcttgcttattttttaactataattggtgtagcgtgtaactaccgactaggccctgtctcggtcgcaccgtctcgcaagtttcgattatgcgaggctaactcttcgagagctattctattgacacatcatccttttcctttgggaaatgggtccatatgtcaaattttcacgagactgtacttgcatttctagacaaaaaaatttgacaataccaatatatatacataaatattatatatataaacacattcttaaatctccatttttacgcaagaaaagtcaatcattttaaaatgatagataagcattcgtaaacattgaaatatatatacattttcaaagaataaataccaccactccaaccatcatcgttggtcactattcaccaccatcaactataatacatacaaataggggtgttcatcaaaccgcccaaaccgttcaaatcgttcgcaccacaccgcactgcaaacaaatacagtttaaaattctttgcaatgcggtcgcggtttgaattttttttaaacagcgcggtatggtttgcggttttgaattgttaatatgaagttcaaaccgcaccacatcgcacattataaaaataccaacttttatatttatttagtccaatatgt

SEQ ID NO: 296035 - DNA, 762 bp, Cannabis indica
gtggagagtgtgtgtcctggtgtcgtttcatgtgctgatatattggccattactgctagagactccgttacaattgtaagttaattattaataataatagcaatctaatgatctttcttactgtaagctcgaaaaaataaagttaagaaaaagtgtataggataatggtttatatatatcgatataattattgggatagtgaactcacaccatatattgttaaatcatgcatctagctatactattaatttgttaagtcaagtcacgtcaggatatacagtataaatgatgtaatacctataatttagatggtaaattaaaaatatgaatgattttatttgattgtatataaaataaatataaacatccagctggggggtccaaattgggaagtgaaattaggaagaagggacgcgaaaaccactagcagagcagctgcaaacaatggcattccacagcaatctttcaacttaaacaggctgctctctagattcaatgctcttggcctttccaacactgacttggttgctctatctggtaagctatatacatcccttttaacctttcttcaacacatgataataatatataatcaaatataatttataatagctctcttttttctaattgcattggtctattgattattaaatactgtaacaggaatattacacacttgtaagttgttggataaaagccttccgttttgtaacactttcttaattagttttatgtttttaaaattgaaaaagtgaaaacatt

SEQ ID NO: 296036 - DNA, 3387 bp, Cannabis indica
caaacatgacttgtttttaaaaacttcaaaaactattttttgttctcatttctaaaaacaattttttgaaaacaaaaaacaaaaaacaataccaaacatgctcttacattctcatttttctatttcacaaaatcagcattgtcatgtttgtcaccttgctaaataaaaaatattaccatccatatcaaacaacaattttgctgaacatatatttaatctaatacatatggatatttggggactattcaacatcataatcattgaaggatataaatatttccttacatttgtctatgacaagtcttgatttacttggactctcatgctcaaaaccaaagtagaagtttagacagtcattctcatgttttacaatatggtttgcacacaacattctaagcctatcaaggccattagatctgacaatgctaaagaactaaacatgcaatctttctatgaatttaaaggcattgtccattgccattattatgttgaacactcacaacaacactcagttgtggaaagaaaacatcaacatctcctaaatattacaagagcattgtgttcccaatctcacttacctctggtcatatcttattcaaactgccacatatctaatgaatagaattccttctgaactatccaaaggcagtacctcttatgcacaacttcacaataaaacacctacttatgatcacctcagatgttttctatgcttagcctatgcttccactctaacatctacaagacacaaattctcactaagaaattgtccttccatatacattggctaccctcatggcatgatgcatacactcttcttgatattaaaaccaagcaaatttaccactctcgagatgtcatcttccataaaaacattttccctctcattggtcaaaattcacaaactaaaatacatcaattctttcaacaattaatcactccactttatcaaccactaactcaagattccacgcctcccataactagtgttgatcacacaccagtacatattcctgaggttcaagtcactgcttctcctcctgattcgacaatttaaccagtttccactactaaacctccatcaagagacaacaactcttttaccacatcacatcaaacgaatgatgcacaacctatcgaatcaaaaattggctgacatatcaacatacctcctcatttgaaagactatgtctgtcatacaacctccacaactcatcccattgaatagttcatttcttatgcaaaactcagcccacaattcaaggctgttgttcttgtagcttactttaaacttgaacgacactcctattcagatgcttcccaattaaaagattggctccaagccatggataatgaaactcaagctcttgaaaaataaccacacttggacagtaaccaaactacctcctagccccaaagccatttgatgtaaatggttttgcaaagttaaatacaacatgcaaggagaagttgaaaggttcaaagctcgtcttagctaaaggactcaaccaaaataaggtatagactatgtacaaatttatgcccctgtagctaagttcagtacattaaatatatttcttgcactagatgcaatgtacaattggaacattcactaactcgacatcaataatgcatttcttcattgtgatctccatgaagaagtgtacatgcgaattctaccagactacaatgccccacccaactctcgtttgtaaactcaactagagtatctatggccttaatgagttgacaatcactcactttaaacgattcttcgataaaaaattcaaactcaaagacattggctcactcaggttcgttcttggcctagaaataggcagaaccaaatagggcatttctgtatcacaacagcctttcaccctgtaattactaattgacacaggctaccttggagctaaaccagcctccactccaatggaacctaatctcaaacttagcaaggataaaggcaaactcttactagactcagccacctacagaagcctaataggtaaacttattacctcacaataaccaggccaaacatttcatatgctgtaaatcacctcacccagtttgtcacttgtcctagagtgccacatcttcaagccacacaccgtgttctccaataccttaaacgcactccaggataaggtttatttttcccttcaaatacttcccaaatatctcagcttaagctaaaacaagcatatccccctccaatatccaactttcattctttgctaatgcggactgggggacatgctaggatacacgacgttccatatctggctactgcgtgttcctaggacaagctctagtctcataaaaataaaaaacaacaagttatttctcaatctttagctgaagtcgaatatcgagccatggctaatgcaacctcttgatacacttggatcattgctacaaagattttggtatctctctcaacagacatgcgtgtgacaatactgcagccatccacatagtaaaaatcatgtctaccataaatgcacaaagcacatttaaatagattgctactttattagagaaaaattttagcaaggcatcctcaaactacttcatgttcaatcacaacaaaacttgactgacatattcactataaagccttactacccttgtccttcaacaacattgtatccaagatgagtgtctcaaacatttacacgccatcttaagggaggctattacgacttcactgttagttacaattctgttaataaagttagtagatgccattcttggctcagttagttaggcttatcttggtttgagctaagttagttattcctccaactaacttagctcctatgtatctctatatatatccctacatgtaatattgatgataaagataataaaacaaagcatcaagcttttctctcttggctatactttgttttcctcatacttctctcaaaactctgaagcttccacttcatttacctcccattcttctttagattccaccattaaactatttgatcgtaaaacaatatcttcaacttccttagtaccaactattatggccattaagccaagaaaaattagaagtcaccacaaggacaatagcgttattcaagggtactttagaccagtttttcctcataattatttatttgtttatttgttacacttgtgtaaagttaaacatcttgcgaccaataaaaatgcttgaatatttatttgttatacacttataaaaatttgaatagtcttaccgctaattatatccctatatatttaatttgttaggttgatgttacatgcaatgcaatatatgtatgttcaattttttttttaattaggtaatgtatttttacttttaatttttaaaaatagggtatgagattttgatctttgagaatt

SEQ ID NO: 296037 - DNA, 2820 bp, Cannabis indica
caaacactagattggacaaattagactgtctaatccaatccagtcctgcgtaccaaacgggtccttaagggtttgtattattttttcgagtttgtagacaagatcacaagaatgtctaaggtgagcctcctgaatcctgattacaaagagaatacaaaaaaacttatatatatgcatagattagattctgtttacaaaagattcgtgcaatactctatttaaggaaggggtgaagctagctagctaacgccctaaattaatccaaatttaagcaaaattgtacaaaaacaacttcccaagcgatatagattcaatgtgcgaaacatttattaaaccttttttttttcaccaattgttctaaaacaatttaacatgatataggcaagaatcgaaagaatagcttaacgatcgacactaaacgtggtggaattaatgaataagcaacttaattattatgcataaattaaagaaatgccttaattattactcgttaatctcacaaaacctctcttgatatttcaatatgtacttacataattgtaaataattgacatataaaataaaagaaactacattatttggtcatgtatgtgagatgatcgtttagttatgactttatacaattgatcaaagccccctagatttaatatatttttcgatgcacatcccattatatataatatatttgcttctatatattgaccaagttataatttggacgtcgtgcttgcatataatacccaaatctgcatatatattttgtttattcattccgtatagctgcaattatgggttggatgattgcttggattaggtgcactacctttcatgtgaatgccattaacaactccatacgatttcttttttccctatattccttacattacacctgtcctaatcttgccaagtattatatgtatttataaatatatctaatgtacaaaacatccagtgaagcaagtagtagtctcatttatttcaaacttttttatgcaataaaacaacctgtcattagacttaaaccaactctgtcaacgactaaatcaaacgacaaaccttttctttttgaaacttattctctttatcccttatatatatataactcctattcccaaacttatatcctatatttgtgtcactaaaaagatatatcatttggtgcatatacacacttagatctcctctgtgcttgtctgatcttccaaacatggcaatgaaaacatttttattaagcttggctgttatggcagccatgctcattcaactcaccatgggagaaacttacacagtaggaggcagtggtggatgggagcaaacctcagacctccaaacttggggatcatctcagactttttcagtcggagacagtctcagtaagcacaatcaagactcactagtgttgttatcttaactttcccataattttatttttaatatgttgtatatatatataacttttatccttgtcataaaatgaggtgtttgatataacacacgtctatctcaaaattgatgatgagtaaaataaatagtcatttttatgtatttcggtatatattcgatgtgggacagttttatattttgagattattgaagaaaagtaatatatactaattatgtttgatttactttgtaaggtttccaatatactccaaaccataatgttatcgaagttccaaaagcagactacgatgtttgtgggacaactaacctgattcagatctacaacgacgggagtacaatcattcctttaacatctccaggaaagagatacttcatttgtggaacatcaggacattgcagcggaggaatgaagcttgaaatcactactcttgcagcagccaccccatcttctcttcctccctcctctaatactccaactccaaagccatcttctcctccttccccacccggccccgtcgcagataattcgcctgaggccgagccaaccgcagctcctccactgtcgccttattcatccatggaggacggctcgcccttgtcactcactcctattgctccttctaccagtgctcacctctccgccccagcaccatctgctgcaccggtcacctttgcaaccagttttccatctggactcttgatggggttcggtgccttgcttctagctttttaagctgcatgttataataattatagataatttttttaaaaagaaaaatgtaatattattacctattattgagtatattatcaaatctttatatgtcactctttatcattttctttcggtacgttcgagtattcatctaatcaatattttttactgtgaagctatgtttggtttccaaaacaaaagacacatgaaaaaagaaataaatggaggttaagttaaaaaaaatatgaaaaataatcctcattaattatttatataccgtccaagaaatctgtattgttgtggccgttaattaaaatttaaacaaaccattaatagatacgatatgttatatgtggtataatttgtaaaaaatatccagaacaactatttggtgttcgaataataagaagagttatatatataaagcaactcttgtcctgtcacacatgacatgcatatacaccccctcagcggtcatttatgggcattagttggtgattccggctgtttacctctcgacgatgaagcttgtcccccactgtcattggccaatcttgacccttgttattttgaggtcaaggtcatatttagtattcagatcttgcctcgatttggtatcgctctcgcagcccgcaccaaaacagtgctttaccactagatgtccagtcaactgttgcgcctcaacgcatttcggggagaac

SEQ ID NO: 296038 - DNA, 1801 bp, Cannabis indica
taattatttaataaataaatattttttaaaaaagtaattaaatattatattctctctcatctgtcagttccactaacctcaatcttcttcctctccttctctatcttagcagctactatgtaatttctaaccccaatttttttttggtcttgttttttttcttgtttcttgtttgttcatgtctgtatgagtagcaagattatcttattatacgatgaagacccaaaaaatttgaggaacaaatttatcctatttttcttgaatcaatttagtatctgtgtttattgattgctgttagtatatacataagtaaagagttgacaagttccactaaagatatgaacatattgcttgagtaaattcacaatttgatacgtaatgaaactgtccaaaccagttgtaacacacttgactgtcctccagaaataccccttagtatttcatcccctactattatatcagcacatacttccaaaataagaatctgtaattcatatggtcttaattacttgagtaatttcacagaaatagtctaatttcaattttatatataagtaacactaagttaagacctttttatttttttacagttttcaccttaagaacatagtctgtcattgtctctttgccttctagtgttgctgctgcctacagtacaataaaacactcttaagtcaaataaaattcagcttcaaacttagaaagcaaatatcaatgattgataactttctttagggggtttatttatttattgctcacattcatatacacatcaatatttgtatatatttgcttctctcttcttcacaattcagatagcatgtctagtaataatgaaaatatatatatattaatataaatacataagaaaattaatgatgaacatttcttagtaaacaaaaaagtataatatgtatattcgtttatagggtaaatattattttggatcctgtgttttgtaaaagttattaattggacccgttgttttgttaaatgacaaaatagaccttgtattttttaaaattgtacaaataggatcctgaactgattttttgtcaaaataaaactgaataataatttgatctaaactggttatattttctatatatgttcgtgttagaaattatctaaaagttggttatattaaaaaataaaattgttaaaaattgagctcaggatcctatttttaccattttagaaagagtaatttgcgtcataaatacgtaaggtttatgccgagtagcagataagtacctaagtcgtatttttggtggtaaaaatacctttcgtcactagtgtgaaacttccgtaagtacctagtcattaagtgcaaggtcaggatccacgtgtcactcgtttattggtcaatggtcattaatttttttttatttattatttaaatgttcaaaaatgattttaaaaaataaaaaataaaaaaattaaatataatcaaattttttttatcattaacacaaaattaaattaaattcaaaatttaattcaaaacctaaaaaagctgagaatataaaatccctaacccctaaaatcatgttctctctcccttcacttatgcgaatgagaaccgattcaatgttcttctctcttatgcgattcaaggggtcaaattcatcccttatcgtcttccgggaaccatggggtcattgttcttctccctcatcggcgtcggcttgcgaagactgctcatcgacgccttcttcctcctcaccattagagcagccctatttcaccacagtgcatcctccttttcctctcttctcgacaacctgcgaaccagaggcct

SEQ ID NO: 296039 - DNA, 1608 bp, Cannabis indica
taaactaatagtttagggtaggggggcgctaacgagcaagaaaaggccccaacctatagataggctaaggcgcctttactaatattctaatagttggcgaggcgcttctttctcaaagtcaagtttctcgcttgttgctttagaaagaggggcgctaacgttttttggctccttcccggcccggaagttcgcttctggcgactagcttctaccgctagcgcttggacttggaagcaagctacagctaccttgaatcaatcaatgaatgaaaaggaaccgcttaccgaggaatagaaagggaggacaggttggttcgaggacccgatggtcaaaggaaaggggaggtcctgattccgggacggagccgtatgacgcgagagtgtcacgtacggttcctttgagaagggtgtgataccaccacctatcaggcccgacgagcggtccacggagctgcatccctactcacctggtccatgcacatcgctctctccaggaggttggccgcctatcctagatcgtcccattttcaagaagatcccgggctcgatctggtttagtatcaaggtgattctctttctgttcctatatatatgggtccgtgcagcatttccacgatatcgttatgatcaattaatgggacttggccggaaagtgttcttgcctctatcattagctcgggtagtccctgtttctggtgtttcagtcacctttcaatggctcccttaattatgtgcgaggagttgccctcttgagtaatgggaagcgggctagtccccgaaaatgcccgttcgcttgtcgttggggagaaaaatctgacttgctcgttcctaggttcttttctcttattgcatcaactaggactgctaaaagactcccaacatttactgaaagctcttaaggttagtagcttcttctattgatgtgattccaataggataggaatactggcagctaggagaggataagaaagaagcataaacggacgttagaaaatgtcccgatgaacttttattcgcgcactttatgtcgctaacccgtggcggacagagctaacaggtgacgggaaaggtacctccccatttctaacctcgggagaggaggacgttgatcgagcttttccatgcctagtcccagtttcgaaagacccagagcgggctacggatctataccaagcccgttacgccataattcattgaggttgatcccgaagttccggtctatcccgtagcagtagtctctatttattcaccccaagaatgaactatcctttgtttcacgggatggatttaattaacacgggtagacccgaaaaggtcttcgcaagcataccgctttctgttcaagaatcggtagcggttttaaggaagactaccgagctccacgatagataagcgcctatcatctctatgcgaattctgaccttagcttttcgtctttgattagtattagcgaaagctcgctcgacttaataatagctgtcttactcgacttgcttactagctgcctttctgactaatataatttttttacttgtgaatttagagttctaaactgagtacactaggagaacagtagtttccttttgtttcctttttatgaacacggaat

SEQ ID NO: 296040 - DNA, 3798 bp, Cannabis indica
cgtgtctgatccgttttgctagtcctacctcaaattattacatgtattaaatcgtgcttctgaatttttatccacctcagattactgttggtaaaattagacaaaagtccttaaatcctaatctcaatagttcgagagaatttttaacggtctgaaaaattcagaaagcatgatttgatacatgttaaagttcgagaaacaaaaatcctaattaacctaaaatgaaataacaacaatgtttaatgtgcaatagatttagaatttgttttttttttgaaaaaaaataattttttactgctaaatcctctaaactattattctacttacactttatcatttaagctcaatgctttaatatagtttgaactacttattgagaaggatggcctaatttattgtgctatttgtcaaaagcaaaaaaacttgttttattatagaatttacaagaggtaacatttagattccccttggtggatgttgagacaacactcatagataagagatgatcacaatctttggcatttgaggcaactttgatggcatgagtccctcaggttgtaaaatttggatttgaagcgtcaaaagtatagaggccatttctgtattttccttccataagagttagatgagtatcctcctccttaacacaacaacattaaacatgaaactcaaaagaatgcaatgttatctctagaaaactgagaaacgctcaataaattctttgttatagcaggaacatgtagcaagttgttaagaataagaggttgtcgagttttattagagttgataaggattgacctatattttcaatggacaaacttgaaccatctccaacaaatagttgttcttgtccactgtattcagtgctgagatgtatgttggatgcatctagagtgtagtgattgatagcaccagagtcagaataccaacttgcgccccactcatttgatgctacaacaacattggcttgtggaggtgctgcatttgatggtcctataaaggaagagcctggaaaggaaggacttggaaacgttttgtcaaaacgatagtaacaatgttgagcaatatggtcaatttttaaataaatttgacattgaggcctattgttaggagtagagtatcgacctcctctgctcaaaccagcaggagggctaggattacctcgaccagatccaaaggaaggagaattattgacgttttcatagttaccacgatgtcctgcattggatgacattctaggatagttaggtcctggataaggttgcttgtaagctcctcgaccataatttgcaagagttgcttctggagttggatcaagttccattgaagcaacatgagcactaagatctatatccttgtccgatttctctatgcgagattctgaaactagaagcaaagcttcatttttagctattgagtactgtttgagtttggtgttagtggatatgacaaatgtgtcatattttttaggaaggcctttgaaaatagctctaacattatctctcggattgagaacatctccaactgtctctttcactttgagtagataatcatttagtgaaggatttcctttcttgatattttgaagtttattctaaaactcgaggatcttggaagatacttgaagagtaaagtatttcttgagtgtcgaccagatttggttatatgtttcacatccaaccattcacgtaagcaggcttagggtcattgaaaaaagaagccatgagatcagcaattgatcctgcaattcccaatcaagataagtttgattgaagttgctctgtgcacgatcgttattagtgagaaactttggaggtggatcgtgaccttgaatgaagctctgcaatcggtttcctttgatggctgcaagtaccttttgtttccacaaaagaaagttatgatcatttaggttgattgaaagactatgattgaagtaaattggttcatttgtatctcttcgcctaatgtgttgaaaggtcagattgttggcttgagctcctgcatttcttgagtttgaggtgtctcttgggaggactttttttcatttgcttggctattaatatcggaaaatcaagctctgatactatattaaattttctagacatgatgaaagaaagaaaaacaaaggtgaaaagaaaagaaagaaaaacaaagagaaagaaagagtatgaaagagcaaaaatgtattattgtattgatcaaagcacacaagaactaaaagatgagtaaagctattgagctaagaacacaagctcacgaaatatctaagggaaacgattaagaagcctaattaaccacttggctagacaaaactaactttaatattacacaaaacagaattggttctcttgatatatttcaattaaataatttaatacaacaatatatatgtcaataaatttgaattgaaaatttaaaaattgatctgactataattataaaatagtaaaaaaaggattttatttttaattattttattatggaatgagtaataattaatttgggtccgtaaggctaaggacatcaaaacatcattagtagttgaaattgaaatatatagtttgcatgtgactctagatttgtgtaactcattttgacgtaaatttgacaattacgagagtatagtcaaactctccacaatttatcaatgtattctggtcattactcattattataattaaagcattttttttttttgcttttgtttttttaatttcatgtaatttaattttaaaattgagtaacagacagctcaagtaatagtagggacacatgcacgtaagagctctagcccttgatatatacatatatatatatttaaaaaaattagcttagttatattctattaccttatttattatttaagggacacacatgactagagtgttaagatttaagaatttatattaaatatttacaaacaaacatatataacatattgaattattttttaatgagtattactcgagaatttttaaaaaataattataattaaatgtcaactttaaaaaattaaattctaatccaatgactaataataaaaaaaaaatagaatttttatacttaattttactatttaatttaaaaaatctcttttttatactatatcaaaaatatttttatatttagctattatttttatctctttcactctaattctaactaaacttaaacttaaatttatttttttatctttcattggtgatagaataactttaattatataatgcaaaaataataaaaaaaaaattaattagataggatacttaaacataaaaattcaaattttactaataatattcattcatgaactaatacctattaaaagtatatataacatgaataatacaacagtatgactcatatcaacatatatttttttttccaaaaaaaattccacacatttttaagatagatgtgtctatattgttatttttaggaatataactccccaaagtaaaaacaaaacaaactaattctattacataatttgtcaatctcattattatgacaaataaagcaataaaaatatttgccttagtgatgtgttctcttctctcctttgacaaaatttccctttttatctcaacaatacatcttgggtaaataaatagataaacatgctttaaagtaacacagcacaactcattatcaatttatttcttaaataataataataataataatgtataatcattttgaagtggggaagcaaaagaatagaaaggaggaataggctagggcattttacaaaaatactggatttggggtaattgttttcaattttactgccacacg

SEQ ID NO: 296041 - DNA, 6634 bp, Cannabis indica
tgaaagagtaaaaattatttaaaacatcctataaatcttcaaaaacctttttattgctttcattgtgatgtttgaggaccttctaagctcaccactagttatggaaaaaaatgggttgttacttttacagacgatcatactcgtctttgttggatatacttaatgagtgaaaaatacgaggttgagaaactttattcaaattttttacaaaatgattgaaattcaatttcaaacaaaaatcagtattttaagaactgataatggaacaaagtattttaataacgtccttggtaactttttgaaagaaaaaggtatttcacatcaacctacttgtcctgatacacctaaacaaaatagtatagttgaacgaaaaaatagacatttattagaaacaacttgtgctatgatagatgttttatatgcaaattctaaatatttaagggtgatgccattcttactactttttatttaataaatgggatgccctcaaaatttttacaagtattctaccccgattagaaattcgcaaaaaatgtattttttttgggttatccctctaataagaagggatacaaatgttttaatcctgttactaagtgtatttatatgactatggatgttttttttttttggaaaacgacccttatttctctgaaaatttaattcaaggggaatatagtggaaccaaatttttgggagactgtggaacctttaccaaaaaccattcttgatatttctagtgaggaaacaaatcccattgaatacaaatctgaaatgggtttgttagaataaagaaatgctacgattgataaaaatttgtaataatcatgagcatgtggtttattcaagaaaaaatgttgctgaaagaagtaaggatcctttaatcatccttgcacatggtcaattggaagcccatgacgatggttcttcaagtattctaggtaattcttcttctattcctgttattgattcatctccacatattactcagccatctcaacatgctttagatccaaattctgctcctaaacctacccctgaatcagccccaggaaacattgacttagacagtcttcccattacccttaggaaaggcacttgtacctgaaccaagcaccccatggctaaatacatatcctacaagcacttatttgaatcctataaaaacctttaccaataaaatttagaattggttgtgcctaggaatgttcaggaagcagtagatgaaccgaattggaggctagtagtgtttgaagaaatgaatgctctaaaaaagaatggtacttgagaaattgtgaagttaccaaaggagaaattgttgggtgtaaatgggtgtttacaatataatataaagccgatggaagtgtgcagaggtacaaagttaggcttttggctaaggtttttactcaaacttatggaatagaccattaagaaatgttttctcctgttgctaaaattaactgtattcgtgtgttaggcttttggctaaggtttttactcaaacttatggaatagaccactaagaaatgttttctcctgtgtgttgttatctctagcagttaattctaattggcttttacaccaattagacgtaataaatgtttttcttgatggtgaacttaaagaagaagtgttcatgagtattcctccagatttcgaagttttggagcagggaaagtttgcaaattgaggaagtcattatacagtctcaagcaatcccctagagcttggtctgaacgctttggtacagtgttaaagcgttatgggtacactaaaagtcaagttgatcacacaatgttctattcacaagaatgtaaagtggcaattctaattgtgtatgttgatgatattgtgttgattggagatgatgctgttgaattggaacaattgaaagaaagacttggtgaaaaattcgaaatcaagaagaaaaattaatttttttaatttataatattttattctttatgaatatattttatttatttttcaaatgaattttgaaataatttttataatttttaaataacaatgttagatgtactaatataaatgtgtcacatgtctaagagtgtacacataagcagtttatgttgatagttaattgtggtaaatagatgacaccttaaatttgttaacaattcggtggtttgaagggttttaccaccaaaatttgaacatgaaaagtaaagtgcaagtaaaatgatagtttggaaggttaagttgccaaaaactcaatattttaattaataaattagttcactaggacccaagtaaggcccaacccactattatggcccactttcatatttcttcttcatcttcttgtcacgagatggtagtcccttcctcgatacttgctctcaccaatgtcatctaccatagacgcaaggacttaggatcgcgcgtcccttctcgggtgtcctacgcacagtgacaaccaccgtggtgcttgccaacaaagagcagtgacattttttcaagccccctatctgttgaccccaacgaaattaataagttccagatttgttgggttatttaatagttgaattttaatgcagccctccaatctctttcctatggaactttttctcgtgttcttcttattatgggcttgttgggagaatggaggaggcctcttattatggtgaacctgttgctacaaaaggaaatgtcttctattacttggtagatttttttatcagtggcaagaataccaacaaatttccactgaagtttacaagtgaagcacaattaccagttgagggtgtatagtttttattctcctattttgattcctggggttggttgtttctaggttttcgatgagcgatgagttttagggttttttctacccggcgcagccctgagctcttggtttctcttcttggtgctatcgagaaactagtggctagttttcaagcaaatttccaacccacacatagcagtgaactaactcctatgctagaggagttttgtcacaggaatttggtctttgaattagtggttggttcaatgcattttctctcagctcgctgaccctgttccgagtctactttcttttcactggaaatggaattttaaggttgttctagtgcgatcacagcattggattttcgacagactctttattttaattcatcttgctgctagagggttttgtcacgggagtttggtctttgaattttggcttggctcaatgcatttttctctcagctcactgaccctaaaccgagtctactttctttttgctgaaaaatggaattttagagttgttctagtgttttgttcacagtgttggctttctgacaaagggcaccaaattcaaattctttctgctcttaacttgtgcagccagcggtagaagggagcttgtttttcactctaccttggatttattcatcataaatgagaggaaatacaactttgttcggctagttttttgatcgaagtcaacttgctgaatgtttgcatatctctcacaacttgaacaatatgcatttgctagcttggttcttttacacaagacgagtacggtctgcggtggaaacttgatgttcttcaccttgaggatatggtgaatttcgggcagtcggtattgttgggccttaagataataaatagagggtaaatgggtaattgtaagaggtggtaggctgtatgaaccgagcaatataaataggagacgagattgaatgggtgggggatggaaactgtatgggattgagattgagttttggcccttgggagagttgaggtctctcgaatacctcgggttctattgttcttatcacttttttatcatctaatagcaatatcagatctgtccactattttctaactccattctcttccataatgtggccgatttcctagctttttattctattattctgttctaagttttttgggcagcaatcaattcctatcatatccctctttgacatttaacgcagaaaacaaaaatcaaggatattctagtcacagaaacaatgatcgaaccaaagaatacaaaacttaacctcaaaaaaatatagaaatagattcttacctttctagtagaaaaatccaacccctacgaatctgatttagtcattacaccattttcatatggatccaaaaacctttacaatgcaaatgccatacaacattagagagaaaatttcttattgagaaagagattaaagggagaaaaaaaagaaggcccattcataggaaagagacagtaaaatgatacctgaataagtagccttgagagctaatagcatgtgataataatggagtagaaacaagggagtctctgaggagaacagaaaaattggagtgagcgagggctggaggaaaaaagtgatttaaaaaatattggaagtataaataaacaatgaatgaaattctaaaccagttcactctgcctcacactacttaagaatcatgctcttgttcaatttagtattggatattgcaaatgacaattacagaaaaggcatgctttttatattacccttaatatccaaaatggaacatgcttccagtgagaagtataaaagaatgtgatcaaaattagcaaataccaatacctaaattgattaattcacaaacttgagttatgaacgaaattcagaaacagtcagttaaatgagaaactagaaattataaggcattaacaacatacaacacaatgacccatatagcgtatccatgaatgcttataaagcaccagtatggcttttcaactatataaaaaaattgctaaagggaaaaagaaaaactttataaacaaattgttcacacaatcatttaatcaaacagtacatatgccaacttcacaatatcatattgccaaatgtggaacccgaaacatgctttcccatattaataaacatcaaaagactatttagcttcacaaattgcacaaataaatgattttatatcatagggaaacccaatgattccatgtatatacaatactatattgtataatctactcactcccaataatcccatataggaaattatacaacactgagagagaaggagaagaaaagaggctcgtgagagagagagaggttcacctacagtggcgtcagagtgggtatgggtttggagtgcggtgggggagtggacggggtagaccggcgtgcaaggagcttggggatatcttcgaccaatgaagtaaactagaagaaccgatcgagaatatgtttaagagttaataccattttgtaaatgtgtttttggaaaaattacccaaataataaattacaccaatattttttgaaatttatacaaaataatattttaactgacaaactttatttttttttttaagtaatgaataaattcataaaaaaatataataatatactaatgataaatactgcttgtattatgttcatcaaataaatactatacaagccaatcaaaataatattatagagaaattaacagcattaatccctataaaatttaatttgttgtaatttaatacctatgtaatttttttaacgcttaccattaggtttttggtgcatttgttagtgcctaggctgttaagtgttaattttgtacatgtggcaacatgtgtcatcttcaaattgtataaattaataatttaaaataaaaaatattttaaaagtttttttttttaaaaaaaatcccacagatcaccttttaagcaaaaagcttaaagaaaaggtgaaaggaaaactggttgtattaattcttctcatataaaatgagattatggatacaacaaggataaccggaccaccaaaccttactaataatttccgacaaggcatatttagctaaggaatgagcaacaatattaaaagttctagcataaaaagaaagactaacatagtgaaaagctgaaaaactgagtctaaaatctgctaagactaactccagagaagaagccaaaggaacctggttattaaacttcaaaacaacattcaaacaatcagatttaaaccacacattttggagacccaataaccgacattggttagcaggatattttaaagttagagcttttgctatttcaagagaaggtgcccattatgtgccaaaaagcagaaactataacatcacttgtggagtcacgagccaccatacccaaccacatctaccattaggaacatcaagtgtagcatcgacgttgattttaataaacccattggcaggcggcacccaggccgatcgagaagagcccctgggtgtggaagccaagctccccaaagagtgagaaatatcaagagacttatctaatctctgatagtctgcaaggaagtcatgaccacatgaaataacaatatatgaatcaatcattttatcattgtgcacccttttgttcctcctaaactaaattctccacataaacaccaaaattagctctaaggaagtaattggcgaaggttccagaaattgataaataaatcataaaaatcgtgataaacaacaagtggatctcccgaataaatattactaagttttcagcagtcaacgagagatgagcaacaagaggcgaaatcactatgaaaaggagtctctcatctactggttgtctgacataatacactctagtggtcggccacttaataggcctcactagttacaattttgtcactttatttca

SEQ ID NO: 296042 - DNA, 2453 bp, Cannabis indica
tctaattttattcaattttactattttaatgattgtttatgtactaaaccatactccccagactttgatatataccaaattatactcctcgaactttgacatgcactaaattatgcctcctgaactttcatccatgttagatttttttactaaaattggacaaaaatccttaaatctaacaatctcaatagttcagggggcatttttaacgactttaaaagttcaggtggcatgattaggtacatgttaaagttcggcaaaaatcttaattagcattttcataaatgtatgtttttatgtcatttttacgattccaacagttttctcatctcgcataaggggcagagtctataccatctacaaccaacattttcagttcctcaaggtataggaataggatgtacttgaattgttttttgttttttttttcgaaggggaattgttcattgtgaatatatattagttatgttatataaattgtggtgaattagatcaccctaaactctactgttatgttatggctataacagtgttgaagaaattgaagaaacaaaacaagaatgaacacaaactataaaactagaaatggaacaagtaataaagagcataactcaatttgaatggccaaaagaaaatgtatttattcatctcttgatcggcaatacaaactagagttttcaagcatttagatttaaagtatatttctctcattattacaattttttaaaatattaaactagttttttaaaaaaaatatattagtggttggtttgggcgggttaaccagaccaacccattggacttacatcacaattactctttttttctttatttgagcgggttgcacttatattttgtaactcactctttacattgggtagaaaaatatagtatatataaactgacaaaccggctgacgtacacccttacgtgtagtctctcatgccaaacttatgcaacatcttctgtaaataacctatctacggtgattgtgtttggtttaagccttctaatttcaatgtggaaggttgtcctcacatttatttggtcaacttctaaattcggtctcgctgcctttgtcatcatagctcttatagaggcttgtttgaccatggggagaaaatttcattgaatccccaccttccttctgtgtgagtactttatcaactaatctttccttgtatttagtgttttcagctcaaggtatgccttcattcttcttgaatttttatttacagcctaccaacttttacttttctgatttctcaactggcacttaagtcttattatactataaagatatcatttcttcttttattgcttgtaaccatgttgtacaatctttacttctaacatcttcttgatatctaattggctctaagctatcaacttattcagcaacagtcagtgcataagcaataaaatcagcataaccaaacttgtttggtagcttgctttctctcatttctttatctttggctagttggtagcttctaaggtcatcttgattccctttttcctcaaccacctcttcatgttcatcttgttgatcaaaagtcattcactcacttattttgatgataaacaaatatttgattattacttgttactgattttttcttgatcattttgcaagcaagttcacaaagtatcaatatttactcggtaaagtcaaacataatcaaagaaatagattcaacaagtataactaacaagtatttcgtacttcataagtgcaaaatttttatcaagagatcaagaattcaagaccttatccaaaagaggacttcaaaagctcaaagtcaaaagtcaactctcggagaaaaatcaactttgaatcaaaacatgcaaatcaagctaggaatctcaaatacattaagagtacacacaatcaagtggtataagtttactttagtcttgttaaagtgatttgtatagaacactagtgtttttaagtttaaaagtttggctcactaacttgagcgacaagttatttcacaaaaatgatatctaaattttcttaattgattttaagattacatattatttaactaagagaacgttggaatttttaaaatcggataaacaagtaaaaagttatgtacgttttagttcaaaaaaatgaaccttttgcccatgttagccatccgaaatttcggttcccatccagaatatcccaactagattttcggttgtaaccaatgcaaaattttgaatcacagcaaaattggcctaaaaaaatgtgctaacggctataaacggctagtttttattcctacactatataaattcatttttcactcaaaaattaaggttggttgagcttctattcattatataacatcattctaagtgttctaagctaaagaattatcatcttttcataaacacaccaaccacacacacttgagccaaacttgttcttatcttctctagtgtgcttgcaattctct

SEQ ID NO: 296043 - DNA, 5155 bp, Cannabis indica
ttttttttctttcaactaatattcttcttatcctctctaatcactttacacgtatgaaatttcaatccacacgtgtgataatatatattctatacaacaggcgcaggcgtgctcttatatacgatatttcacaaacgacaaaaaaaaaatcacaatccccaaaaacgactcatcttcttcatctcaattctcacacgtgctctatcgcctaacacgtgagtgggtcgaagaagccggcgatgaagtagtggaagatgacggtaaactccctacatttccaactccaaaaaacaaatcagacaagaaattatcaatattctcaggggcatatctgaccaaagaatccgacccgcaaagactcattaacccgccccgatgtttctcgtaatacttccggtaaggcgtaactaacttcttagccaacgtgactttgatttcgtctctgagtttcgggtcgggtacgacccacgatgtttgtttacggtaagcttcttcgaaactgaagattaatttgtggaagattacattagcttgttctggcgtaagatcagccgttggatcttcgggtaaagcggtaaataccttgctccaacccacgcgctcgtaatttgacacgtattgtttcacctttgcttcgtgattggctacccaatcttcgccgagtagaaactttaggtttgagcttcggacctttacgacgacgtattggagattgttcgctagaaaaatgtaggagagagaaacgtctttgtagagctcggctttaccgtcgagtttgcagagaaggactagaatgagccaagcgaatctcacggagattgatgatgttccttctggatcggtatctaagcttccgaagtaagattcaggtaatggtgtgtgtactgataagggccaatcggcgacgatgtctgataagatctcgctgtaatcgccgaggaatgagatgtagttcatgacgtaacgagttagaggatggattccgcctgaggggactggagtctttgatgagtctttttgtattgctgattcgaaatctgtaagcatcgttcgtacggcttcgcctaatctgaggagtgagttcatcgcgagagatcggacggttgaggttgaatggtaggagaagattgaatcgatttctggccataaatcggagatggattggtacatatcgagagttcgaaacattttttccaatgattttttgcatttggctaccatttctgggaagccgaaaagcattgtggctccttctccgcaaatttcggaaaagcaggattctctgattgtttcggaagaggagaagacgtggtcggagagtattctctcgccgtagaataatgtcttaacggcgactttcacggcgttaagccagcttttgattttgatctccataacatcccaatccattttctggatctgagaaaatgtcattctctcaactccgagatggtataatccctcatccacaatagatttccgtaccatattgtaaaccttcacacactctttcgcgtagccagcagagatcatacaatccgcaatagatttcaaatccgtcatagccgccatggaaactcgctcaacttcagaaatcgactcagtcgtggctctcaactcgtcttccaactcatcctcgaaatccgagtagctcgaaattgtagaagcccgagacgagtgactcgaaaccgattccggatccaagtactgtcgattcgaagaaagaatctgataaaactctttctgcaatctcttcatagcagtttccatcagattctgagccttgatgagcttatcagaagcagaactctgagagataaaatggtgcatggccgactgtaaatccttaatggcgtgaaggtactgcctggcttcttgacggtcgccgttaaaaagagaaacggtctcgtttgattcccaactgtcgattagggactgagctatctcaatgttctcgtccatcaacgagtcgttaaaagtccggtgaggagaagaagttggagtagtaccaggcctagtccttaacggagaattggccggagatggtgatctagatctgaaaaacatgttaaaccctaagtttgagcttttggtatgtaataaagagatttgtgtttagagtgagagagaaatgaggttatttagttaagtgaggagtttgttttgaatttgagttttgagttatgagaggaggaaagggggtaaggggtatttatagagtgaatagggccgtggcagaaatttgaccggtaactatttgacctctgaagatttttttacgcgttattttttttagagacggagttaacgtccacgcttaaatggcctgtcgttttatccgagtgaacagtgaccactcaattagaacacaggaattattaattcacatgcaaaataaaaaagataaaatccaaaaacatcaaaataaaaataaaaataaaacggctacctttgtgaaatttcattgctgattctattaattaataaaatcgacacaacatatcgaatggagatatgaatatatgatgaaaatttaaaataggtttaatggcattcaaaaaaaaaataggtttaatttagatttttattccctcaactttttgacatatacaaaattatacttctgaatttttttaacaattaaaaattctttctgaactattgagattcttagatttaaggatttttgtccaattttattcataattcggtgattgtccatttactaaataatattctccaaactttaatattatgttctagaactttgacatgggtcaaatcatacattttgaactttcatttatgttagacttttcttactaaaattatataaaagttaaatacaataatcttaatagttcaggagaaatttttaacgatttttaaaatttaggggcatgattttgtatatgtcaaagtttacggttgtaaataaatacttaatttaaatgttagtggtaaaaatacccaagttatatttcgggaactttgtaagtatctgatcattaaatgttaagtcattatctacatgttattttcttattagtatttaatctattttcttaaaaaatataaaaatttaataacttgaactaatcaggaattaccacgtgacaatttacttaacacttaataggcagatacttatagaagctttaaaattataacgtaggtattattactgctaaaaattaaatttaagtatttatttacaactgagagttaaacttagatactgctaaaaattaaacttaagtatttatttacaactaaaagttaaactcaaatatttatactgtaaattacttaaagttagaatatgaagttattttttattgttgttgatccaatcatactttctactatagttaatatttgattattttaataatattttataatttaattttttttaatataaattaattttataaaataatgaaaagtaatagtgcttttaattaatatactatttaaaaaaaaatagcaaaaaaagtagggagctttttacatttaaagagctacctatccattctatattatagaaagacattttttgtatggttaaagtttattttttcaagtctcactttctattttagttaagtagtgtgtttagagagaatggttggagatactcttaccctacatctgtattattagagcatctccaataaagtaccaaaagatggtacattattatattttagcacactaagaaaaattattactctaattatgttttaaaaaatgtactaaatttatcacatgctaaaagttgtgctaaatttaatttattaacttgtaaagtaagtggatttaattatggaaccacacaagttaaattctatgttcatcctattatattataagtatttatatatatattcttcacttcatcaagtgtcttatttattgaacgaaaaaatctgagggtacaaaaatgcacattaataaaaaaaatacttgtaggtttagtttttttaaaatatatattttaaatttatctcttatctctttcttttattatatttttctctcaatttttttaaaaaataagtaaaaaattataataattaatttataatatatatactatttgaattatattgaaataaaaatataatcaaactagtacatattatggtaatgcaaaataaaataatagaaaaagtaaaattaaattaaatttagttattgtattttaaaagtgtatgatgtaagtgctcttatatatatggttttttaaatatatataaattatgaaacaaaatattataaaatagcgtgaagtaatagtttaaaaacaaataacaacctctcattattctcttacatcatgtgataatgtgatgtctatataataactgattattattattacatatataaatcatcattcataattttcatttacttttactttgattggtttgattggaatatatatattacttaacttacgtcaagtaagctagtttttatattattttactaagaaacaatacaacagcaaaagctgaatttgacttcatatatattagctatatataggcaaaagagtcaagcacataataatgtattatagctatatataggcataattattgatgcttttttatgaccagttctatcgcaatgaataatatcattacgtgtattttacattcgattaatccagcatttattttattatcatttagtcgttgttattatatatatagatagatcagtcaaattattataaatttcaatttgattctgttgagttttaaatatctttttgacaaattctcttaagaaaccgttctgtagtcgtgctcaattaatgtttgggagtatagtcatatatacttataattatatgactggtttatatatatatatatataaatatatatataccattctagctacaaaagacgaagtctatttttttttttagttgtatttaataatttaatagtatatatatatgattggaaaattggaaaaggaaaccttaattttaagcaaaagtactatatatcctacatataccatgtcctaccccttgtaattaggaattatcaacattttttttattactaatatatttatacatgatttattataacatgaaatgtaatgaatttctgaagaatgagacaaa

SEQ ID NO: 296044 - DNA, 2605 bp, Cannabis indica
ttttatgtaattttatccgataaaacctagaatgcatacaattatcagaaagtttcttacaaaaaattgagaaataaagaaaacaagcctttgaatttgaaagactattttcgtttcctgaagaaagatataaatctgattctaagagtttaagcagcaaacgattcttggtgaatggaagaaatttctggaaatgaaaagaaaaattgaaaaaaaaaataagagtaataaaaatgaaagagaaatgaaactctcatttttttacttgggacatttatagggatcgaagttccccattacgatcgtgacacgtggtgttggaaaaccacagttgcctcatcgaacgactgccacaagacaagcctgcacagaccccaaaagattttgatgatgtggcaccttggaaagataaacatcataattaccaaccgccatttcataaagctcaagaaggtaatcaaacgtcacccacgatgtggcaactcaactcgactgtcccaagaggtagtttctctgcgtgatagaaaattatcgtcgcaaaactaagggcatgtgttatagtacgatttttttgcctagaaatacgagtatagtcttatatttatatttgacacgtggactcagttcccagttggaaaatgataacgtttcaataacaactccatcagaactatcctcgcatgatcaaaacttgcaagaaggtgtgaccgatacaatatttagtcacacactatgtgcatcatagtctagaaaaaggaccaagagaagttatcataagtcgcacatatattagttatatgtgagggtcaaatgattttcccctgcatcccatgtaaagactgcatatttataagacatgcggtccaaatgattaatatacatgacaactcattttgaactcgcaagttctatgttgtcattatatgaaacatccaataggcgacccgtatagtcgcaagtattttaccttataaattaccttgagaggtttcaagtggtctaaagactttttatgcgagtaacactattgaacccgcaagttcatatgttactcgggaaagtgaatggtcaatatgcaacttctaaagtcacaaacgtttggatgttcattaagaacggttgaagttgttctctcatgtattctgtaaatatttgtgtcttaaataaatataattaatgttataacggtcctaactgaccgattatgtaattcaaatgatcacttactttttatataaaagagtaatccaactcgaaatgagaataatcacattcttataaaaatagactaagcagactaagctttaattgaaccactataattttgtgtctctctttatagacatatttttattctattattcgttattttattttgagtattcgccactttaagtgaatactcttagttttataagtgagtgttcttgtcatctcaaatactcgcaatttctaacgttgtctattttcctctgagaacacattgatttgaattcctactttttctattcttatttttgcacaaataaagttcatcccatttaaatgataaactagtaacatttttcaatattgtctttactttctctctttgtgtactttttttcttcttctttattttttattcttatctataatagttatataactattaatcaattaatttaattttacgagtatgtgcctctagactatttactagtatatataaaatatatttttaattctaaaattaacttaaaaagctctacccatcatgatcataaaatcctcaaataaaacttcaaaatttataacattctcactccaattttgactaatttagctaaaaatcatgttaattttgaaggatagttggttatagcattgttgggtttggtcgaaaatagttaagagtagaaatagatgatttaggcactttcttcactagatcccaagactacctgcctagaactcatcaaaaaatgaccttggtattagaactgccgaaacacaagagagagatctcgattgtcgtgttcgctctgtcacatcaagtggagcccacaccttcacgggccaattcttattaaaatatattgagaaaattcggtcaccgccagataggatgtgatgcgcatacgacatttgtttccaactttcttttaacaatacgacatgcgttttgacacgtaacaatcgtaacgtggatcacccacctacacctactattgtgtctacgacgtacggacccacgcggaaaacatggacgctgggtacggataatatatccctccagtgtttaaactgacgtggacaaaaataataattcgcttaaagactgattattttgcattgattggcttattattattattaagtttgctctaataaatgcttttttacttttttttttaaaaaaaaataaataaataaacaaatatacaaaagaaatttttacaccaaaaatacaaaataccaactttattacatatatacaaaaacacggttacatcaacatttttacattctttcttaattttattacacatataccactagcacatcaaatctatgcacctatcaaccatcaatcaactctgaatcacttccctttctttttttt

SEQ ID NO: 296045 - DNA, 2271 bp, Cannabis indica
cttcctgtacggaactatggactagtgtagccacacagagtgttttaggagtttttgttaggagggtgaagcatgtaaagatctttttcttctcttttgagtcttgtggcatgggagaattattaaatctcccctttttccttttgcttggccagagttattgttgacatgcttgcctccattattttggcctttcgagggctggccgcctatgctggcaagtgtgttaggcagaacttagggttgtccaccactcaagacctgtctagcacttgcatgtctcccacttggggcttgtcaaacaacttcttcaagcttgacaaagtcttctgcctgattaaggaaatcagccatgttttgagttgagtgttggtggatctccttccacaactcactcaaatgtagaataccactcatgatggttgtgtaccttcctccctacatcagattcttgaccttggtagcttcagtcgtgaatctttggagatagtctttcagaggttcccctggcctctgtttgacctccaataagtcttttagcctataaagcatttttctggaagacaaaaattgtgtgtagaattctcttgttaaagagttctacgaatcgaacctttcagccacaagtttgaaaaaccactgttgtgcagtttcaaacaaggtttctgggaagattcggcaaagggtatcagcctctacattttacaaatccatctagatttcaaactatatgatgtaagccgagggatcctttttccttgtgtacatcctccaagtacgcatcttgaacttggttggcaatgacagcacattgatgcgagtagagaaaggtggccctcgggtcctgtacaactctaagtcggaaaactttaggccagaaaggccttgtatcattttcttgagttaatccaattgtgcttgtactaaatgatcaacttcaacttgcgtttgcccaaccaagttttatcctgccagcccttgcccggccagctggctagtgggtggactggaagttggtcggctagccccctgttgggctgtctggtttggtttgttctgccatgtagtgttcaagggagagatgtattcgtcttgagcatttttttcttcagttcaaactagtctaaagatctaccctgacatgaaggctcattctagtaaacatagaatctctaggccttgggtcagaacgtgtttgaccatttcgaggtggaacgtcattgttgtgctcagaagattgagctttctggttagtgcactcaccacttaggtgactaatggcactattatcattaggaatagggtaagactcctaattatgagacctgctctggcctcgcattggtgggatgtcttcccccccccccccccatctttcttcgcctctaggtaggccttgaaattggtcagccctaccataaaattttttagtcaagatctgtccgttattgggctgataggatcgccttatttgggacacagttggccctcctggccttgaggcctccccgtgatcctttgggcattgacttccctttgggacatagcaaccttttcctcgacaaagatcccttacgagggagggctttttaacttgagatctaactctctcattgaacaacctgatcaggtcattagcctcccaatttcagcaatttagctccaactgttgggcttggaggatcgcgacttgtcattccatcctttcttggaatttgtgtctctactgggcaaaagcattactcatagcagcttgttggtcatggggcatgaggtttgtatgaccttgcactttccctacgaactctctcaccctaaaaagttcagtatcatcccctaagtcaatgctagggtcgccaaccccaggtccagtcttgccagcataaacacaaggtccaacccatgtgccgagaatttcagttgtgggctagtgggtccagcaggaacttgctcttagctggacctctgtggtggaagttctgggtagctagccgaaatgtggtggcgggctagccatgtttggatttgtcacgacaagtggcacttagacattaggatccacgaccataggctctcatggttcaatcaaatttccacatcttgtgatagccatgcaaaatatgagagctttctaaatgagaactctgggctctcaatgaaagcaccaaaatatttactgtggattttgttgggttttgtgccctaaataaaacccatttcaatataataagatttacttattaataaagatcagaaataacattttatgtt

SEQ ID NO: 296046 - DNA, 3857 bp, Cannabis indica
tttttttttgctatgttatcttcagttttagtgttgagataatttaaatttaccattatgtcaatctggcactgattttgtggcatttagagtttgcttgtttaatagactgttctatgaggcagttaagaacaatgttttccccttgtttgaaatgatcaggtttgtaaatctcatggatggaagtatatgggttgatagtgatggtcttggcaaaggatgtacagctagtttcattgtcaaacttggatttcctgagcgaccttatgaaaccaagctgccttttgcgcctaaggtgcaaggcaatcacatccagaccaattttggagggctgaaagttctcgttatggatgataatgggttagtaatgttactatggttccaatttccattttcattttcttttccataaatttgttctgttttttggagtagtatgagtaaggtatttggagatgggattctggaatctagcatctgaaatttgattatacatagtcatttcctcctttatatcatcatttcagtttgccccttgatgcaaatttaagtggccaccttcttgtttatgtgatgatcataacattcagagtatcaattgcataaacttttattctaaaatgtgaactcttgggagtgttttgacctactaattaaagtgtcataggtgaacttcaatggtggtgttagaatgtagaagtgtggttagaaagtagagtgaggtgtatgataagaaacatgaggtttcatctcaaaacaacatctgatgagtggaatagcccatatatcttataaacggtattaagtttccacacattatcaatgtgagactctttaacatcactccttaagacagtgactatttttgctcaccaatggcttgatcacaattggtttttggtttactatcacctaatcacatgtctcttttattttgtattggtttttggatttggattggatactcgttatagtgttctttgattcatgatatcctattaaaatgtggaagtgtagtttagaaagtagggtgaggtgttcgataagaagtataatattctatctccaaatcaattggtgatgggtggagtaatccataatcttataaatggtattaagttgataacgtgagactttccacctattaaatgatatttttcctaagactaccaggggagactagaaatacgaagtaaaaacagaaaaaaaattcttaaccattagctactaagtgctactccattccatagttggtgggggaggggagtgattgggaaaagatcatctctaaactctcttgacaaaaaagctcaataaaacttaagaacttttctctagccacgttgctagaacttgtacacttccactgctaagtgctccagttcccaccctaaaatttacccaccgggaagagttagcctacacaaccttattacttcctaacctgcctgtgggtaagaaaccaaaccttgctagtagcacatacaccatgaaggaattaaggggttcaaacaaatgaaagtaagtaccttcatgtaacatttcaaagagaatgagatcctgcttcacaccataccatatcaacaagaagtacaataggaagttggaacaaccccatctgatattaacaaatggggaccaggtcactggacttactcgattaagattgagatgaattaattccccttgccaccaaaatgaagaattgaagataaccccattccaaacaataagatccctaataaactttccaaaataggttagccaaattttcagattgagatatggagtaaataaggactcaagaaatattgaataagtgtcagcctctctccttctacaattgaatgtgtcagcctctaaatccatttaatctaagtaaaacactttgaaagaattcacacacagccaccagctttcccaaaatcaggggagatctgctgcttactgctcacgaaaacatccgacctatactatagtcaagtccgcatatctttctgatctccctattttgcagaactgctcccttaattccaccataagagggttctcattcaatggaggctgctgtgaaccctcaacgaagagtagaaatgatgtgagaaacagtgtgattgattccatgataatctccacaaaatttctcttccctgagaaagcctttccccaaaaccaatacttatgaagcacttgtgtttgtccttgtaaaattctggctgacaattctatggtccgaccagaaccatctctcctatacctcactatgtaaagatcaccttcacataatactggcactccattagttttgcttgcgcagacatcataatgcaatgcaggtaacatttagcagtaatatggaattagaatggtaaaaaggtgggatttctgtacattttagctattttggctcttattgacacagacaaaaatgtgtctgaacagcttcttaaaatttatactttgtagctaccaagctttaatcccatgatagagttttggtaattggataaattctatgtttggtgtgattttatctaaaaagaaaaattatgctgatcttagtgtcatttttatgtgtactcatcattctagacagaaggctttcaggtgaagtttttccttcctcttaccttgttttgtcgtatcattggttggtgacttatttgtagtagttgctagctaacattcaaacatgtttttttttgtcttctgtaaaatcatacatgacttacgtaagatgaatgtttttccaatacagggtaggcaggtcagtgacgaaggggcttcttatccacctcggatgtgatgtaacaactgtgggatctagtgatgactgcatgcgtactgtttctctggaacacaaagtggtgttcatagatgttagcatggattgttatgaacttgccagccgcgtacgtgaaagatttggaaaacgccaggaaagaccactagtagtagcactaacggggaacacagacaaggcaacaaaagataactgcattagatttggtctggatggagtcattcttaaacctatttcagttgataaaatgaggaatgttcttgcagaattactagagcatcgagttttatttgaggcaatgtaagtgctacgaacatgtgactaataaatatagagggtcccaaagaggaaaacaaatccggccaactaaagataaagacgcaagcttgttggaaataattttttttagtcagtgtacatagcacatggcattgcagtaattcatggaagatggagtggtagcacaatatttcaacccttaaaaagggattttctttacctttgatatgtcttatagaaattattgaggaaacatccttttgctaaaggaaaactgtttggtatatgtaaaactctaattttccatgaatggtttcattttgatgaatacattaatggttgtgaacatgtcagaaggaatcattgaactttcagttttgatccttgactaacactacagtatatgttaagagttaagactagccatttttcttgcacagaagagaaagccgagacttacaagaaccagaataggaaaaatgggcggggagaagtgaaaatcctttggttttatttttacattatttaacgtaaatttttggtttaacaaatctttgttatttttttaagcagggattcatgagatattgggatcatagtattacgttgaaatttattgcctcattcatttataggtttgaaatgagtatcacttctatgtcaattgataatagttgttttgtttcttattaccttattctcactattgcattattctttgatatatttatataataacaaccaataaaaataaaaatatatatatcatactaat

SEQ ID NO: 296047 - DNA, 3491 bp, Cannabis indica
aaaatttcaaaaatactgttttttataaaacatcagtagaacacaaaacagaacaactcaaaacaacattagaacaactaaaaaacacaggtagaacactagtgaaaacttaacacaatatactgtagtatgaaacttataaaaaaaatacagtaaaaaagtaaaaaatactgcctgtcagtatttttgtaaaaaaagagcaaaaattagtataccatgtaaattttctaaatttaattcgccttcggctcatatattctcagggctagccctggtcctaagatcacttataacaacttctctaaaaataaagaagttttaaaaaaattaaaaaaaactgtactaaaaacatggtacaaaagatattctaaactccttcatttttatgtttatttaaaatacattattcatgttctacatttatagaataaatattccttgttttaaaattattttattgattgttttgagtttttataattattttttatggagatatatgtatatattaatgttatatatttaaaatgaataaaatataataattttttttgaaaataggcaagatgggttgtaaaccgttagattttgtaaattttggatggatcactctagttttaaagatactgtgatggccaactggagtaaaaggttgttgggtaaaaaccttagcaaaatcatgggcaaacttagtagactgaaacactaccttaagggctttagtaggaagaaatttggtgattttgctcgaaactatcaactggccaaagatgattacattactgcccaaatttgtattgctagtagtcctatagatatcgcattttatgttgaagagcaagcctctaaggagctgtttgcaaccacccataaaagatatgccaactatatgcaacaacttagtaaaatcatttggcttcattatggtgatgacaattccaagttcttttatgctagtatcaataagagaaaggaagctaatcgcataaccacctatatggttgatggtgtggtaattgaggattaagatagaattttatgggggctgaaagttcagctttaagtagattaattgagggatgtttggataatggacatatgttttctttacaacaacaaatccaaattatcagacccttttcgaaaaaagaagttaaggatgctatgttcagtattaaccaatttaaaagtctgggaccagacggttttggtgctgggtttttcaaggggctttgatctgagataggagacaaaatttcagaagcaattctttccttttttgagactgatttaatatcaaagaatctgaaaagaaccaccatttctctgattcctaaatcaaacaaccctactttagttgtggactacaggctcattgcttgttgcaatactctttataagtgtatttccaagttgatgtgttcaatattaggtgagatcttaccctctctagtacatagcaattaagaaatgtttatcaagaaaagattgattgctcacagtatcctaattttccaagattcgctcaaaggttacaccaggaaaaacgtgtcttctcggtgcttgatgaagatagatcttagcaagacatacaatacggttgattggcaattcatctcagacttaatggcttgtgcttcccagccaagttcattaagtggattctggtttgcctttgtgatacttcttatactttgatgatgaatggtagattgcatggctcttttaaagaaaagaaaggtcttcgtcaaggagaccccattttcctcattctttttgtgcttgttatggagtacctcacctgactactttctatttcctcaggaactaatggcttcgggtttcacccaatgtgtaagcagttgaagctcattaatctctattttgcaaatgatttagttattttttgcaagggtaatgcttcctcacttaccatactaaatgaagcattagttgagttttgcaaagccatggggttagctgctattagagctaaatcctccatatattttgggggcatttcggttgagcttaaaaagtgcctgttatatattgttgatatggaggaaggatcattccttttgaagtacttcggggttaaattgtatcctaccaaatagaaataggctgagtgtgttgtcataattgaaaaagttcaaaaacaccttcatggttggagtagtagacacctttcttttgctggtagagcttagtttgttcatacaatattattgggaatcggaaattattggatgagcttattcatccttcttcaaaaagtcactaaggaagttgacaagctttgcagagattttctttagggtatctctgacaaccgaagtaaattacactttgcttcatggaagaaagtgtgtttgctaatggattatggaggcattgggttccgagaagggaaaaaatagaatatagctctaatggtcaaatacattcgggtcatatccatgaaacatgataacctttgagttcgatgggttaatgcaatttatatgaagaatgaagattttgggactttcaacccagagcaaaatactagccggtactttcataaacttgttaatctgcgtgacaagattgataggcatgttgtttttgaggcaggaaagactggtgtttttaaagttaaacacttttatcagtctctattaatagattcaaagatctcttttcataaagagatttggcacaaacttaaagtcccaaagcatagatttattttgtggcaggtcgtgccttcaaaccttttaactcgagatcttttagccagattcattcatcttgattctctcttatgtcctgtttgtgaaagtgatcttgagtctcatggtcacctcttctttgcttgccccttcactaagagtgttatccttgaggtcatcaagtggctgagtcagtttgattggtctcctaatcttgaggattggctgattgggttgaaaggtagtagaaataacgtggttgttaacattaaatcagcagtagtagttgcgatcacctacatagtgtggtgcaataagaataattatgcttttgagagatattgtgaacctgctacggtcctaagcaagaagatcaagtagagcattaaagctagagtgatttatcttaatcttactaaacttaaaaataatgaaaaagatgtaattaacttgataaacaatttttcatttgtatgttggggcttgtcctccttttggttttgaatttgcttggttggtggaataaaattcatttatcttattctaaaaaaaattattaaatatatatatttttctatattacacatatttggtatttttctcaaagtcatgcatttttaaaaaattaaaaggccccaactagcaagcaaccaatcacgttcaatataatatgtgctaattttattatttatttacctattttagaaaaagtagaagacaaaacctatttcaatagggaaatttgattttctatacttagaaaatcaaaaattt

SEQ ID NO: 296048 - DNA, 3219 bp, Cannabis indica
ctacaacaaaacaaaatgcaataaggaaactaagaagatatgagagcaaattctaaaaagagacaaaaaaacaattttactaacttttacaactcttctacaaatgagatttatcaaatattgtattggtataggactctaacaattttacaaaggaagcttaccaaatttctaccaagaatatagtatggttgcatgatcgtcttgaaaaatgggtgttcagatgtgaaatcattagtcctctgaaaagcaacaatcttttcactgtgagtcaatgatttcatagttttacgaatcccatttgtcatcttttttgtgggataagtagcaaatctatctccattgctcttagaaggtgaatcaagttttcctgtgtaatatgaaacaaatataatataatatcataacataaattgttctattaagatctcaataaattgtaataagagtggctgcttcacaagcctcctagcctagaattctctgagctccttcattgaatcatttaattctcaactacttttgtactataatgaatctacaactttcaaacaagatagtttgcttgagttttacctggaggatttgttttcattctcttaaaaggctgagaacatgaagattttactcctgttttggggcaagaagagatatcatacaagatttcaaagctgtcaacattatcaataacttccctcttgggaactcggagttcgccattgtcaatgttagacttaaaaaaattaacaggggcagggggataatctatttctacattatttgtaccaaatatgataacataaatctcagaattcccatcatatctaaaagttagcatatagcctctttctatggaataatgcttcacaaattctggccaaccttcttctaaccaataattttccttataattttctaacttcattttccatttggaaccacatggaagcttaacaaacactgattcagtaaaagcttctccacattttttcacaaaagatggtggaacccgctgcaaagaaaatagaactttcttaaataaacagcattgattttctgaattgatctttactaccaagataaataagcactatcatgtcaatccatcacaaacaacaacaaaatttcctctgcacaatattcacaatcctaaatatttcatgaaagaaaaagtaaattttttgaaaaatttgattgtacaaataacaaacattattcagctacttaaactatactaagttgtagtattagtattgtttaataatgctcagtcaaagattcatcactctagctgtagtatcatatatatatacataatatatatgtatggattatgagaaagaaatagaatgagatgcagcaatgcaatataaaagcttacaagtttgttgtcattaagagtgtgttccaaaataatcttgaaaaactgaggattcttagaagaaagcatctttgagctccaaaatcaaaagctttggcttgaggctcttatatcatgatatatacgagaataataatctaaatggtgatggtgaccggattcttcaacttgaactgtgaaccctaattacttccccctttttcctttagatttaatgataaaaattaacacaacacaaccctttgtgcatatttacatgatttatattagtgtagttggtcaatttgcagggtcaaaaagatgctttatatttttggtgaaaaagagaactgaagaaaagaaaccattaaattaaataatgtatatatgtatagggaaaagagctccataacgctttttcttcaaaaaaaaaataataaaagagctccataacgctttttcttcaagaaaaaaaaaaacagaaaagagctccatttgcccaatagagtttaagtttaaggatttgcattgaagttgctgctaaaaataaagctacattgagacttggagagggaattggtagttttttggcactacatagtacatacaataatacactcatatgaccttggtccttgagctttatttcttgttctaaagcaattggtacttattcatcactttctctactcaacatcaaaacccaactttctttttttagagtatctcccattgagtattataaataaagatggtatacatgtatttttgaacctgtatttataaaaatgaattccaataataacatataaaagtcgatccttaattgcataaataatgatattaaacatttgaaggtgataaataactttggaaaaggatttgaccattaaatagcaccaatagccaataggaatatctttaattgtagcattctttaaatatgctaaaatctttcatattatttaaaaatataatattttattttatcactcttttacattattttttatacggttatttttaaaaacactccaataatataaaactcttcaaaaatactattctaaaaaataagtccacaatccatactgcacatagtaactaatacaaatacaattctttcaagaaaaaaactaatacaaatacaagtgctttctattagaaaataaggagtggctaagagaaaactgcaagtcaaattgaaaggacctcatgcttcaacaaaaatctaaactttgtctttagattggacatatactaaatcatgtctctaaactttttgggttattaaaaattcttcctaaactttgaaaattgttagatttaaagatttctgtccaattctattcaattttactaatacaacgattttctatgtactaaattgtgcccccgaattttgttacctaccaaattgtcccccgaactttgatatgcactaaattgtgctttatgaactttattccatgtcagattttcgtttgtaaaattagacaaaaacccttaaatttaactatctcaataatataggagaaatttttgacggcttaaaaaattcagattcagagaacatgatttggtacatgtcaaagttttgagtggaaaataactaattagcaaaataaaataataatctatcttaaatactaaaattagcataccttatttcgtcaatatataggggcaggccaccaagctcatttcctttttaaggtactatcacatataaagaaagaaagaaaaaagaaaaaactgcactgcagagttgcatatggcttgattgagctaaggtgaggcttgcaggtatcccaattcttattaaaatggcccataatcaaagctatacataacaaagg

SEQ ID NO: 296049 - DNA, 2479 bp, Cannabis indica
ttttacaaaaaaaaaaaaaaggttgggaaaccaccaccaccaaaaacatccatgagcaagtatatcacgaaacaaaaccaaagtgattcaattactgaataaagacttgaacaccaaaaaaaaaacctacaataaactcaacaaacccatatacgagcgaaagagatactccctgatatccttacaatatattattcagtatatcaaaatatattacatgtatatgtcaaggcttgatacaataacacaaatagtgcaagaaactaatttgccaattcaaggatcagttcttttaagtacaacctatataaggatatggaaatgtgctattaataatttaacatctacaaacactactaaaattatgagggcaatttgttagtaataatattaattaaatacaagagagataaaagagactttacttgagaatttgcataattaacaccttgcgagaaggagccttgatgtgcaatctgaaagattaacaataagccatatcaagtacatgacaaccttccattctataaagcaccttaatccctactaataaaatttggaagcaagaaaaaaaaaacgaagcactttggcagcaaaaaaaaaaattaagaacctgagcatttggactagggtgaatatctttcttactagacgtggatgaatctccaccttttgctgaacccttagtgtcaccctgtcagatataacagttaaatacgaaataataaactccaaaacatatcaagacagaaaaaaagttgaaaacgttgtaactgaatatgaacagttttacttacctccatctgcaacatcccacatgtgaacccaaaagcaatcaaacaagacaaacaggagaaaggagcaagttagtttaagcttaaggaaaaaaaaaccttaaaatcaaaattaaactgcacgtcataatgagaaagaacgaaaaaaaaatcccagaaccaaaaagataataataataataataatatgagcaatagcaataaactagcttgtaaagaaaagcctctatccaaataaagctacataacattttatcataattcataaacgctaaagcgtggagaaattgaaggtaaaaacgtaaaaagatttcagctttcataaacaaaaagatcaaaatcacccaaaattgttaacgataatgataataataaacatacctctctgtatctggtcaaataaatcttaagtggatcaatatagtcttcaaaccctaaagtcgccatagcccaaagcaagtcatccccattaattgtcttcctcttttctctctggcatttatcactagccctgaaccattattcaatccaaaataaaacaaacaaaagaaaaatcgtaaataagccaaatttaaaacagaaaataccgatgtttataaaaccataatccattcaatttcagtttacatactcgctagtgataaagctgatgaactcggagacgcactcctgtacggtctccttggcatccttagcgatttttccattagccggaagagccttcttcatgatccgactaatattagcaatcggaagatatcgatcctgctcacgaacattagaacgcgggctctgatcaccaccgctctcgtgactccctccacctggactcgccggagcttcagccatcgctgcaaacccgaaaccctaaaccaacaacacagcacaccaccaaccccaaccacgaaaaagtacagcaacaacaacaacaaaatcagaaccgaaaccagaaaccctagctctgccataattaagaaataagagaaatgaaacatgaatatacacataaatatatgtatacaaatggagagagagagaaagaaaaagaaacaatggtattatatgtaaatatagtgaaaccaaccggtagagtagttgggatttgtaaaattgggcgcgagagaaggagaggctttagatcgggtgagaatggaggaagatcggacgctggagaaggaatgaggtaggagacgactgagattagagacagtgctttatcaacaccgttcgttttttcctttttcttttttcatttttcatacaataagtaataataattttatttaataaataaatagtttccattttttaatcatgttccttctttctctgttgttctgcgtttgctctttcctctctccgttgtctcagtctcatttgcccacgtgttacaattctttcctctgttacggcgtcgtttgagattatttggctgaacgaaaatattttctttatacgtcattattagaatttttggccaaaaatcttcttaactcgtttcactttagtaataaaaatctctaaactactgagttagtaagaaatttaaagtgtcatccagtttaactgttactataaactatttatgcatacactcttgtacacatgacacgtttatattagtacacataatattattattttcaatattcattttaaatcaaataaaattataaaaaataaaa

SEQ ID NO: 296050 - DNA, 8613 bp, Cannabis indica
tgcatatatactcttattgattgtttgatttgttagtttagagaatttgagttagggtggagattgttggagtattgactcaaattaattttgtttttatatttgtaaagttgtaattttttggtaatattaattgtgtttgaaggagattcttggtagtcatgtttagggtaatcttggtgaccaagtttaaagtgtcttggtgcctaagtttattttcctatgtatatgtatattttgtgtgtgagaggaatagtgagttgttaaagtgatgaaagtgaaaaagaaacaaagtgtgtattatcaaatgcgaattgctaaaaagcactatcggtgcctaatatcctcctccgtatcatactactatttgtgtaattaagtatcgagtcacatataaaaatatcgctaaccaatcgtaagggtgttacctatagaaggtgctaggtactactcagggcggccctaagaataaatgggcgtgaggcaaattaaattttgaaaccttatatataaaaaaatattgagaaaaagtgttatgagattcaaactcatgatgttgtataatatgttatatacttcaactaattaaattatgaatatttgttgtttatagaatacttaattttacttaaataaaagtctaataaaactttttattttttattttgtagcagcgtaactctaagcaccagtttagcctatttatacctaaatccaaccctaacactactagtgtggaataaaactaaaattactttacttggattatttattatttattattttgctacgtttctcaacagtaactataataaatattgagaaaaaagttgtaatcagagtatgcagcagaggagttgacatggaagcattcacctttatcactcaataaaacgtaatctgagtttgaaaagagggtttgtgtccttttctccgggttttactagtggggatgcaacttttctctctcattatatttatgccctgctcagtgcccaccatcaatacgcacaacttacaacttaagggaatcaagtcaaaattgaagtaggtgtgtgcaggacccacatcttacacaatgcattgtatattgcttatttttaattacttcattcacaatgtcagattgttaatgatgttttctatatactattttatttcatagggttttactttggtaccacccaattcacttgcacttgcatcttcctcacttaaacttaactacttttttaaaatttgaaataaaaatctttttcaaatgaatgtattctcatcccaaaaaatctgctagtattttttttcaaaatatgaagaaaaataatcttgttttaataatggataagtttaataacaaatttgactggacaagtgtacactaataattgggcatatctagcttatggtgggtcggtctgtacctgagttgacctcagagctttatttatattaaaataatttgttgttttcttttctggttttgaatgattaataacagggaaaataaaagattgtattgtcaaattccaatacattctccaacattgaacggccgtaaacactctcatggtggaattttagggaactctgctctaccgttggtttattgtcccttgtgggttttcacagataaacctcagtttgttactcaactcacttttaattccattaaaaattccgatttgatattttaagcaatattcaataatggagtacctgtaaaaggatctttctgctcttttgttcttaggttatttaaggccattctttttgtgggtcattttggtcttgccttttgcgtggagggttttagccattagaagaaataatgttgacctccaaagagttttggactaagaagacattgataggtcttgggctggggcaatttctctcccttttgatcacttccactggcttctcatcttcggaactctctaaaaaggtttttttttttcctttttgtctcggttgttttttaaacctttctacttcattctctctgatcattgtagtgagtcgtttctgaagaacatagtagtaatgcgatattcaacagatttctatctctcaaaattttgttgttaaaaatagaaaaacatttggaattggttaattatagaattggtgcactggatacatgattgattttttgagagtagtaacttttgtggtcttcttttcacacacttgagaatttgattactagaaaataatatcttttaagtcattattgatgaatttatatgtgaaacttgggtataggcttatatgattcacgttcatatgtctcactttttgtgttacctctgttttgagttctttgagaaccactcaaagcaaataaagaaaattataatattactgtgtttagccttgaaattttttctttggaatattcaaaaatttcacttgtttgatcaaatgaacaaggaaatattatattgagaaattgtttgaatttattatctgctctctctcttttgtaggaatcgatgcaccaacttcgcagtcatttctaaattatgtgctcttggcgattgtatacggaagcatcatgctctatcgaaggcaaccacttaaggttgtttcttgcatccactagctgctttaccttgctcttttttgttttcgataaatttaatcgcaccaaacacagcatttatccaataaccaggcttggtggctgctttaggtattcttgaatataaatggttaagtttgattgcagtttctacatttgacagattttaatttctttcaaatataacatgaaccctttcttatcatgacaataacttagttgagtggatgaagacctagtgattatgacaaatttagatgatatcctgtaaaagtgaataattaaagacctcttaagtaacctactaaattatggttcgctatcaaaggaaaagttttttgttccatgatgcttcagcaatcacattaattgaataaagaaaagaaaaagtttgctgattctattggattggtaatttatgacttgatatgtgcaattaaagtgacagtcttcttttgaaagatgattcaaaatgatcgtgtatagtgtctttaattggatcatgtaaaaagttgagacatattacaactataggcataaagtacttcttacttgttcatacacttgacagttgcattcgtgtttatgtcaattgtaaccatgactttggaggtgatccattttttctatcaatcttatgttatgggacaacttttgtgatagaaggaaccgatgaaactaagttaaatcttagtttagtctctcagggtatctgctctctgaatagcttgagtggtcacccctatgtttttctctcacaaatttttgggttcatattctcaagggaacctacctagcatgatgtcagctcccatatatacacgcacacatgcacgaagatacatatctctgtacatataaatatgtatatttatttacagcacagaatacaaatagttgtctaccttttgttttcatttattatctttgctgtatattaaatgtcatataaccattctatattaccttttcattatgtgcagtcaaaatggtattattatttacttcttggattggtagacgttgaggccaattttctaggtgagtaaacttgaatttctgtcctagcatgtcctacagctacttttttttttcttctcatttatatgttttggaatatgtgtgggtctgcaatacatttatgatgtactgcacatactaaaactgaatcacccaacttaaatgattgaagtcaaataaatatttttcccatttgattttcttttcctttatgtgcatcatacattgcatcctctcagtatttcattgtaaagtatgagactatgctttctgctttaaaatataatgtgcttaagcgatgttttctagcacaccaaccaacttgatccttttcttggttgtaacatgtaactgcaattgtttactttttaaaagagctactaaccactaaacaagtatgaaacctatttataattctctcttaccaaggatagagttgtgtttgctatattgtctttctctttgcacccttgaaatgtatttttattcattatgatgtcatggtaatatgaagacctgatttactttcatttgatgtgcagtggtcaaggcttatcagtatacagctattacaagtgtaatgttgctcgattgttggtctattccatctgtaatgcttctcacgtggattttcttgaaaacaaaatatagatatagaaagataactggtgtggttgtctgtattgctggccttgttactgttgtattttcagatgtacatgcaggtgatagagcaggtaaatttttttttgttgctaactgtattcttcatgttcatttttgaattatttaatctgtttatttccgaagtactgcaaaaatctcattggttaaagtaaaatctatgagcagtagtccaagttacttagtggttttaccctgttcattacatgagaacaaacacaatattgaggcatagtaaaaataacatgtttattaactatctattctatttataatgttcatatttccaaacacatacgtctttcttttgtcaaattcactgtttttgcttttaggtggaagcaacccacgtaaaggggatgtgcttgttatagctggtgccacactctatgctgtcagtaatgtcagtgaggtaagtggttttacctcatgtatggctattgggtgttttgttaatttaccgctttttttgtgttaccaaaaaggaacatgttgtagtgatagtgcacatggtatagagaaatttttaattactcgtaaaagaattatgggaattgtagtgataccgaaaaaacaaacatcggtttgaatgcacttgactgaccgatttcttcatctaagagtaacaaataacttatgctgtattttccaccccctatttctttttatgttgtgcttttcgatatgcttcccacaaaatatatatatatatgtattcatttaaatactaatctttgtattcattacaaatttttgtgatctgactaatttcatcaggtgtagaattctctttcatattttaaaatataagttttgttaacaatttcaagaatatttggttaatagttttcttttattcaaggtgatttatagaacatgttcttagtagttaattcttgatttttatatgtttgcaggagttttttgtaaagactgctgacagaattgagctcatgtcaatgctgggcctctttggtgccattatcagtgctatacaagtgtatccttaagtcatactttcaatgtgattttttttgctgcatctagagaattatgatccttttaatacagtaagattgtttattaattgttccaatggaggtgatagagaaatagggattttacagtaagagagaatgctataagttgtaagagattccaagagggatagaaatacatcttcaattgttgaacatgaaaacggacatacatagttcatagataagctcttaccttgtaaaccctgatcaaatagattataggagataatcattttggttgttgatgatatctgtatgatctcctttgaccatggattgtgtcaacttcaaatcaaaaaccctatgaatccttgatgtcattagaaaaaatgcagtataaatattgtatctaatatgatatatgattctattatcaagtatagcccttaatgatttgcacagaagcatcttagagcgggacaatcttaaatctattcattggtcagctggggctgtaagtgagaaataaaacattgttctttgtatttagttgcatgagttttgtatcttttcttttctttttaatgaagttgatgatgctgttaatttcaggctcttccttttgttggattctcagtggctatgtttctcttttactcattagtaccaatcttgcttaaggtatgtttcaaacccaaaacctgatttcaacacaataattctgaaagaatatgttgcttatcgttattgataataaattcaaactattgtttgagcattggttgatctatgttaggatcccacattgactaactgtgggattggttggtggtttataactatttgggcaccctcctctctaaggctaatcttttgggagttagttctatccaagtagctgtaacaatctaattgatatagtctaagcaactttggaaaaattcttctgtttatttattagtgaaaactgtatgtgttgcagacaaatgggtctacgatgcttaacctgtctttgctgacatcggacatgtgggctgtcataattcgcatcttcgcgtaccatgagaaggtttgtgatctgttaaaattggttccttatttattttcttcatttggtaataaccttctttaacattatgaattataaaactttggtattattctgtgtaattacataggttgattggatgtacttcttggcgtttgctgctgtttctgttgggcttattatctactcagggtaagttcttattacttgtgatagagttcctacacacacaacaggaacaaccccataaaacaagaaaagaatcagccactataatactctaatcaaaactcatacaagtaaatccgtgggtgttcgagagactcctaactctcccctaaactgggttccttgatctgctattttggcttaaccgtcaacttgaacaaacgatgatcattgataatgcttatctaatgtaccaatgcatcatagttgcaataatggcattgccatgtgcttgcttcgccacttttgctttctgattcaacacttttcatctgctcaatgttttggcctttcctttcaaacatcttgactaatgcttatgatcatcatctgtgatttggattttttctgcagcggtgacaaagaagagaatcctcatgctggtgttgcagatgaggaagcaggttccggaagctgcaactatggaacaatggaagggagcctgaaaacaggtgagacttctaatagctttctagagagagttggagagaaggacaacaaactagttcagcacgatccttacagaacaccaattgctgcatcatgattagaagttttatcatgacttatgagtaattcatttttttttaacccattcttctagttgtatttattgtgaactcaaatatctataattatatcacaatctattcaatggaaggtgcttagggggctgagaaatgttttcagcattgatatttcttcgtagccaaaatctgagaagttcctattagaaaatgtcctatttttatatatgtgcaattttcttgcgaaatttggcagctaaaacatacatcctaatggaaagaaaatatcttcagccattatggttatgatttaactgagataattgataataatgagaaaaactcacttgaaattacatgttatcctttctgttcttaacttgaaagctcttgattaaattttttcaaaaaaaatgttattatctgtgttttattaatatgaacacgcactcgagttgaggagccccacttcaaaccagattcaagatgatggttcagagattaatgatactcaggagaagattagttgcagtcatgtgaaagatttacttacggagataattgataatagggaaaagttcactttttacgattctttctagatcgattcgagtaggaccaattcaagaggaaggtttgcagatcaagactaattgggctgaagattttgagaaggaagatttcataactcagctcaagaaaaatgggcaaagttttgaggaaaatagcaaattagtgttgatctgaagctgcactatgcagaacctatggtgaaagagggtaagagagttgctcaattggacctggaagaggtgaaagaacaagcttagaatcagaatacaatagtgatttgtatgttcctaggggcaaaacccctcatttgtagtttttgaagggtttgtcaagagaatttggggtcatttagggatcgatcgtgtggttcgtatgcatatggggttgaaaatagtaaaatttaacgatgaagctacaagggacctggtttgacgcaagatattgatgctataatgttagtcaaatctgtctctttgtggatttgattacctaatttaggcttacaatattagggacaattttttgagtgctattgtgagtacaattggaaagcttataatggttgataaattcaccaaagagaggtctatgattagatatgcccgagttttagtagaaatgaaaatttcgaatgatcctcctttcataatctattttgagaacgagaggggcaaattcaagatcaatttgttgaatatgagtggctcccgatcaaatgtggtaactgttgtggttatggtcacaatatggcgcaatgtaggaaaaatggaattaagggatgagtggaaaaagctcagactagcaaggccaatcctaattgatttgcaaaaaactgtaagaacaaatgaaggggctaaagtgactaatttgaagaaggatgagaaaattgatgttgcagtgacctctgctggcgaagctatgcatcaattgttggaaatattttactgggatctagatttactaccatgt

SEQ ID NO: 296051 - DNA, 2594 bp, Cannabis indica
agagagagagagagaatgagttaacaaaccaactaactttgttgcctcaaaatataagtggttgatgtggcacctgtgttagtcagctaatttcccaacaattctacctgaattaattcagtaaaaagattaaaaatggtgtacaacaagactcaatagtcttaaaagcttaacaggttcaatcaatgaccaaacttgtctttgcaaacacttttggtaaacacatctatagggttgtcatgagttcaaatcttcctaacttgtacctattttgagagcaccacgtctcggataaaatgtagtctggtatgaatgtgcttggatctctcatgaaacaatagagttttcatgtgatgcaagacactttgattatcacagtgaacagtaatgtctttagagttgaaccccaattcactagtaaatttttttagccatagtgtctccttgatggattcagttgcaaccatatatttagcttcagtggatgataagccactactttctataggtttgattatcaacttactcaacctcttaggataatgaagatataccttgtacaacttttccttgtgttaatatttgctgcaaaaatctgagtcaacacagccagtcacttcttccttgtattgaatatcattgttgaataatagacctgtggttagagttccctttatatacctcatgatccactttaaggcttcctagtgttcagatcctagatctgagatatatttgttaattacactcatggcatgtgctagattaggtctagtgcataccatggggtcatcaagctccctacacagcttgcataggtaccttgttgcattagtggttggggattgagattcataaagtttgaaatgttgtgcaagaggcgtagagattgccttgcatttgttcatgccaaaatttttcaacaacttctgtaagtaacctgtctaagacggagttattgtgtttggccttggtctttctatgtcaatacctaagattctcttagcagcccctacatccttcatttcaaactcatcactgagtatcctctttgattcatctatttttgatctatcttttccaatgatcaaatgtcttccacatacaacaacaagttaatgtgatcattaaaatagacacatgaatcatacttacttttgtttaaaccaattttgatcatgagagaatcaaatctcaagttcaattgccttggagcttgtttgacactatacaataaggaaattcattggatgagttggaaaaatcttagtaagtctaaggataatggtgggatgggattctgaaatttcagagatttcaaatattcactgttagctaagcaaggatggcgtttgttgctctttgataaaagtttagttagtcaagttttcaaggctcgttatctctgctacaactgtttttagcacctaatttgaagatagtctgtgtgtgtggaagaaggaagaccaattagttgctgccatgttatgtgagtctctttggaaacacatgaataatctagtttggaactctaaacttccctccattgatggtgtagtgtagttggcttcttttagctttgaaaatcaaaataatgcttaaactcagtccctaaattctccataggtcctgaatcaaggtgagagagtagatgagtattggactaaatcggctttccccacaatcaaagttaattttgatggtgctatttttgtttatgaaggttgctttggttttggtatggtggctagaaattattttgggatggtgattgaagctaaacagtgttttcgtgaggggagttggcctcctttgatggttgaagttatggggctcaaagaagttttaagttggatcaagaaaaagaattagtcttaggtggtggtggagcttgattgccttactcttgtgaatgatctaattaagtagaggttgatcgtgttcttagtggggactctttacctactttttattcatttattgttgtgggtgatttaatttaatgaagataaatttgattaaaaaatatatataatattatttttattttttttttaacaatattaatatttattattatttcaataataatatttagcattaaaaaataatattcccttagtttctttttggcgtctattcttgcataaataatctgattgaaagtttctaaatttaatttaattataaacaatgttataaatattcataaaaatattttaataacctcttttaaaagaaaattgtaataaataaaattatttatggtttacaatcaaaattacggaggattgaaaaaaaatgaataaatctttaaagtttatttattttcttattattttatattaaatattcaccaaatttaaaataatcttttctagtttcatcactgctcctcgtcctcggatacttatactcaattttccagtgatcataatttttttatagttatcatatataatatataattacataattacacagtcaaatttaataattatctcaaattacattaaaattcaatcacacctgatttccaaatgcaccattaaatgattttttttttttgaggaaaaaaacttgttattataaat

SEQ ID NO: 296052 - DNA, 5712 bp, Cannabis indica
tttttttttttttgaatttgttaatgcttgtgtgagaatagtttggtgattcttgtaattttgttacttgtgaaatttattgctgttattgaacagggttttggttttaaagtgcttccatttatttgaaatggcttcttctgctctcatatctgacatggaggcctggaaggaattgaaggtaatagagataacatagtaacacataacatttaaaatccatacatgattccaaatatgtgtcgttttgcttttccaggctcatgttgaggacattaagaagacccatttgcgtgatttgatgaatgatgctcagcggtgccagtcaatgatggtgtatgataaacctttataagctttggaagtgtttagactattttttttgtttgtcaatatttaacttactgatatgtgtataactggacttttctacagcgagtttgatgggttgctattggactactcacggcagaatgccacacttgcaaccattgaaaagctctttaaattagcagaggtagcttctgttcttcccttctgttttcttagaccgtccttgctgctatgtttcatgtagtagcttatctgagtgttggtattgacattgcagacagcaaatctcaaacagaagattaatcaaatgtttggtggggaacatgtaagttcaagttcatcttttaactaaatgaattaattaaatatagggtttacttgttttaagattgtgtttaataacttcactgtgcttattagaaagcaagaattcattgatagttttgatgcattcagtgtcaatttggcatttcatcattggtgccctctagtttatgaaataacacagaatatccatttgatgatttttattttttaaacgaagttgtttcttttttgatattgtttgattattttctgttctctttagataaatagcacagagaatagatcggttctccatgttgctcttcgtgctcctagagacactgtaattcagagtgatgggaagaatgtggtcccagatgtttggaaagttctggacaagattcaggagttttctgagagggtccgcagtggttcctgggtagtgcacctcagcgttttagtctcgtttttttggatgttatgcttcaattttctaataatagacaattttgttaggttggagctactggattgccacttaaagatgttgtagctgttggtattggtggcagcttcttaggtcctttatttgtgcataccgctcttcaaacaggttaaaaatcacatttattgtattgagctgcattcctttgtgttctttatttttattttaatgaagactattaagcttaacacatgctctattggtttactcgtgatattgtacagatccagaggccatgaactcagcaagcggtcgccaactgcgtttgtgagtacttgtgcatttttaagtcgagtagatatttactttagtttcactttttaccaatttagatcttaatttcctttttatctggattaacttggttggacaaaagtgttgtgtccaattttttcatcaatgattaatgtgtgagagagatagacatgtaaaacttgaatatatatctgaagcacatgtgtaaagatattgtaggattccttttcaaagaaacttttatgttgaaattttgacatttatatttttcttcattaaaaacattaataacattttatgaagctcatgtaccctcttattatatacaaagtcagcttaatctattttttctttccatctacagtcttgcaaatgttgatccaattgatgttgctagaaatatcacaggattaaaccctgaaactactcttggtaaatgatatatttacacttttatattatctttctaattgctaaccttgagcaaaaataatttctattgttgtaacataacgttgagattgttctctggtattttcagttgtggtagtttcaaaaacttttactacagctgaaaccatgcttaatgctcgaactcttagggaatggatttcagctgctctcgggtttgttcaatttaactgtagcttaaattcttcaactattctttgggaattctatggtgatctgtcgtatataattgaacgtatggatttggcttcaaagctgctgtaaaaagttgaccaaacatggaatggggaaattaagagtgaagactttttcccgtttcatgcgttattctttcactgaactaaaattttgtttgcttgtcaagtcgctttgcactttcagcttgaaatttattgtcaaaatggcagaaagatgctttaatttctctctcacgattgcatactatttttcaggccttctgctgttgctaagcatatggtagcagtcagcacaaatcttgcggtacattactctattagtccttgtgtttaatgattaagcaccagttgagtcataagtacttaaatacttttctgtttcagcttgtagaaaaatttggtattgatcctaacaatgctttcgcattctgggactgggttggcggacgatatagtggtaagtggtttaccttttcttttcctttaagatgacctctcttttataattgattggtgcttcaactctggttgcagtttgcagtgccgttggggtgttgcctttgtcactccagtatggtttcccgattgttgagaagtacgtgttttataattgctacaattgcactgcatactcaaatttgtgactaataaatttacttgtgcttcatatgtcaattagtttagttggaacaattagcctgttttgcatctctagttactttcccctaggggaaaggcagatgagaatatcttcatttgtttgcattaaatttaacttcattttccatgtttcttacatacctttcataacattgtttctttcatctggtcaaaggttcttaaagggggccgccagcattgaccagcatttctactcgacaccatatgagaaaaatatacctgtaaggacccgaactgtttcttttgtcttcataatcaaatgatttatttccctcatgtaaatttgattttcaagaaagttctgtaaaactatttaggattatgaaggacctgcatacaatattagacatcatcatgtttcaaagaggatgccatgtcgcactttttttttctttctatttcattctctctttaagaataatatcaagagacatcagtggtcttatatcataacttcatgttgtggggccacttggattattgtatggtgttgagcaccacaggtgccccatattgctctagtttaaatgaacctccagaagtgagattcagtacaggttatagacgaacagcatttttctatttacattttggtataacctactgttgactccagctatgtttttgtatattactgcaacagtttcatctcttaatagcaagacatctgtttatattaggtgcttttaggcttgttgagcgtatggaatgtttcgtttcttggatatcctgcaagagtgagttcctatatctacttcagagtttatttatttctttaccacccacgttatatattttgacttagtattttgttttttgcataggccatcttaccttattcccaagctcttgagaagtttgccccacacattcaacaggcaagttcatttagatcgtcgcttatcttacttgctttttttctttggaagttgtgtgtggtttcttcttgcatgctcttaataatacctttcaccttgtaactcaatgtaggttagcatggaaagtaatggcaagggtgtatccattgacggagttccactcccctttgaggctggtgaaattgactttggtgaacctggaacaaatggtcagcacagtttttaccaactaattcaccaggtattgataatttgtgggcaaagctttaattcttgtactttaagctacctatgaaaacctctttacatctactgaaagctaaacttaactcttttattatctttcagggccgtattattccttgtgattttatcggtattgtgaagagtcagcagcctgtcaacctgaaaggttttttatcttgatcttttagagctaaatatttattatcacatgattttctagaagttggtagtctggttctcagctttttatgtaattcaaggacgataattctgttgcaggtgaagtggtgagtaaccacgatgagctaatgtccaacttttttgctcagcctgatgcccttgcttatgggaaggtattatccactgccatatatgctttctttgtcattcaagtactttggagagttttattccatttgaaatctcatttaaccaatattaatatgcctccttgacccaaatattacaaatcaatgtgctattcaggaaattgtaacaaataataaaatagtcaacaaattatgaaagcatcagtcagttatctatatctctaaccattaatgagttcttttgtagaccatagagcagttgcaaaaggagaatgttgcagagcatcttattcctcataaggttatttcttttgtgcattagtcattgtaatcaggccaatgaataatatactgactcttgtcctttctttcatagaccttctctggaaataggccctctctcagccttcttctaccttcattaactgcttacaatgttggacaggtatgcagtttctttatatgtttattcttaacttcttttttatatattcaattttcagtaaattatagaatctgcaactctcacatttgcttggtgtgttgccaatattcagttgttggctatctatgagcacagagttgccgtccaaggtttcgtctggggcatcaactcttttgaccaatggggagttgagttagggaaggttagtaccggagtcttaccccgaaactgtactagtgttcagaatataatcattatcatttctttttgcttgtgaatgcagtccctagctactcaagttcgaaaacaactccatgcatctcgcaccaacgatgaacctgtacagggcttcaactttagtaccgcaactttactaaaaagatatctggaaaactaattacaaacaagacccttttgtttgtgccaaacaagcaaatgtggagagaatgctttagcaagaaaacaacaagaacttttgttgttattcttcgatcctcggtgagtgttgttcatttcttttcttacaaaacaatcaaagcaccgtcgcgttgtggtgcttgaattgaattgcttccttttgtgtgtaaagtcttgcgaacaagctatttaatggccatgtaaaatcatcaaacaatgtttttttttgttcacaatatatttctttgttaccttaacttaagattatgttagttctttctgcagacatttctgattaatgaagtttgataattttattgaaagaaaataaaaagagctatgataattttattggttggtatttgctaaattgtgttcttgatggtgatgaaaaaattagtgggaggtgagtgactatcgcggaagtggtttacgaaatttctaacccaattgttcttaataaccctttttcaatctaaatagggccttaaatttttttacctcattactggttcggaagatttcactttattaagggcttgtttggaacgccgtattaggtcgtattgtattgtattatattaaattggattatatatcatatttttatataaaactatgttaaactttaatttatactaaaatatta

SEQ ID NO: 296053 - DNA, 9226 bp, Cannabis indica
gagagagagagagtaaaacgaatatactgatcatcctaagcacttatgtacaagaagcattcttttgcccaataaaacgagaaatcatcattcaaataaattaaagagtagaattacaaaattattgtaattgggaaatgcaaaagtgatcaaacacaatgagatggtctcaaagattaaattaatattatattagtctgcatatgaatacagatttcaaccttccaagtgactgataaaacaacccaacaaagtcagagaaaacaagatggagcagaaaaaagaaattaatttgtaatagaaacaaaatccatagataatgattgatgacacaattgattgagatttctttttaacttttttaggcgagtatactacaaaaagaatgaccataattacaaatgcctattgtcagacgcataacttaatcagcatgttgtcctctgacaatagcactatctatttttatctgaaatgtcaaataatcaagaaaatatacagtatatgttgtcctcatagaatcatattcaactctgacagatcatccataggtatgtcaaggcccattgcatcatgttcttgtaagccatcctcctcaatgttcaaccaagtactcagatcttgatgccccccaagttcattgactacgcctaattctatggggtctaattcatgcaactgtaaattcataaaatcaacaggatccctcttctctataagttgttcatcggcactgttaccatgttgcatcaacccagtttcactttttctgttgccaccgttgccaggaatttcaccaaaagcagcagaagggtgcatactgctaattaatccatttcctgaagttgatagctgagctgtcttctgctttggcttcgttttgttttccgttcagagttacccaatgacagacgaccagctttgggaacagagtttctggcagatgtatctttgtcccgctctctctcacttcttttacctttcactccacctaataaattattaccaaaatttgacttgactttcaaggaagggatgccaccaacatcatcaagcaacacttccttctttttccctctgttaactatagctccagttttggcaaaatccttctcagaggcggtaagacctccaaataaattagaagaattattgtcaactttattgtgaggatcatactgctcagcccaatcagacaaagaacctgtgacaataaaatagatgttgaaaaatcaaagataagaactaaaggctttcaacttttccctacaacaatttattattaaaaattaaaaagtcagtacaaactcaagaccaccttcaccattctcttcccctgttctcacatctacttaaccatgtctaaactaaaaacaaattcaacatcccttataattggcctcaagcactcacacaattgtctaatgttctcaagagcttttaatacattaacaattcttcccagtgctatggaggaaaaatagcagtactgttatcaaagaagagaaagataccaaaaagcaaagaatttatttccagtagattatatgatttactttttgcataaattatctttcctacaaaaaagaattagcaaaaatagttctacaaaaaaggcacctccagttatattctcagaaaccgtaacatgggtcacgtgtttgattttcataaattgaaattttaatgtaagtagcttgctagaactaaacaatgcaagaataaaaaataataataaataaatatttttaaagaaaaaaaaacattaaagcgctacaaataaattcctcaagaggatggcatgagaaacaatggcaaacctgacaatctgggctccagttgagaattccgagtttcatgtggcagcttcgttgttgaccctaggcgactcaccacctctggatcattttcatgaggaggcacagccaagatgacatcctgaagtgcaggctcgctgaagcaactttttccagtatcttctaatctccgacatctagcaagagttctcttcataaaacccacagctacttgttttggaacctttgcaaccccaagttttgtagcaagacttcctcgagtggcctgccatatttgaaaatgaaggaatttcagtaactgcttggttataatcaagaaattgtaccaataataaataatgattttaacaaacttacatgggcaatgtaccatataaaacatatttcaaaacagtttaatcaggtctagttctttcttactagcatattgggtgtaagaacacacaaatccttccacaattcaacttaaaagaccgaacataaattatcatttaagaattgtcatatgcaaactaaacaaacaaaataaagtatgttccataaacacacaacaagcagagggataaaaaaaaataccagcaattttttgtaagaagattcaacaagtttttccattgcaacctgctcaagtcccctgaagacatttagcgcatattaaagctcagcatagtttaagatgcaggtaattgtatattataaatatttaaaatagcaccaaaatgtatgagaaacttgggatcagtgaatcgtatctaccgtttttcttcctccttgcctccctccaatgcttcaatgattgctttcagctgcacctttgttttacaaacctaagaaatcaagtgtacatgtcaacggcattagaaataattttcaagcaaaaattgtcaaaacattaaattaaacaattcactacaatgaatcaatatacagttcggaaatcagtgtgaaattgaaacctgttcaaaaagatgtttttgcagtccaaggatatcagaagtaattgcttcatcatctccttcagctagatcaggctacaaaaataaaaccataagagttatccaacaatcacaaatgttgaaagcaagaacaaagttcaggcacaaatagaaagagattgttagaatgatcatgcaaaaactggctaagaaaggtaaaataaaacctttcctaactcattgcttatattaaggcttaccactatctctggatatatgccaacactctgcaactccagcaagagcttgtcctcaatacgcattttctcatatgagcaatctaaaggtgaaactccagaagcatttgcatataatgaaggaggtctaccaatcacctcttcagaaaactcagtaaatgacccattatccaaatgtgtaacttcatgatctccagtcaatacattgtttctaagtaattgattatgtacacttgtgcttatgctcttagctacattaccactaccattacaagagagcaagtcaacagcacactgctgtaatgtttgaggagaaaaaatggattgaccttcaaactcaaacccaacaatgccttggttagaaccagcatcaggagaaaattcatccttttgctggaaacatgcaactcttgctccacactcttcttcaaattcttccatctcatcttccattatcaaagctgataatactctttggtacagcggaggcatattcttactttccaaatttaatttctcacctacagtgtccatgcccaggacttgatcgggcgaacttctctcttttccttcagatacatgaacctgagactcaaggttctcttcacgcacctgataattctgtgaatagaaaacaaagtaaacatgagtcacaatctataaattatagacagggaaactatatctggttctcaatatgcattcctgtttcatcaatcatataattaactgaacttattccaacaaggaataaaacaaaatagccaaatttagaaaaaaatctagtaatgagattgttatttttttgacattaagatagaggtgggggggtattacatttgcttttctataatatgaataaaaaaagacaaagatcatatgtcttatactagcctcgtcccaaatttattggggtgcctcaccagagaaaaaccatggtaacaaaatgaaacagaacatatagagttacacacgtagataccaatcacaaaacaaaaaccataacatgtacccatattacatttgctttttacaaggaacaaaacttataaaagagaaaagcacaattatcagaatagagttgcactgcacgtatacactatagtataatatgtatagcacatgttacccagtagttatactaagcattatatctaaaaccatctaccactaataaaaaagaataccattccagaaagtctcatgacagtttcacaacaaagtgaactaccttctttttgttcaatatctcattgaccaataataaaaactcaatatagagaatctgaagtatcatgcttagaatcacgtaacaggaaaatttactttaaaaaatgcagtacgatcaatcaaaattggcattattataaagaaaaaaaaaagcaatgaagatcatatactgacaatagaaagactatatgtgatgaaaaacgtttactcttgacattaccataacattattgcgaaggtcaaatatctgagacaggcgttcataagtcacctccataaagttcagctgaacattgaaaaaaatattgcagagaacatgtaagacacaatttcgaacctacaaaaaaaaatacataagatttatgtaccacctgctcctttaggtaggatatctcctctaagttgacaggagcaaatattggttgcatcttcttccagaatggaccagaacaggcaagatctgaaaaaaccaaacaaagctcattgtgaatacatacatgtaggtttatgtaccttgttttttcagaaacaatacaatgttaagtttagaaacatactgctcgcattacaagcaaaacttgcagctgctaagagttcttcacggtcatcatcttgttcacctagagttacaagtaacagaatatcattgacccttaatttcccacaatgaaaatgagaattcattatctagcatttagttaatttataacaaaagaacaaactgaatatattatttatataatgcctgaaaaaagcataagggtttataaacagatgcaggaaaaaaaacccatgaaccacaataagagtacgaattcatacttaaattgtaccaagtagtaaatgatgtagatataaataatacctgcacaatcaggagagcaagtggcacttgtatgtccaagacgagcaatggctttccgttctgaaaatttctttagagggggccgtcctgacttgctgaagcaaatacaaaatactgatgttaatgtcaagagtagaagctacttctttatataataaggaaaaagaattcactacctgccactcctttcagaattatgccttgaacttttaattggctttgctgaggctaaattctccaacttttccttcactggtgaaatattaatcctgggaaatgatgatccccgaccacttcttccttgtctgcgcacactatctccagttccttctttaatagttattttacttttctttgtaagcaatgttgaaggaacagtgttttgaaaggcttttacacctccatcctctacctcactgcttactgctcctttctccttaaacctactttcacgattttcacatgctgcaccagaatcttcactttcagataatctggaaggagatgacatattatcgtgctttggtttatattgcagggcagcattacatatgctcctgccaagagacccattggtagcagaaaaggttaatctagtgcccaaatcagaaggagaacaggcttctggtgatgccggtacttcatcatggtttgagacgggagacactaaatttgatcgtctagtgcgggaaattttttggggtctctgaccaacccatgccatgggaggggacgaagatcctgttgggataggtcggttgcgattgttagcgccacttactgaatgagttttgttcacatttcctgcttgttcccaaccctccagtgatccagaggtgcgaggaaaattaggagataaatttcctgaaacaacagggccgcttcgctgtgcccttgaagctttcccttttgtcaatccaagtatttgattatcctcacgaccatttaacctaaacaaattattcaggaaaaataggtataaagatatatgcaccatatcaaacaaattaaataaccttcagaatggctataaaagactcttaacaaggtaaccaactacacaacagcatcaaatctatagcagtaaaaacatacttaatgttccccttgagtcgctccttacttaagccaggaattgaatcccttgaaagagaaaccttgtcaagttcattcttaaaaattgcacggccatttgagctagcacacaaggaagcaccatcaaacttgttgatgccatttaatggtcctggcctgcaagaatggtagaaatctcaaacagctgtatctcagctttcatatcatgcaagaaccaaaataaaagttcatataaattctgtttttaaataataataataaaaaaaattcacctaaaaatttgggcatcacaagatgttgaaccctgatcattgttcagcttatgatgcatagctcgcttgggctctccatcatccaggggtcggccaagaagaggaccaacagaacgtttcctttttatttttctgtcccatgtctcccctccaactggcaatcttcggatcttttcatcaacaatatgagatccttcgccacaatctctaagcatatccctatcttttcctatgatcgaccgctttgcaaggttattagtttggccttcagcctacaagaaaaaaacagaaatagaattataaactgacggcttgcattagtcaaagttaaatcaagatgagtagaacacaaatgagcctttgcaaggcttatgaaccaaatccataggctcaaacaattacaatattatacaatttcagggtaaagctcctttagaattagaacctacattttaagaaagcaagaacattgaagaatacaatacaatgaaattaagccagaagagttttataaatagtgaaaaccgtcactgatctttgctaaattagtatttacttttttacagtattatttgtctcttctttcacagataagaacaaccgcatttccgttaagtagatagaatgtcatatggcgtgcccatagcatttagcaatcaaaccatgatttgcaacttatacaagtgtttttagaataattgatctttcaaagggcactttttgttcccttgtggcataacaattgagctcctgtgtttcacgtagtttcctaccttaaaggtatagctcttcatttgctaaaaaaaaaaaagttgttcacatccacaagggttttttttttcttattttgaaattatatttgcttaatttattaaataagtagaaaactaaagcaggtcaatttcaatataggcacataaaatatcagagtttttttttttggcaacaattttatattttgtttgaaaagaaaatatgaataataaagcatttcgcacccgtcattccacttttagaggcctaaataattttactggataaaatactaaaaataaaatgtgttcctgtaataatatagaaattgcattgtacaaacccttatttctgcaactgaagagcgaactcgcttattgagaatgacattcttagtcctttcctccaatttttggttcgcaggttcagcagggttccgtgaactcggggagcccatcttcaacaaattcaacccaactgatctttctgtagtaatcatctcattccgttgtttctttgagcttacaatatcacaatacttgttcaatttttgcaaggattcttcaagcatctttttcctaatcctgacaaaatataataaaagagaagcatattagcaaaatctacttttaaatttcaacaagcccaaaattaattccatcccaacccacttctaacaagttcaatactgctagtctcaacactgatcaagaataaaaacgaggagtaaagttagacattacaccttcaagtatccttgaaaactttaacgtcaaaaatatgtgcattaattgtaagaatttccaaactcaaatacaagaatatcagtatcacatataaaatttgttattactttgctttgttagagccatcttgcacatttgctttgaaccgcttcagttcctctgtagccacagaaggggcaggctttgaatgagcagccccaaatgaattgtcttcacctgtgcttccaaatgatataattcccaaagccctcctcaattcacctaacctagtatatctctgattttctatagtaataggatctattgtcaaatactgagctataggaggcaaatctcctatcaatgcagtgctggcccggggtgtactagcaccagaactaaacattcgagtctcaccactctcacggaagcttccagacctatctaagctggcattgaggtaacctcccctctgcacattagaataactcccagtaaaacccaaatcttctggactagccgaagttgactcaaatctcacacttcccgccattactcattaattaaacaaacacatgtccaatttgtccaaactgaatttctttagaacaccttgttttcagggtttaaataaattcttatagacaagtacgcacaaacccacattcataaataaaatccagcgttagaccacacgggatagcatatctgcaacatcgtgaagtgaaccataattagtataacactgataaactgcttatttaattattttcttcatatacagcaaatccccactattttaagtaaaccttagtacactaccatggacaagataactagtttaccccctaaagaaaaagaacatattgcggttccgacattctacccaataagataacactacaactattacacgctacctcacttgtttcggtagccagatggataaagcagttgaaatgagccaaaataacagttgaccaaaagctttcctttgacttgtatccagaacaatcaatgcttaacaagaaaaaaatgtacaaaattaagctttatttccttatccaaaatattttccaggaaaacaagcacagataaaacccaaataactaaaaactctgtaccaagaaaaattaaagaaacaaacccaaaatcaaccactttacataacagaattcaaccaattcaacattcaaaaaactacacaaaagatgaattcttttaataaaataaacaacataaaatctgccacccgaatccccaattcacgcaaaaaa

SEQ ID NO: 296054 - DNA, 2332 bp, Cannabis indica
atggtaatgatcgtatctttatcattttcttggtcataatcgagtcactaacgataataatcgttacatcaatcataatcgagtcacaaatgataataatcgttcctcataattaccttgatcataatcgagtcaaaaacgataataatcatttctcatcattacctcgatcataatcgagtcacaaacggtaataattgtttcttaccaacacacttagcagtgcataaagcttttctaacctcaaaccaatattgggtgtgcgggccgatctgagtgaaaccatgctcgacaattccgtatcatatctcgcgataacaaaactcgattaacaacttatccaatcctcgaaacaaagcctaattcataactgggaaaattttaactctccacaggttcaaaatttcgtaaaccaagctcagaaaaacatcccgagccaaaaacctaactaaaaaaaaaccgagattttcccctacaggccaatcggtcatccggttctaccataccagtagcaatcggtcgaccggttttggcaggcaagaaaaccttaggttttctcctccgaaactgatccaaaattctttcatacctacttaaacactccacaacagtttaataccacaaaaataatacatttaaatcatcaattcatagaaattcactacaacacccaaatcaccatgttagaaccataattgagtttataagctaaagttcctaattccaaattaatcagccatgaaattcatccaattagaacctacacaacactaaaattaaccctagaaaaagctctggtcctagacttacttcacagccccgaaatcacaagaatccccattcaaaactcattttaaaccttaaaaaagtcaaagacaaaagagtgaagagcttacctcatagcctagaagatattaatccttgattaactcagccaaaactcaaagaaaaatcacttgcagcagctggctttctaggttttgaaggaggagaagaagagtaatggtgttatgcaattattcttagttttttaggtttttcttctaaagatagatacttaggtaatctaaactaagttactttattcttttcaacctatatataaatcacataaagacaaaatcccaaccttaggaaaagactaaatttaaagcctaaaatctaccctagggatattttggtcattctaattaatcccaccaaattgataacttaaaaattctactctagtccggtataattctaattccaatttaattcatctcttattgtcatgacatttctgaccactccgtcgagttcccacggccaccgaacccaaaaatattttatttaaaaaatggtatccacaatacctcatagtccgataaaatcttcgtaattaataaagtacgctttatttgtttctttaatcgtatttcactaattaactcgtaattagcttaagtaggattataatcctactctaatgcccacttaactacatatttaataaaatatgctcaatttaatatcattatatttttttcggcatattacaaagtcacttgagatctacagtgattcacaaatagttgttaatcagattcttggtgagtatcaagcccgagggtcaaatatgatcgcattcataagaaaatctaaagatttattagcccagctcaaacactactcaatcccacaaataccgtgtgaggagaataaaaatgcaaactcactagctaaactggctagtataaagattctgacactgttagtgtactttccctcgaatacctctctaactggagcattaatgaaggttcattgcctaatcccaatgatcgacgatactctatcatagatgacaccaattatgcaatactttaagcaagatattcttccaactaaccggaatgaagctaagagacttgtgataaaagaaaatcacttcgtcttcatggatggagtaataaatagaagaatctttttaatgccacttctgaggtgtgtcacgaaagaagaatccaaactcctcatggtgaaggtacatgagggattttgtggcaatcatgttagtgggcaaagcctctaaaagaagatcttgatacaaagatactttcggccaacaatgatagaagactcaatagactatgttaggaagtgtgacaaatgtaagagattcttcaaaatacctagagctcccccaaaaaaactcaagagtaagcaaataccctagccatttgttgtttggggaatcgacctcattggttcactacctgaggggaaaggtggagttctatatgttggggtttgtgccctaaataaaaccctttacaatctgattagttat

SEQ ID NO: 296055 - DNA, 2067 bp, Cannabis indica
taattattaatttttattttatttgttattataattattttttataaattaaaaattaatatttcaaataatatatatttttttaatttaaaaactattgtcccccctaaaagtcaaatataacaattttgacaacaccttttaggggcgacattttgggtattagggcgacattgtcgccactaaaagtaaaaaataacaatccgtgttttacttttaggggcgatagtgtcgcccaaattgacatgagacttttttgtcacccttaatggtaattttaggcgcgaatttttagaggcgatcttttaggagcgactatcgcccctaaaagacattagaggcgacttataggtgattttgtcgcccctaataaatgaatatgttgtagtgtaggaaatttcgataaggattcttgaatcatgcgactaaaccagacagcactgattgatccttctacttgtgcttgatctttgaaaccaactgtaagtagtctgactctatgtgagtaaatggtagattgattgctcagcaccaccaaagagcctcaagaagagcttgtgcctcagcatatagtggagagaaggcttcaacttttggaattgaacaacctgcaactatttggcccctccaatttctgactacagctcccaagcttgtgcaaaacttcttagtacgtatcaagagctgcatctatgtttaatttgtaacctccatccttcatcaccaggggagtagaagggcttccttccttgggagggctcgggcttatacctgagttgtggacatcctccatactaatttagggattgtgcttcgtagtaatcttgcaaaaaccctctgacaaaggttctacctctataaaacatttaatttttttgttaaaaataacatcattcttccgagaccaaatctgtcagaccaaacctataaaaacaacaaagtcttctttactaagggaatcaaagacccttagaagaaattctttaatatcacatctttgattactgctataaaaatgattaaaagaagtgttcttccacacagatttagctctggagtagtttaaaagggcatgggttacaatctccactttactccaacagaagaaacaattgggctattaatgatatttttcttaaataggttaagggcacacaacaagatatggtgaaaggctttccaaatgaattattttattttgggggaattttggtggtctgaacagttttccaccaatgtttaaaataatcaggtgttgatgaagagggagaattagaataagagtgtgagttagccaggtgatagacagagttgacagtaaaagtacctgactgatgatggccccaaatgagacagtcatcaaatgagggatcaataggaacctgcaagatagaatttacctgatattgaggtaggtattgctgaagcttcacagtgtcccaaatgccattgttaaaaaagtgagagagttcaaacctgggatccaattggaattaagcaaagagatggctttaccattttccactctcgaaataagacctttcaacaacaagtcccttccccaaagaaggcttctccaagtgacagttgagcaatgaccttttgaagcacttagaaagtcattatgtttaaagtatctggatctaagaagacaagacagaagagaggaaaggtttttccaaactctccaagcctgcttagcgagtaaagcctgagtgtaaagaccacttaattttaatttggaaattagcagataattagggcttaattatgaaacttgcatattagttatgaattatcattttagggagatttatttgaatttagaatgcattatatatgtcatatatgaaattttatatttttgcatgttttgtgcccgacaatattagaacgcggcgtttggccattaaaatcacattttagtatttttagtatagtgggacaatatagttagacattgagaatgtcaaggattagtcgagattttataattgaccaaattacccttaggtggtttagtgactttttggcttaagtgggggcaaaatggtctttttgcccaat

SEQ ID NO: 296056 - DNA, 1988 bp, Cannabis indica
acaaatttaccgttctacccttcaatgtattttatccttaaaatacttagcttcctatacatgatatttcaataaactaatataattactgaaataagagttcttccatttatcactattaagtcaagctgaaaggaaatcatcatttcacctctatgtcaatatagaagctatagatttcgtatctatgattagcgctcccactcaattacactaccatgttcccaagatataagtattgggccgatccaatgggtcagttttaacgaacaactctaagaacataaataaaacacttctgctagaaagtaaccatctcaggattaagatctattgatctaagatcaactaagtgatatttacttagaaagatacaacagtacgtttataatatcttatccaagttcaataacggtccaatccaacgtatactctatacatttgatactagcatactttaccaatgccctaaaaatgacgtaacatttatccagggtgtaagtaaattatattgctgattatcacatcagtgtaaatacagtgcactgatgaattatgggacataaactttgaaatatataatcacaatttcttttcactgtgatgacataactgtaattgtaaataactatatgttctagatttattagaaattgtatattaaactacaatcatgaaaataatatgttaatgtaaataacttctaatcttccattgatagcgaataaaattatattaaaatggattttatttaaggcataaaatcccaatagaaccctcattatcaggttcgtaaagagggtggtgaaaaattgcaggctgtatttgatgaagaaaagaatgtttatggggataatgctactgaacataaggcagagagtatgataagattgtatttcctcattcatttatttagttagaccactcttttataaaataatttagtttgtgtataaatttcaaattgtataaaactagtctctttggatatttgagaggttataaaactaaacctaaaggacattagacacacaaatcacaaagtttgcattttctcaaatcattacagtgttggtttttacaatttacaggttagtggctcgttaaatttactcagcacaactcaaagacattttgctctgtatcaaagacatatatgcaacgtggaggaagtatacttaagtaaagaattttattacagtgtcaagttcaagaatttataaataactagtagtgtgttttgaagattgaataaagtaaagatgactcttgttggaatatcttatatgagatagatatcttgaagtacattgcaatcatttcagtagcagtttggtccaaagttagtattttgtgtttgtaatctttaagtttgacattttaaattcttaaaatttgcattaatttgtaatctttaggtttgacattggaaattctcttatgtaacaagtttatatatttatgatttgaatattttttgaacaattgttttcacaatataattatataatttaaatgaatctatataaattgaattaatttttaagctaatttatgcatagttttgactaaatgttggtcactgaaaaatttataatttggaataattatttaatttttttaaaataatttgttttttgtgactaaaatactttactactacaaaaatagtttttctcgacgtttttaaacagccgtttaaagtattcccgtcgatttctataactgtcgcctatacgaccgtcataaaacgggcaaaataggaaacggtttaaaactatcgctaatttggacttccaacggtttaaaactgtcacctataacaaggtataggcgacgattttaaaccgtgctttatactataggcgacggttttagtatagggcacggtttaaaaccgtcgcctataccctattataggcgacagttttaacccgtcgggaatgtaaaaaaaaaaataccgatttatggcagaaaaatctgtattt

SEQ ID NO: 296057 - DNA, 913 bp, Cannabis indica
tttgtaagtttttttaaaaaatgccatatttagtataattaagtttttatgccatatatatcaaaacttatctttatttttccatatttttgtaaatagcccttgttattttacagtgcctatttcctgtgctgttgctgcctcctagagagctgctgtgggccattgtttggtggccctccaggcccgccaggcccacgaggtgggcctcgattctgattggcttggtgatgatgatgccagaatttgatttacaaacaactattatgtaataaacacagtctgctttatttttatatggtacttaattaatattgttgtgtttgacatctagatatttgaaaattattttgaatttgatatctaaacaaataattgaaaaaaagtatgacaacctcaaacacaacttcaattttgattccaaatctcacctattaagtaagacattggggctcgtttggaacgttgtattaggtcgtattgtattgtattatattaaatttgattatatatcatatttttatataatactatgttaaattttaatttatactaaaatattatatagttaggtgtccataaaagtcaataccacatatagttttacataaaaatattgcataaaatataattcaatataatacaatacaacctaatacgccgttccaaacgagccccaaagcaattaagtttcaagtacaagtaaaactaaaagaaattattgttttctctcaattaacatatcagataattaaacatttaactttaaggctcaaagaccatattctctgcctctttcttcaaagactcaaaaagcacggtagaaagataacgctctcctgagctggggaacacaacctgttcatattcaaaaaccaaaaatattatcttgttttaattctcgattcacatt

SEQ ID NO: 296058 - DNA, 9746 bp, Cannabis indica
gcactatcgtgcgctgccatcagccatgcgcacccactgtcctacagacctgagaggtgacgtgtcaaaacggcattggtaaatcaatttacgtgtacttaataaaaggggtagtgcattgaacagccagcgcttttagtcattggctgctttcgtactatttgttagtttttatttattaatattttcgttttcctaggcaaactcttccactcattcttctcttctcttctcttctattctctcctctctaataaaatatactacttctgttaacacatattagatctctctctctctctctctctctctctctctctctaatgccattgccttttctctctactctatccacaacaagcaacctcatttttcttctcactctatatatagatagactatagtactctagttaattataatacttttctcttcaaatatattcgccatttaattgaattatatagttgccttgctctgatcgtgattgtcctttaattttggattattctaatattcatcgtgcattgccgtaccttcaccaacgattcgatcgaggttcttatttctaagcctacaataatctcaggtaatatacataaatatatatatatttctgtatatatctgtttctctgtaaatgatctgtgttcgaaggagagaaaatatatatatatatatatatgtatttacagaagaagaagaaagaagagaaaaatcttaatcgaatcgatgtttttaatattgatgatcactggttttatttctttctcttagttttaattattgttatttcatatggccaggaacgtgagatgttgggaggcggaatctgatcagagaggaattacggtgacggaggttgatcagccgagcaggccgtacgtgcgagagtaagctattccgcacgtgtgagcgcgtgaaaaggtttcgtggcgaagaaagaagcagtgctcaggaggcccgtgaattttatttaaaaagaaaaaaaaagaaaaggaaaatatgcctcacagaacaacttacttcttcccaaggcaatttccggatcgcagattcgatgtatcttcgaaacaatcatcatcacctgatcaagatcacgggaaaaaggtaataataaactcatcatcaaccaccaccgcatctacttcttcttcttcttcttcttctcccaccgtattatcaactagtatcgaaaacgacactaataagtcgttgtcgtctgctacgactacgagatcaacgacaacgacttctacaacgaagaatcagtacttcaccgttaacacagccaaagcttcagctgtatccgaccttttcacgagccacgagtacaagtcatcatcccaaaccaagaaaaataataataatcatcatcatcaccacaacaaccacagccaccaccaccaccaccaacaccaccaacgacggcagcaacagcagcaacaggaagagcatttcgctgccttttgcgattggttagcagagaagaaagccgaacgccgttccaatactactactaatagtaataagttagtatcatctcgatactcctgtgatgaggagcgtgagcttcttctcccgccggagcagattccaccttctgcggtggttccggctccggctccggcgacgaggtcgtcggttgtgaaggatcggagtttggacaggaatttcgatcggcaggtttcgttgccgagggtttctagtgggagtagctatgcggggagcttgttctctgggatcacaacatttgatgggaacttgtctgttaaggactgcctctcgaaggtttcttgttcgactaggcatgatgatcatgtagtggtggagcaaggtggggctggtggcggcggcggcggtagtagtgatgagagtagagatcaggtggattcatcatcgggggaaaatattagtagcttggcgcagaggtcgaaagagagttactatctgcagctgagtctggccaaaaggcttacttctcaagcttgccttgcgagtgagccattgctaatgcaagtgtctgggcccgaaacttctgatgccgaaaccgtttcgtatcgcctatgggtacgtacgccgtttctagtttctattggatatcaacttcatttgttgttattattattattatttaattcttcttgggtttgagtgcgtatatgtatgtatctctgacctgtagtattgctgactttaacttcactcaaaatgcaatgaatgcgcgactcttattggtcgagcttgtctttgttacaatgcatatacgggtgatgacaaattacatgttattggttgagcttaaaatattccaacaaattaatttcatcatcttccgttattcaatttcaaacgaaaaataaattaaaactataatatttccaaaaaaagatctcttataaatttagaaaaatactattttatcttttagaacttttcctaagatctaaacaaagatttttaatgtataattttatttagattgatgatactaagtcgcttaaacaggtgatattaatgtagttataagttttaacttattgatattggatatacacctctttgtaagatgagttctctaattcgaatattccctccttgcaatttaaaattaagtttcaattaaatagtacataaaatgacacagcatataatattagattttttttagcaatataatgttggaactttaacatccataactttagcgaccatgatcttttatttaatttagaaaaaaaaaaaaaacttcattcacattcaatgaaactttttattattattattattatatataaataaaaattatgaatcgaattgatataactactaatttttttacttcaaaaaataataaatataactactaataaatataactactttaagaatatcccacaaataaaaataatgagataaaaagtgaaataatctattgcgatttagataaacaacttgctgccagttcaattgtccaatttatttactcttccacaatcggattgtttgttccttaataaaattgaacagaattagacaggaatgtatttactcttccaaatctaacttgcacgacattcatttgactgtctcttatgaatgtgtttcgtgggaagggttgaatgtggcgggaaaatggattaaaagtgtatcaatgcgttatggggctcattgtcttgctgatagggctaacaaatctaacgtttttggtgttttgtctttttgagaggctcatccctatctatgatatgaacaagattctggactgtccctagtgtttcctttcttttcaataaagtttggttctataatttttttttcagcaatgaatataagaaaaataaataaaaatgttttgcatacatgatcatggttttgtttttgttgcctgaattgtatagagtaattatgccacctgactttactaaaaaatgaatttgaacctttccaggttagtggctcattgtcttacactgataagatatcagatgggttctacaacattttggggatgaacccatatttgtgggtgatgtgcaatgatttggaggaagggaaacggctaccaccattgatgtcacttaaagcaattgatccaagtgagacatccatggaggtgatccttgttgacagatatggagactcacgccttaaggagcttgaagataaagcgcaagagctgtattgtgcctcagaaaatactctagttttggtggagaaattaggaaaacttgttgccatctatatggggtatgtactcaaaaatattttaatctttttttatgggctcagtaacagagatatttgtcttgaattttatctgtgtcctgtaaaacattaaaggggcacttttccggtagagcaaggggatcttcacatgcactggaaattggttagcaagaggttgaaggagtttcagaaatgtatcgtggtacccattggaagtctttcaatgggactttgcaggcaccgggcgattcttttcaaggtgacaaattggactacatatttgttgatttatgatatacaaaaatggcaaagcaaacctttgacataagtagcaattttcttttgtttggctgattagatatatagcattttgaattttgaatgatgtttgtggatatttaaggtatctagaggggagtctttgtggaaggttccacagtctgtagagttattttctgtcaatgacgctactaggattctgttattacatatagttacttgaagtacatggtgtactgaattgatctgtgttcttcttgaatttagtttgagtttgatctattacaagatacttgtcagcaacaattaccatgtactagatttaagattctcatcgtatgtgtgtagaagacagattctccacacaatatgtacattttggcgaacattaaaaaattattggttctttcatgaaccctgttcacacacttactgaactgtgcaagtgaatgtatatgtttacttactattcaacctttcaactacattactggttagtttatgttaaactgctttgcttgtgcattgcagattagtgtatgttcatttgtatatgaggtgttacttgttatgataatactaaatacgtcctttggttttaatctgcagaaactggcagactacataggttttaccttgtaggatagctcgtgggtgcaagtattgtgtggcagatcatcgatcttcttgtcttgttaaaattgaagattccaagcagtcaaggtttgttgttataactgttcttgtaggctttacctttgctgattgaatttggagccttgcttgaaattaaactggcacattgcatgatctatcatttcaattagttctggaacaacagtaaaatgccctcggtgacttttcaaaatatgatgaccaagttacccacatatcaatttattgtaatccaccgttctgtttcaatatttttgtagaagttgatcaggtgtttctctcttatcctcttcattctctttcagcctctttatatatgtgtgtatatttgtttacagggaatatgttgttgatttagttggggaaccaggaaatgttcatggtccagattcctcaatcaatggaggatttctttcttcagtgccttcaccattacaaatttctcatcttaaagaatttcaacaaccttacatggatggttctcactccaccaattcacacacttctcctgaagatccatattcgggtatgatttgacttgcataacttgagagtgtttcagtgcatcacaagctgtatgactgacatttaggattgtgactaataaataagttacatattgcctagaagattaactcagatttgtgtaggttcgaaagttttcaaataaagcctgctaatgttatgccattaagagcaataaatggagcagcaatttttcctttgtaatggcattgtagcggtactatgatatgttgtgtttatttggtttgttgcttgaaatcaccaatgatgagtcaaaaacaaaggaaaatgtacttttattccgcagagagaatgcagcatttactatagggttaaatattagtaatgcgttatgacatttagtttcttcacaatggtgcagttgaaaatagtgctgatatatttaatacatccgacttctgtattttcttgaaaattcagtcattacaaggccttgattctagtcactatcctagggatattctaggatctgtttcttgtgtaaatatggttggtaaaagttataaaaattaagaatgtaggaaagtagaagctatcaaatatttgcttttaattatttttctttcctgttgtaattgctctctttaaaagacaaccttgttttcctcataatttctaacagcagtggattgttaccactgcgtttcaaattgtgaccttgtcatatatgtgtgtactcgtatgaagtactagctatttatatctgttttaaaattatatggtccactattcagcctgcatttacttatgttatcctagtctgcttcatctcttcctcaactacctccaaactgattaaaattagttgtatttcaatcgtttgcaggttgtgggacagaaagtcagaaaattaaggaaagtgattttttcaaagatttaatgggtgttagatgtggtcttattaagaaagacagtctcgtaaagaaatcatctctgatgtccttggagttgaaagggactgaaaaatgtcctgctcagagctccatgatgacatctatccagggtaaagtttttgaagttcttgatgctgctgtatcatcagtatatacattctaaagttgatttaggacaaatttgttgtatcgaaacttgataaaaaaatgtgtttcatcaaatcaggaaatcaattgatcagtgatagtgtcaagcaagcaaaagtaagcgcaagcttgtctagacaaacggattcgaaggaggctgacagtgaacttgaaagtcaagccatgtttcctgcaataagtgtaaccattccccggtacttgattcttgagccatctcttgcaatggactggcttgagatctcatgggatgaacttcatatcaaggagcgtgttggtgctggtatatccttttgactttttttagaaaataaactgtcatagatttgcttttagtttcttttctgaaatgtaatcatgttaatttttttttcccttccagggtcatttggtactgtgcatcgtgcagaatggcacggatcggttagtaaccatcttttttctctattattgggatgtttacttccactaaatttggtgcaaaaaaccatttcttttgagggaaataatataaagcatctactttgagggaaaatgggtttctgtgtaagcattgttcatttttggtttcattcaaacatgttatagcccatagtaggtaaaacttgcatggccacaaattactcgctcttggagcctcactgctcctgtattctctatgtgcatgtgacttcatttttatacttgtattgcactctctctttctctcattgtcttgtactagcacttttttaagtcacattggagctgatagctccttatttaaagttttcctttccctatgctctttcattatctttgaacagcaatattaatcatgtacttactgccttagtgaacataacagagcatcctttatacactctaagagttggcttgcaagttaactgggatgtgctgctttatacagatccacacaagtgtctagcctattgaatgctctagtaaatctaaagtggttctttatactctttattattttttttaatacaaggacgctttttttataaagatgaccatcccaaagctgtttagccacaattttttttttctttcaaattattttctttgaatgttgagatatcttgtattattagcaacttcatttttaactgctacattggcctcagttgctaagatcaatgctgctgccacaatgcaggatgttgccgttaaggtcctgactgttcaggattttcatgatgatcaactgaaggagtttttgagagaggtacgtatcaaaacctaatagttgaacactaaattgttaaggtcatgactggtcaggatttcatgatgagaaactcaagcgatgtttgagagaggtacaatgtgaaacctagaaagttgaaactggcagcacatttcattatctgtgtgatgacatcatagcgctggttcaattgttattgaactcaaatccaaataagaattcagactacaactcactttgtttctattattattttcattattctcttagtttgccagcctaattatctctgttttaattctgttctgcatcttgtagttgctgttgatgtgtgttagtgtacctgttaggcccccaatcagttttcccatactaggcaggagagatttgaggcagtgtagagttgttctaggcacaatgggaagtgagatattttgtagaaacagttacttatatcttgtattaaatctgtataggggagtgtgaaagtttgcctaaaagtagcagtaagttttatttaaatagaggaatggtttttggggagaggtgtgaatattcttctaattgtaaattcactttaatactagcagtgattgtattgagttgtgttttatattcttgctactacttggtgaaagtattggtcccttctagtacccttcagtgtttagaacatagctacaaaattatgacatgcgacttgggaaggaatttgatctcttatcttacttatttccacttccagattgggggtgagcataaaatatatatttatttggctatggaaagatgatattggaaactccactcagctccttgacatattttaattaagttgggagtacttgtgggtattgtaggaacaaaccgcactagttttttttttttctttttcatgcaagtatttgttttgaaaagatctcaaaacttgccctagtgtttggtggtgaattttgcaaacaatattgtgctagcttgaataatcttgtaatatagtccattttaatgttgacagttcatgtggattgctgtattgctgtgattgtaatgtcctcctgattcaaatgattttttttgggtttcattgtcaatttatctctgtcatgtggctacgacttgaattgtctttcacaacatgtcaggttgcaataatgaaacgcgttcgtcatccaaatgtagttcttttcatgggtgcagttacgaagcgtccacatttgtcaatagtaactgaatatttgccaaggttatttgcagtttcatatttttggtttgttcatttggtgaaaacattatgaaatagtaatagttcacaatagcttcctcttatagagtattcttgaacgtttatttgcgctaatctgtacaatttcggtgttctacaggggtagcctatttcgccttatacacaggccagcttctggtgaaattatggatcaaaggcgacgattacgcatggcgcttgatgtggtttgtattagttattaattattattactattgcctcgtttgtctgtttatgttaacaacacctcataatctaatatggatgcaggccaagggtatcaattatttgcattgtttaagcccacctgtagtgcattgggatctcaaatctccaaatttgttggttgataaaaattggacagttaaggtaacattagattgcttttaggcactgtattttgtttttgtttttttcttttcttttttgagtcttaaggtttggttagagaagttccctttgcgactagtcacctgatttaatggttttattgcaggtctgtgactttgggctgtctagatttaaagcaaacacatttatatcatcgaagtctgttgctgggacagtaagcttctctctatgttttcttctatttttttcttactgtattgtaattcagtaccctaaaaaaatattgttttgttgtttttattttcgattgtattttatctgttaaataactacctcaatttttattttctgttattcaattgtctttttcttttaggctatctatatatttatagcgtttatttttgggtacttttgagtttgattaaagtttggtatcttttgctaacttgtattaaaaggatcttgtttatattgctataaatgtgttgaacgtaatattatagatgtcatcatccactggtccttgtagaggatattaaccccaatcctatattttcatgcaagagttgtgacaaagaattgagagagagagagagaggagagagagaga

SEQ ID NO: 296059 - DNA, 3802 bp, Cannabis indica
aaaaatgacatagcattatgacaaaactgaatcaggaaaatttcaatgctaattgtttttctttctttttttttctgcagggtgaattaaatctgggcaggtcatcattataatttattcaattgcaagggtggggaaggataaaaggccacgacaaggtgctagatatgagaaattcaccatccactaaaattttgcaaaacaaaggcagagactttaaaaaacactttttcaaacaaagttaggcgtagttggtaaagaaccactaatcctcaaatagctaaataaacatttggggaaaacaaaccaaaattctttctcggtcccaaaaacaaaaatttatgagtttcaaaacccaaacaaatcatcaccacgtggaatccaaacacgaaccgaaacaccacacagacaaacacaggtccccattttgtttccattggtcacaaaagcacgatatttatttttaattttttgaaaatataaaaataattcttgtgttactaccagaacagtccttgtttctccatctcacccaactacacccgacatttaattgcataaacacaaaactccggcgcacgttagcccatccccaacccaatatcaatatcaccttcaattctatctagtattgtaatagctattacaccattgtcatgcatgggaaaatctagtaaaagacaaaattctttgaccattcccagctggccatctgtgtctcatgcaccataaacggcaacaacatttacaagaccaattaacttaaatgtatttgccattaactcctcaaatttcatcactatcctttttttactcttaaaatccaacaaattcattaactttccaaataaatttttaaaaaatcctgataagaataactgaatcaaatgatttgacttacctgaattcggacgtagttactgctccgggattgaccgaaggccatggagacggcctgatcaactaggtcagcggagccgtcgctagcaatacgggcagtgggacgtgcccaatccttggccttccactttttgacttgatcgttctcgaaactcacttccaagagctgacccgttccaatggaaaggaccaagaggtcctccaccccacgcacgaacggaaactcctgcttgttgtgcagcacgtgcgtgatggccgccgccgtcgggttgctcattgccaagccaccgtcaaccgccaaacaccgtgtttggccgtccacggaacgcatttgaaccgggtcgaaccgaccaggctcggcggaagtcgctcggcatacctcccagagctggaagtcgaagctgtcagtctccagcgcgtcagcgcgtgagaacagaaacggcgctgtacttgacaagtcgtagcaaggtatcaataccggcttcaacgtgtccttcagggttaggctctttcgacttttctcgacgaaaatatctttcatcgatttctctaaccccgcggtagccgagcgagtcgaactgcaaccgccgcgtctgatcattcgacgcagaagttttccaccagtggcggagctcgacgaagaagaagaagtgtagaatctctttccctgttcggccaaaaacctccaagtatcatcggctttggatattgggcggctctggtcactcgtagcaaagagcatagccgtgaaaattcctccaacaccagcccccgctgccacgtcgaagtagtcagcgattctagcgtctggattccccgatttagccttgagcgcgtgctctaagtatgccaatgctttcccggacagaatccctctcatacctccgccatcgatgctgagtatgcagattttccccctctggttcttgattgccgagacgccattatcagcgccaagactcgacacagcttccagtttggggtcatcaatggcggtaactgcgggagcgatctgcttgggaacccatagcttctgatcatcgtaaccgaagagaaacttgctctccaaaatcgaaaagatctcgtagctgagcttatcagtgtcaatactaggttcatgcatttctgatagattcgtagccatttccccccaaattcttccctataaattaacgggtttcaacaattttcacaaaccaatttttccgtccggacaaatggcttctaatcttcgagaaaaacaaatacacatgtaatcggaagttcaatcaagtagaagcagttaccttgtatttcacgcccctatttgtacccaaaaaaaaaaaaaaattacaaaatgaaaaacccaatgttcaaactttgaaaataaactcagataagataaggattgaattaaaaagctttgcagaatctccaacccaaaatttaatagcaatcattgctcaaggcctcaaactaaaggaagcaacaagagaaacgcctaataaaactctcacaatacaggtttttctcgtttccaaaaacccagttgaaaaaaggcaatcaaaagcccaatttgccaaatagtccctttgctgtatgctgttgctctggtttttaacagagtaaaaacccaccaaagaggaaaatgaaaaccttctcaagccaaggaagcggcgccaaaatcccaaaacaacaagccaaatgagtattaagaaagaaagaaagaaaaacaggacgaccaggcaaatatcacagaggtttcagagtatgtctgtcttatatatatagcctttttcaactataaaacaccttaaaccgatttttttcactcattaatttttttaaaaaaatacactaaatacatttagatgggttaaaaataaaacaagtgtattaccgtcaactttctcttataattttttagtcaaatttttttttacagctattaaaatttcaaattatttacaatgtcaaaaatatttgaagttttttaacactcgtgacaaacttgattgaatatcaggaactatattttcagtagataaaatatttggaatttttcataaatttacagtaataatactgacaaatatagctatgaaaaaaatttaaataaaaatattttaacatgtgatttcgtacataaaaattaactaagagattataactgtaagttacaaaaatgtgcacacatgtattgacatttttcaaaaaaatgctttagtgcaattaaaccgttttcatagataattatttggttaaaacatcaccgacggttgagactggtcattttttcggttctttttaaatcaaacggtcaggaattgcccgcgcgatgtttgcccgcaatcaacggtcaaaattaccaagaagtgaaaaactggaaaattgttttttttttttatatatatataattatatttcttttttgttcgcgcgctagtcgttaacgcgtgggaccctcttattgggcaacgctcataggtgaaagaactggggacgcactactacggaggtgtagtccggaggattgagaaagttttggacgaatttacccttttattagaatagagtttcggattatatggtggggccaattcaggtcatcgaaattgtgatacgtgctgactggtatttcgtgggtcaaattgaacagtggggtttatcgattgggcctgtgggccatgcttttgaccaaccatctaaaatgtaaactgttaattatataattatacaggtaattaacgttataattctgttggaaaataaaataaaaaggataacatgattagagtcaaacatacgcccacgggcttcgccgttcatcgtggttaatttgaactgtagaagatttttttattttgggaaatttacatggtatactaatttttgtcatttttttacaaaaatactgaaattt

SEQ ID NO: 296060 - DNA, 2136 bp, Cannabis indica
tttttaaatgtttaggttgcctgatgactttgataagcctgagttttcatctgtgactattcaacgcgatctcttctatggctatgatactctaatggaaaacgtctctgatccttcccatattgattttgctcatcacaaggtacactataaagtcttgatttagaacaatctgccacttgatctgattcattgagtattcaactttaaatgtcatgtcccccgccaactgacaaatatttggcagacttaactatgttcaatgctcactttggttgttcttctcttattaggaaaaattgatttcagggtccaactgtgtatcaattataacattttgtccctgaatttttactactgctaaatcgtgatccttttaccaagacaaataaatttgaaagtggtaaaagttcggagagaaaatataatagtgaacatactttaagggtaaaattactaaatattttatacaaatttaacgatattagattgaagtttcatattttactaccattcaaagttgaaggggaatatttaacatcgataacaatttgaagggcacaatcatatttaccgatacatctagaggcacttgtaataacacttatcattgcttcttcatcattcagtgctttgctactttggtgtattatcttctagagcctatttgtgattagtagtgagttgaatatattccttgctaacttgttggttgattctgcacaggttacaggaagaagagacagagctaagccattgccatttaagatggaggctaccggtccttggggatttgccggtgcgaatgatgggaacccacgaatcagtgccaagtttgttgctccttgctactatataaacaagtaatttctcgtttctctggctactaacttcacactttgatcttctatttattgccatattcgcttgtcaattaagtactgttattgtcttcatatttcagagttgagatagatacaaagctcccaatagttggagatcaaaaatggatcatatggatttgttcattcaatgtaccaatggcaccggggaagactcgttcaatcgtttgtagtgctcggaacttcttccagttcacaatgccaggccctgcttggtggcaggtgagaaaatatgatagaattcattcattttgtttgaaaagattttttttttgaaaaagattttatgtgctgaggacacatttgtggggtttgtccttcagttagttccaagatggcatgagcactggacttcaaacaaagtgtatgatggagatatgattgtccttcaaggacaagaaaagatctttctttcgaaatcaatggagggttctacagatgttaacaaggaatacactaaactcacattcactcccactcaagccgatcgtttcgtcttggcttttcgaaattggctaaggcgacacggcaacagccagcccgagtggtttggtacaagcagccaacaacctttgccatcaaccgtcttatccaaacgcgaagtgagtaaaaataaacacatcaatgtttgtttttcaacagaacagaactaaatggtttttatgttaattgtttttcggtttttacagatgctagacagatttgagcaacacacactcaagtgttcatcatgtaaaggagcttacacagcatttcaaacatggcaaaaggttctaattggcgccacagttggtttctgtgctgcagctgggattccttccaggattgaagatcgaattctcttggcgggattcgcaatactcagtgctggtttagcttatgctctgaatgaactccaaaaaaattttgtgtttgttgattatgtacatgctgacattgattagagaatcactcaactcaaaagagtcttaattactgtatacagtttaaattgataaatcatacaaaattaaggtatacgtgttaggaaggaaatacaaacaaatattctaactaaccatttctgggttgtagaaacatttaatcaggaaagagatacaaattctcttagcctaacaaagcaaacaataatctttataaaatcaaaaaagaatcaaatttcacaaagtaacaaaattgggctaaacagaatctctgatgacaaattgggaatagatgcaaaaaaaaacaaaaa

SEQ ID NO: 296061 - DNA, 4099 bp, Cannabis indica
aaattgaaaaagatatgatttttttgaagtttcgggtttgaattggtgcatcgctcgcaccaggcttcagacaagaagcctatacgcgcgcatgtctgggtgcatcatgtctgaagacacgggatgcacactggctttagacaggggacacacgcatcaggaggctgcagatgccgtgcccagaccctgcaatcgagaaatctcggcgtccccctgtcatccgcgcgcgtgaatcataatttgcaacctcttgaggctgcacttgcagcctagatgccagccgtaccacaaattgcgtttttgtgggatttttcccaaaaatccaattttttcaatttgcaaacagatttaaaaatttgttaatttctttaatatttatatattatttaatttcatcggaagttttctccatgttctccagttcatccattcagcccgtctttggcggtgtcgtgtgccatgattacacgaattctcacctctacttctttaccaatggggctataaatgaacaacaacgcaacatcttttctttattcctacgttttttgtacttattctctgttttcgctatgtttgtggattctattctgcacaatatggagtcgagcctggtgctgtctgaaaaagaaagagcagttcactccttctctgatgcggatccttctgtggaacttgcagagcctagatttttcctcgtggctagatgtttatccacagccttcaatccaaaaactttcactaagaagatgggggaattctggagcaacatatgtcgttttccggtagttgtttatgaaatgcattccaattttttttactaactattggttgtgcatgagacaaactaaggattctcaatggtgaaccctggcactacttcaatcatcttattttgattcactctccgaagcaacttcagaacgttgtcccagaagatatgtccaaggtgcaattctgggtgcaaattcatagattgccttttctcagtaaatccagagctttggctatgaaggtgggtgaatggattggggaatatattgatgtgtttgaggattcgctctatgaaggatgggggtctttcattcgcatcagggtgaagcttgatatttctcatccccttatgagaggcaaattggtgaatctccctaaggttcgggatgaacattggattgagttttgttatgagaacctccctattttttgtttccactgtggtcgaattgggcacccgtttgagaaatgtactggttttatggaattggtggatgctggcattgatcctgatctcccatatggcccctctatgatgggtgacaaactccctgtttctggctatgaccgttaccgcaccgatttttcaactgctaaagtttacccttttcttacccgtgttgcaaggaagtctattgcttcaacaattcctcctaataatactcaccaaattcgtgccattaccactgaccctcatccttcccctctaactgaggctgaaaataaccatacacctaactcttcacaccaaacaattgttccaatacctgagcttccttagccctttccttcttttttccacagtttatccttagcttttcccataactcctacagatacacccaattccagcaacaagcacacccaaaatcaccttaactccgcatcccaaactaatgtttttgccacttatcccccctcggatgttatcaatggtcctggtatgaaaactctattcagtgattctacaattacttcttttaaggacaaaggaaaagccattatgactgatgagtttaatcaagatggaagttcctcaaataagactttcaagagacaagtagatcctgaaaatttcagaagtgttttgaaacgttgccgcaacaacaacacttgcaacaacacttttaatgaattctgttctcagtaagtttctgatgccaagtcggattctaatgaaaattattcatttttttcagcggaggttacggatcagcagccctgcaaggagccatgaagatcattagatggaatgcgaggggtttgggaaacccttcagcgttcagacacctcaagttgctcgttaaacagcagtgttcgcatgttctttttattatggaatcaaaattagtttgtaattctattaatcgagttcgcaatgttcttaattttagcaatggtttggaagttcctaggcaaggtttaggtgggggtatattattgttgtggaaagatcatgttgatgtatctcttaattccttctcaatgaatcatttcgatgtttttgtttcgtacgattgctggcctcaatttcactttactgctttctatggttccccagaaactaaccaaagaattcatacttggaatttgttgcgttctttggctccctcctctcttgaggatccttggttgataatgggtgattttaatgaacttttatctaatgatgataaagaaggtggtcctttgagaagagaacaattgatggaagagttcaggaaaacaattgatgactgtaatgtgacacaactggactatttgggggataaattcacatggaccaataagaactacaatggtttattggttaaagagagacttgatagaggttttacaaatggaaagtggaaggacatttttcttgagaatcatattaaccatcttgattactatagctcggatcatagagcaattgaatttaatgtttcacttcccaacagagatcgggcagctgttagaaatcgtagcaggttccgttttgaacagtttcgtcttaacaactggaaaaatggtttgtcagaggaccctatgtctaatcttcttgagaatatttctttgtgttctactgctcttcagacatggcaccacaacaagtttggacagatgaaacaagatatcaacacagcctagaaaaaagttgctgcattgcacaacagtcgggtaaactcttctactcagtacgatcaaatgttggaagctgagaaagttttagatgatttgttggagaaggaagaactttattggcaacaaagggcgagagttgattggttgaaaagtggtgatgcaaacacaaaaaattttcattcaagagctaaggctagatataataacaacaagattagatctttatgtgctagtgatggaagaattctctatacggatcaacattttgctgatgaggcttctctctttttttttcccaattgtttgcttcgaatgacactgattttgatgctttgaacattattctggcagcaattaacacttctattactgaggatatgaatgagcttttactaaaggactttaccagtttggatgtggacgaggctttaaaatctatggctcctgataaattgcctagtatggatggtatgtctgctatgttctttcaacaacattgggatgttgtcggccctatggtaactgctagtgtcttaaagattttgaatgaaggggcggatatgaaggacattaactctgctctcatcactctcattcccaaggtagaccaacctcaacaattaagtgactttcgaccgattagcttatgctctgtgttatataaactggtatccaaagccattgtgggtcgttttaaaaaagttctgccggtggctatttctcagaacaagagtgcttttcttccgggaaggcttattactgacaatgttctccttgcttttgatcttgttcactgcctcaaaaataaaaagagaggaagacaaagttacgctgctttaaaattagatatgagcaaggcttttgactgagttgaatgacacttcttgaaggctgttatgcttaaaatgggttttcatgagaattgggttgagcttgtcatgagatgtgtttcttcttcaactctctcctttaacataaatggtgctattaaaggtttggttactccacaacgaggcttgaggcaaggggatcccctctccccttatctctttctcatttgctctgaaggactctctgctttattgcgattagaagagcataatggtaatcttaaggggctgtctatttcttggggcacaccttcgatttctcacttattatttgctgatgatagtttgcttttctgccatgctaatga

SEQ ID NO: 296062 - DNA, 6122 bp, Cannabis indica
cctctgttctcttgttcttttgagtgaattaataaaaatataattcactttctttcattctctctttcggcattaatgctcaaatcgagaaatagtctaaatttttttgttaaatattttagttcctcagctaaaaccacgtgcttaatgcagaagtgatcaaatatttttaatatccagaagttgatcattttttcctaagtttggcacttacctttcatactgtttcattcatttacaaacccattgttatgataagtcattagcattttatataatagtgagcagtgaatcttgtggtaaaacccttcaaatgtatgcacatatcaaatggaccaagtaataccaattcagaaagagattagtgttactttcttcttttctcagcactcttctctatatttgcaattaattgtgtttcgactccacatacaatgcattagacaccggttatggtaggcaaagatttctttataatttaggtatcttgcttttcaattaagcagtgcacagtacataatttaattgttgctccggtctgataaatcacttctgtacccgagtaacatttggctactcttatatacttcattacaatctgaaagcgttacaaatcgccaatgactttcctgtcctcatccgttggaaacaaactctgctatgctcatagatactcaattttcccatttgtggttgaaacattgtgtagtgtctcctgcaaattagaacaatatgaggagttatagggtgagtttatagtgaatcaaccaagtgggaagccgccatatgtgaagagaaggtgtgattgtataattccagggacattggtagatttcaaaatggaaaactctgcatagtcttagtttgacagtttagttgtttatgaatcaagaaagaaggctgtaagatggcatgtcttcgattcgcataacatcatccattaaaagctccctctctaattgtgcccgagtagattttaaaacctcctacaacaaaatatgtacagattaaaataagtactcaatgaattattattaacaagtaaaagagaatggcaaaaacttggcttctcacattaaactccatgtatgtggcatttctttcaagccattgcttgtccataaccatgaaagccacacaatagagcaagtcaaaggcccactcattttctggaaacacatttttgtagttacaaaatgttaacatcatgggtaaacagttcagttcatcaatctaatataagtttattccacaatcttacctgtcaacatctgcaagaaaacagatctaacaaaggtccttgacttcactgaaagtaaaaaatacaagatctataagtttcatgccaaagaaattaatggtgttagtattggtatcttattagaaactctgagttaactcaatcaaattctgaagacatattgcttttcttaacttactggtgtcaaggtcaagcatttgcatgatcataaatgtgatatttactccagccacagcaaatggatattcccaagcagctggcttccctccctgcttctttagtagaagctggaaagatgtctgcaatgacacacagtaaaaggcacatacaaaattagtgaaattgcaaatttggtttttcaacttggtttctttcatatttccttctctttcatataagataacaaagtattttttttatcttactgaaaatgtcttggcaaagaacaacaggttctccaatgaaataaatccagctcctctgctccaagttaaatattcgtgagaaatgagtgacaggattttacactaaaagatgatagaaaaggagtaaaacaaagctgcagtaactcaacgtatattttaacctgaaatcggttgatggatctttaccctgccaacccatttctttccattgatcagatatcaagccatgaagctcctgattagggtaagtagcagcccaaagagatctcaatgcttcctgttctcataaaattttcttagtgagtagatactgggtaaagaagaatagttcaaactaaatcatatacatggaagaaaaaaaatcatcttctttatataaagtattttagaacagacaacatggaaatcttagtgtattgatagtcataaggttattgttcttataatatcatcaggaagtgtctagtttgaaaaggttatgaaatatagttgcaatttaaatttgagagcatgaatatacacctgatgatctggcctagaagcatcaaaataaaccttcattcgatgcttaagccgtttaagtttctcctcctgcaagttatgaaagaaatcaacaatagaatactgacaccaaggcggggaatcaattacaaagccattttcatttaatcaccgaaattgtctaaaacaaatatatgttcataaagttttgaattaccatctgaaatctatgatcagacagatcccccagaataccatagggtaattttttgttgtagcgccaacattgacttaaaaatcataatgatatcacaacatatttaagtatataaccactgaaaaataaaaaataaaagaaaacgtgtatcccagttccttatttcttaatgtcatcatcttagttttgactgttggattacttgcctgttggggtgtcaagttgacgcatattcgttcataatgtccttttctcttaaagcaaacacaagtgaggcctttgccaatccatgtaggcgaaacacaagttgcattgtcatctgcatagtgattacaacacaatgaaacgcctagtttcagccaatacagttaattattacaaaataattaaatatcaatatgcagttcatctctaatcacggctattaaacaaccagaattttgacacaagaagtagcagagttcacaaaatctttagtgacctgaaacaagagcaacaccaaagcatttcataacagctaggtgatttaccactgattttgcagcctctccaaatagtggatttctgtttcacatgagataattttatttgctagctagagaaaaataattacaaaactaaagaaaatataaatacacatacacaatatttgttatcaatgactatgccttttcttttacagtatcaatacaaatgacacaccagattttacatgtgtacaacaatcttgcatataaaaaagagagcaataatattcaagaatatgatgatgatgtctgaactaagaaaattgtcatgggatgtgaccaactttataaagtataaactctctaaccaaacgccaactacctcaaccaaactgccccaatgctccaattatttgaggaatgccgagacaagagtatagccaattccttgttatccgaatggcattatagaggagacggcacgttgttctagacaattcaaggcctcaactcaaattggtattttgtgcatagctgtggtattgtcgtattatataatatttatcttatataatccatctaaaacataaatacgttgtgtcttgtgtatactgtatacatagacataaataccacaacattaatcatgcatatacttctaaatataatttataaagaaaaaaaatgaaagacggggtttcacacgctgtgggaaacacaacatcacgtcgaacaaaatgtggttcatatcttatatgctaatacctatcccttttcacgatatgggcaaaggccgaaccagaatttatgtatagatgttgaaaataaattaatatgcatatttaatttttttagtcattgcatgtggcacctgatccaatctggtcgggagaaaaataatgcacgcgcttataaatattacatgcaactctataatatatataaatattattatttgtttttttaacttaaagcaagttcaatttctcataacagtgactctgttccctcccaagctctaattaacaattatggtagtgcaagattataaaatattaaaaaaaagcaccgtccaacattgcaaaaaaaaaataataattataaaactaattaaaagaaaccccaattagtaaactaccgaaaaaaaagtacatggacatggaaaactatgaggttttgcaggttgtgttgggttagcagtaacatgtgggtattcataaaagggttcatctcattaaagtttgaccatgaccagtccaatcagcaaagaccttcctcatgtgatgggaccatttttatgtaattgatagtcaatgatttgattgaacggtgccgttaactaaacacacagcataatacccctaaacttccgtgaatttactcaggcaccgtcaactctccccaacatttgcaaatcgtcgattacatttattccgacttatatgtcacacacacatcaatacatacatatatatttatatatagagagagaaactacggtagagtgccagagtgatcagtgctcctttatataccagagcgatttgaacgatacattttaatttcaatcaccgatcacggattattgagcaatcgattcgattagattgtttctcattctaattttaaggatttcagatcgagatcgtaaaaaagagatatgtatcataatgaatcgcgcacagagattgaaaggagagaaagaaaatacctgatgaagcagagttgtggtgaccggtgcaacgggaaacggaagaagatgatgatgatgatgatgaaggagaaagtgtacggatagggacgaagcatctctgagtcctaacgaggctcatctctatatattctgtaatcccaacccaaccgctgcaattattgtccaatgggttcttcttcttcttcctactgtttagagatagagaaagtgtgtttggttcggagctttgtgagctcactttttgccactgaagacgtgggactctactctaatgtctcaattacaaatcaaaatatctatttcttcttaaatatatataggtgagtactatgttacaatattttagttaatttttacgcttaaaaatatatctcggaatattttttttcaaattttttttataggtgctgttcgttatgtttacagtatcatctctgtaaattttttaaacttttctaatagtttaccgtatcaaaaatacatttacagttttttaaacgcgcgtgataaatttgaatatcaaaaactctgttttcggtattataaactattcggaatttttacaaaaatttacaagaatgataatgtaattataatcaatactgttatgaaaaaaatattttgacatgtaatttcggacataataattaactaaaaaattataataaaaatttttaattaatactcatgctatatatattttctctttctctaataaaacttttattattaataatttggaaacaaaacgagtttagtagggttgcccacaggcattaaaagacaaatgactttttccgggaaaagggaaacgagggagagaatttagttatttggtgctaatttcatcgccgaaattggatgttaatgatttaattaaattggagcaaaactattttaattaattgtttttattagagggaatcaattgtgattgccataccacacattaaagtctctatttaattcaggggagattaatatatacacttttaatcaaaattaaaatatcaaagcctcaataaaaaagaaagaaaagaaaatggaagtattcaagtggagggacatgaatttggttgtttagttgagaaatgacaagagtccccaacagcttgaacacagtccacatggcagccgcccctagaatagaaaccacgcccacgtcatcatataatactactacaaccacgcgctcccattcctttaaataatatattatattaatttaataaataaataaaaaactatttaaacttttttttttttaagaacttgtgctttattaaaacaagaagcaaaacaagcaataaaattacatggaaggtaaagaatcattccatactaattcattatctaatccaaggcctagcttagctaaatgttatagttattagaatattttatttatggaaattattttctaattaaggaaataattttctatttaaggaaataaataaataattgattttctgttaaatgaatattttatattcattgaatctggacaaaatcaattatgtaatattctatatat

SEQ ID NO: 296063 - DNA, 2282 bp, Cannabis indica
agagaaagagagatgaaaaaattattaaaattaaatctgaacaaattaagtatgtccacattattatatctctcaaaaaggattgttggacatacctagtctatgtaacatctcaataaatgtgaaatccaagcataactttcaggaaagtcaaatttatgaatactattacaagattaaagagcaattgaataaataataaaatatagattgatacctttaagcttaattttggtactagttctcgtgagtcttggccgtgatctgcactccaaaggacaagcaatccatcgctagcccccgaaaccagaagtgactgcaagcaggagaatgtagtgtagttaagtggagtttaacttagaaagacccatgcaagtatgcagaagttatatatgacataaagaaacaaatattcatgcttagagtgctcgtgacaatgggtagctatcactctacattagcatgcctgtgtttatatatacaagaattacattacaaagcctgactgtacaccaaaagttatataaagaattgaggcattgcaacagcaactagatccttccattaaaatgaataattttctatagttcatcaaaaggctgaaaatacgaaatccaaattaaacttaagcctttttgttcctatttatcgtctattaattttcaaaaagcattcagtcaacatccaacactacagaatggggatacttttaaataacacagttatgcaagatgcaaacacttcaaaataaaattgactgaatttcattttctacaattaaaatctacctcaccggaagaagccataaacgtcatcagacaagaaattgaacctttatgtcctccagtgtatcttcgtactagctgcaagatatgtgtagtgtcataaaactaaatttacactcatatttgtgaaagaacaaaattttgacaaaagctgcaccttccatgatatcatcgatagaactctaatgacaccatccgatccaccaaaagctactagtgggacatctccggcattggatctagaaaggaactccatactgcaaaagtcagctagaaaatgttaagagcaatggtaataagacaaagaaacatacaaacagcaacaaaacaaccagtatgaccctagtgtatagccatttctaataggacctgctctgttaagagctcaatttatttatgtttggtgaggcaacctactctactggacgctgtgcatgttgatatttaatgttttttcactaaaatgtaaatagatttacattaaggaaatcatgattaccaaagaagcgatttgttatcaagctcctgcttgggtacatctcggccacgcatagttaccaagtcaagaaaaatggctttattttcacaacagattacaagaaaatgtcttccttttgttgatggaggaggaggactaaaagaggtgatatgattgatggctgatggagcctcagccgctgcagcacggttgcgccaaagttgccaaaatcgcacatcatcatcatagaagctcacctgcttaacactttaatgggaagcaaaatggaagtcaggttccaattgagaagccaaaagaagtatcatatgtaaaaatccattacctccctccacgcatggcttctgtaggcttccctttaggctctatcatgaacaaacatcaagagaaagaaaacatgagaattaatttccttgcaacagaaattatgaacagcatcactaacagattaagacagactgatttaaaaaataaataaaaatcatactaaaaatcagaagaagagaccactactattatccatgccgaccatgttaaagttcatgtatcctagataaactggcttcttattatgtatcttgtagtgcacttgttacaaaatgtctatgaatttcaaggtacaatttctatttttatttttgtaatcattgaaatagaaagcattcagaaatgacattaagaaaaggtctataatgatctttatctaaagaatgttcttccaacagcaacactgcataatttcatgatgcatataatacatagtaatataaaattaaaatctatatggtgctaagaagctacctaaattaaaagacaaccataacaaactcttaaatgaattaagcacagtatataattactttttttattaaatctatagacactaagaaagcataatgccccggacacaaaaaggatcagaacaccatgtctcatgtgcttcaagatacaagttaaacaaaattcaaaaacaagaatgggatttttttttttttttttca

SEQ ID NO: 296064 - DNA, 3020 bp, Cannabis indica
attttattacttttttttttttaaaaaaaaaagaactaataataacaaagttgaaaagattagataacgtcaaaataaagtaatattatgattctttctttttaattattttttttaaaaaatatatatattatctttttatatttcctcatacgatttaaaatttaaaatccaaaaaaaatcaaataaaaatacaaaatcatatcacccctctctatatatagagtacatatgaaactcacttctcatactaaaataaatatattcctctctagttcgatttttattttctaattaaaatatttctctttacatatggctatgcctatggtacttaaacttaattcttatactaatcaacttcaacacatggttgcaagtttcatatgtgtagccaagaaaatggacaagaaaattaatcaattgattagcgagttgatcaccattcgaaaccaatcgaactttcatgatcgcgatgaaattgagaaattagggtttgaactcaatagtctaagggacaatcatgaaaatatcaagaaaggtttcactaggaccataatgatcttttctcaattacttgatcgcgatgattctgaagactttacctacttacaacgccttcaagaccaagttttcaatctcctacctttaaaaggggtgaaaaccgaaaatgaaatcttacttgtgatgcaagaaatcaaacaatggaatgaaaaggtggttatgattcatgagaagaggaaagagttggccaatttaatatttggtagagattttcagtgtgtgagagaatacactattgatctaaatgaaatgccgtcaaatactactattgatctcaatgagataccattggaacttatagtagaggttgaacatgatgatcaagtggagtggaattcgattagggttctgactgagatgtatcgattcgaacctaacaagataaacgaggaagagggagttatgagacagttgaaaggaaatttgtcttatgtatatgacaacatggaattagacaagaacaacatgatcgatgatgaagttctagggcaaaatagaaacaaactagatgacatattacacacgattaatatgatacaaaattcgagtgaactcatcatgaagattgaggagggcaataagttattgttaaagtggttatgcaaaattgagaagactatttttattttggttaatgatgcagcgaatctattattaaaaacttgtcgcaatcaagtgattgtaaatgagtttagagcaaaactacaagggcttaaacgaaaagaacgagggcgagtaccattattagtttatcgaatactcactttactagaaggagaactagtagtcgaagaagcaatgattcgagaaggtgacaacagaatcttattcaataaaattgagtgtggttattttttgcttcaatattacaagatgattttgttgctcacacatgttttgaacaacatttatttaagcactactagtctagatatttataccaagaagaaggcattgcttgaatctaatgaacttgttagaaaatgtgatggattccttttgaacttggttagaagttgaagtgaagtagttgaagaggagcaagaggaagaatttcaaacaattatttttgtctatttttaatttgatttttaagaattaaatttattagatatttaatttatcagttataggatttaattatatttgtcatgtattaaaaaataataatgaaattgaaataattaaagttttaattaatacgataatcatgaattagaatattgatttgatttttacttaaactagtttgactaaaattaagacaaaagttgccacaaaaattaaaacaagagttattattaatgatttaatttgacaattgcatggttaggtatgaaaattttaaaaaccattaatttcatcataccaatataatttactcatgtgaagaacacatacttattaaaaatttcaatttttgaaaagagatcaattttattatatctttgttattaggtactaataatgttatgatcaatctatgtaagccatcttcataaaaacaaaaatagtgttttctctgtttataaatttttttttagtgttactatcgtgtctcatgcctaatcctttccattgtatgctcaattatgagactttttttttgcttaatattctttgttcggtgcccaagaacaaatctacgagaatttaggtcaaaataaataatatcataccaatataaaaatatataatattcaacatcgccgtaacaatttctttacagtatcaatttgagaagcaaataatggcaattcaccaaaacttgcaacgttaaattttaaattaaaaagtcatcgctaaacaataaacatcttatacaaaattctaaaaataataataatataaaaagatatattgattttttttttaaattatcttttttctttttaatatggaaactaatctattccacagttgaaattttaatcaaattaatttaaactattttttatattttgataaaaaaaaacgtttatacatgaatttgggttctccattcaaaaaatcagatgatttcattcaaaatctctcttttataatctatggctacaatagataatataatctcaacttttataatgattttaattcaaagcatggtttctaattttttacatgatgtaaaaatagccgataagaagataaaaatattgaagcttaagatgatcaagaagaagaaacaaaataataataataagggatattgacggctaaaccacctgaactttacggtttgtagcacttaaccacaaaaaccgaatttttggcggctaaactacctaaaccctggttccgttttgctctacacacctccgtctaaaaatcacagttaagtgtcacggtggactgtccacgtgtatacacttgtacacgtggtaagtttttagtggtccacgtaatattaatttgaaaataattataaatatttaaaaaaaaaatcagaaaaaaaa

SEQ ID NO: 296065 - DNA, 5588 bp, Cannabis indica
aacctccacagccacaaccggacaacaatgaagctctgaagctcgttactcgacgcgcctccgaaatggacaccgataaggtactattttgaacttacattctacaacacctcgttactttcgttttctgtgtttctctttctagatatgtgtatgtgtacgaataagtatgtttcggtgcttagatcgtctttgatccagctcaaaaccttgattttatgtttaatttgggagcgatctggatgtttttggttctctgatgtcggtttcagctagcctcaagtttttccgcgaaagtttccggcctggtcttcatcggcaagactttgtgttagatgttctttctaaatttgattattctatattagatgctctttctgttttgtctattctttgatttcataactttgtttttcaccaacttaattttctatatttatttgatatatttttctaattttcattaccaattttctgaccaagatctttcatcttcgtattcaggttaagtactttttctgagttcatttttttcctggtcgtttgccgaaaaaggatttgttgtaaaaaaatatttttaccgaaatgtgttgttataattttcttgataaccaaaccaaaacaaaattagaaagaaaatgagaaaattatgtgattcaacccagctcagctgaaattcatttttgttggaaaatctatttgtggatttccatcttttgaactccaaatagcgaacattaggagttactagttatttctccatttattttcgccaatattctgtcctcaatttagtcaatgttgacaattttagcttcgtaattttctattttgaaataattgcgttcatccttagttggtgcacttatttgtctcgttgatctcaatccttgtcctagcacctttttttcctccatatcatactttgacgtgtattgggattcattgtttgcgctagctttgtaaatctatgtggcattgtgtgctttaactttctttgatggattgttcttcaaactagttttagtttgcttcaggatgttaaagttgttgattctttgtactctcttgtttggactgcaagtttgaagagcattaacttagattccaataaagagataattcatcaccataactctcaagaaagcactagaatattctactgatgctttcttgtgagctatggtcttcctgtttttcttgaacttaaataacttaaatatgttttgaaatctgtcctcctttggctttatcgaaacttacatgtcatgataccaatttgtacacggtagttatgttagttcatttaatgttttgtcataatatttagtggatgtcaaattttccttttcagtgcctggtgtgtttttaacgggctcgtactttgtctttgtttagcttatatttggacgtttcaaaatagacaagaggtgttcgcagggtttcgccatataaagatgtagaagatttaaaatagaaagaagtttccaaagagtattgtgcttttatatgtttaaccctgtgaattgtccttacaaaaaaaaaaaagaaaaaataaataatccatgtgaattgtatggaaaactattgttcaaattataattattacattaccacataaatatgatatgaatatgtttgctcacaaggctgttcattgaggcacaattgtcaatagatcaaactgctttccgttagatgctgcctaagaaagtgtatggggcactggcaattctgtaccttttgctgatgctaaaacctttttgtaattacaaattgcaggatatgtcagcgtcatctactgttattgagggcaatgatcaggtaactggtcatatcatttcaacaaccattggcggcaagaatggtgaacccaaacgggtaagtagtagaagattcttgcttttcctctctctctctctctctctctttatatatatacatgtatttatctatattcacctatttgtattctgaggtgtatttcttttgtgcttgtgacagacaattagttacatggctgaacgtgttgttggtacgggatcatttggaattgttttccaggtataaatatctgtctcattagaaaagaaacttgctagtattttttctacccttctctaatctattagtattttttctacccttctctaatctattctatttcaggcaaaatgtctggaaactggagaaacagtggccataaagaaagttttgcaggacagacgatacaaaaatcgtgaactgcagttaatgcgtttgatggatcatccaaatgtggtttcactgaagcattgtttcttctccacaacaagtaaagatgagctttttctgaatttagtcatggaatacgtaccagaaaccatgtatagggttctgaagcactatagcagtatgaaccagaggatgccactcatatatgtgaaactttatacatatcaagtacgacattatctttctcagttccaattttgttggaattatcaagaatgtatattaataaaaactgaaacacaacttttcagattttcagaggcctggcttacatccatactgttcctggagtttgccatagggatgtgaaaccacagaaccttttggtatgtttctaggtgggttttgttcttttatataatggactgtttgtctaacctattatgctgcatatatactgcaggttgatcctcttactcaccaagttaagctttgtgattttggaagtgcaaaagttttggtatgcttacctcgttgttttccccttttatattactctatatatatgtataattaattatatataagaattgtaaagtgggcatgacatgagtctctcaatagttgtatcagtagaccaatctcgtgaacatagttacatatgcaataaaagggatgtcacgtttgtgccatggacacagatatgacattaaattaaattttcaataatgattttatgtatcatggttgggactctgtaggtgaggggtgaagcaaatatatcatacatatgctctcgttactatcgagctccagaactgatcttcggtgcaacagaatacacaacatctattgatatttggtcagctgggtgtgtccttgctgagctccttctaggccaggttaggattttcctgttgattttattagttggaaaataatagaatatttatggcttctaatctttaaactcttttacagcctctgtttccaggagagaataaagtggaccaacttgtagagataatcaaggttgactttcacagttatgtcaaaattactagattacttgattagaatcaagtgtgcttatattagacatttatgcaggttcttggcactccaactcgagaagaaattcgatgcatgaatcctagctacacagattttaggttccctcagattaaagctcatccttggcacaaggtattacataatatgcatgcaagtgtgaatgttacgagtgtttgtgcaatggaaatattattgccctctgcgtcctgaacatgtcgtcttgttatttttctcctatgttttgttctcgaaaagccaatattaattgttgtcttatatctctctaacattacaactctcaccaaattcttcaaggtcttccacaaacggatgcctcctgaagcaattgaccttgcatcgcgacttttgcaatattctccgagtcttcgctgtactgctgtaagttttaatctttgatcttctagtgctgtttagtctagtctgtaactttgcagtctccatattatctcaagtttctattggtttcatggcaacattggttttcctttttgaaaaacatcccaacattagttgattaaactattttgatgacccttctctttggctgcaataacagttagaagcatgttctcatccgttctttgatgaacttcgtgaacccaatgctcgtctgccaaatggtcgcccattgccacctctattcaacttcaagcatgaagtgagtttttgtttgaacattgattattgttgttacttgtaaatttaagtaatatatgcatctatttagcatggcttgcaatcttacttggtgtttcctcttattgcctgaacttcgtattgcagttgtcagcagcttcgcctgaactcattaacaggcttatacccgaacatatacggcggcaggctagtcagaacttcccacacttggtaggtacttaaaaaaaatgtgatgatacaaaacatggaaatcatcactgtccttttctggtggtagatatatatatatgtgtatgggaagccaaaagggcctctgtgtggtctgtatatccgaaccaagagcattttgatcgatcagcagctgtttctcctcttcctctaaagatgtacacaaatacttgctgttgttcggcttaactttgggaaactgtcgacaaaatgtcatttagtattaaacatagtattttccttcatctgtaaattgttttgatcttaagaattcctgaagaaccctaccccccaaaaaatggcagagtataagaaggtgattctgttcattgtctatctatctaggtaagcaaatactgtttcgtcattgttttttttttaaatttatttccttcaagcttttaatttctttgctgtttgttgcaattcctttcaagaactataaattggtattgttttaaattcagctgtgtttctctcttgctcttctttaatttaatttggtctaatttttcgttctttaagcctctgcctcggcaaaaaattgtacattcctagagaaaaggaaaagaaattggaattagaatttcctcgcattctaggcgtggagatcacatttctgattaataaaatttgattaaaaatgggaatgttatgactgaaattataatatttaaatgcaccattttattttccaataagtaatgttgcgctcttcatagtttggtatgaagtgcaattctgaataacactacaaaatcccccaacggaaaatggaggaagaacagttgatgtgaccaagaaattatattgttttccttttttttcaaaaggaaaaaaataatatttattgctatccctttaacaattagagggaattatagccaagaaattaacaaaaatgtagagacatttgcaaccttgcaacctctcaattagccctacttggtcacttcgtgtatagcattagccagatatccaacatttccagtcgtaacacccgccatgctgtataccaagagaaaagttcaattttagatataaatatatgaattcatttctccagtaataaaaataattaaaaacaacacaaatttactatacggccattgcgagtcatatagatatgatattcattggtcaaacggccacctgttcaggtgtcatcccactgtagcagaacatgccaatctgtttgccaccatcaaaataattcttaattgcgtcaagagacaaatacaattacaaacatattatttccctacaacaatccatcatacctgattggttatatgctcccacgataaaggcgagcccaacttctcaaggtttctcttaaagcagttcgcattccaatgatgcggtcggccatgccctatagattatacatagta

SEQ ID NO: 296066 - DNA, 3292 bp, Cannabis indica
aaaataaactcttaaaatacactgtaatttcaacgtttccataagttctcatttatccatttggagaataaaaagtactcatatcgatgcatgatcagagataagaataagatgctcaggcccatgggctggtgctgtaaaccgattcttctcgataatgatgtcgtaagcccaggcccaaatcaaggcccaacaaacaaaccaaataaaaaataaataaataaaaaagaatgagagaaggaaggctttatcttttgacaggtgaaggccaataggccattgaggttcattataaataggatagagactcccacactcaaacgatggtagccattgttgtgtccttggcttctacgttattcacagtagctgctccttcttcttccacctctttcttaactaaattgcgttcttctcctactctcagactttcttttgcagttacacccttgggttctcgcagaggaaagctcatggctcacaccattgctagggccactcttggccttactcaaccttctcccattgaatccccaaaggttctttctttctctctctccttttatcaaactccataacccacttttgcattttgttttctttagtgatttcttgaggattttgtcgagttagaattatggtgaaagtttgtggatcatcagtgtagtaactagatcattttatttttgatgtgttatggctcacttgggatgatctttgtttttttgtacaaacccttaaatatttgctaaatgggttttcatttctcatcttgaatcctgaattttctttctttctttatctttctttctttattgaattatcttgggtcgttgttatttgatgattttggggtttcatttctgtattttatttatttatttttgaatctttgaaattgcctattaactgtttgtgaaattgcccgtgaagatctcttttgctgcgaaagagatcgatgtgacagaatggaagggagatatacttgctgttggggtaacagaaaaggacttcaaaaaagatgataacagtaagtttgagaatcccattttgaagaagctagattctcacttgggtggtctattggctgaagtctcctctgaggaggatttcagtggaaaggttggccagtcaaccattgttagacttcctggtcttggatcaaagagggttggtttgatcgggcttggacagtctgcttcaactacagcggcttttcggggtctcggtgaggctgttgctgcagcagccaaagctgctcaagcaagtgatgttggtatagtgcttgcttcatctgaggatctttctgctgaatctaaactcaccacagcttcagctattgtatctggtacttgttcatgttgttttggcattgatctttttggtgctaaactttgtggcttgacttaatgtttgtactttgttatggatatgtggtattttacttagtggggttgcttaattttgatgtaggaactgtgttgggatcccatgaagatactaggtatcgatcagagtctaagaaatctaaccttaaatctgtggacattcttggtcttggaagtggtactgaattggagaagaagctcaaatatgctgaaaatctttcttctggaataatttttgggaaagagcttgtgaattcacctgccaatgtacttacacctggtaagtatggatgttgtcattgtgctcgctattagttttttttagtcatgtagtatttatttatagtgataggattttgtgatccatgcttgttgttgtgtcttcacttcacattatttttacttaatcttgacgattcttattgttgatcctatgattattactattactataccttaggggttcttgctgaagaggcctcgaagattgctgcggagtacagtgatgttctgtctgcaaaaatattggatgtagagcaatgtaaagaattgaaaatgggttcctacttggctgttgctgctgcctctgcaaatcccgctcattttattcatttgacttacaagccttcaagtggacctgtaaaggccaagttggcattagttggaaaagggcttacttttgacaggtaaattgtaaattctatcaaacaaattgatttttaaaggcaaaggaaaagtagaatttgttgaagaagtttgtagtgactcaaagtttcgatgcagtcgtacctaattgatagtggattgttaataaaaatttatactgttcagtggtggctacaacatcaagacaggacctggctgctctattgagctcatgaaatttgacatgggtggttcagcagcagtcttaggtgctgctaaagctattggtcaaatcaaaccccctggcgtagaggtgagcacttagtggatgtgtttttcaacttagatgtttgatgacataattgcaacttgttcttgatacttatgagcaattggatttattagttcgaaaattctgtttctaatctattgctcttctatatgcaggttcacttcattgtcgcagcttgcgagaatatgataagtggaacaggcatgagacctggggatattgtgacagcatcaaatggaaagacaatcgaagtatgatttctttgccttataattttgcatgttttacagaagtgacaagtgaggtttcattatcaaccaattgtcttgttatatgctcaaaatacatgaaagaaatttaatttctaaagatgaggccatttaagacatttgggtagacttttgtatattgcactgactattaaatgagttagattatatgcaagaccatgaaagctttacttctgcttgtattcggataaagtatgtgtttctttaaccgagcataattttatatatgttttaatattttctggcctcaataataccacaggtcaacaacaccgatgctgaaggtagacttacactggcagatgctttggtatatgcttctaaccaaggtgttgacaaggtagtcctgaaactatgtactgtattttgtaaccatgtatatgtttgtttactcttaggacagagttaataggaatatatgtagtggaaaatatcattcgttgaaacttttttcttaggtagttttaatatgcgctgtaacatcatatactaattcaaaattcatatttcaaataatgaaatttttatatgagatttttcatatgcttatttatttaataacaagatgagttttgcttttctccacctgagttctattatttaatgttgagttctgctattgtatatgctgaaaaaaatgagtgctttttctatggatctttaacatgggtgggtgt

SEQ ID NO: 296067 - DNA, 908 bp, Cannabis indica
agtagattgtcaatataccattactctctacttaaatttagcatataatttatttaacctaaggggtctaatgggaacatcattcataaaactgagtatatctaaaaaaatatgaatatagagataaaaattaaaacaagtaaattaaaatggatatacaatataatttcctcattattttacaccttagttattatgtttgtctgatttatttatttcaacatttcttttgagggtatcatatttctttgaacttacttgtacacggattacaagcctaattatcatatgtaatttttatttttttaacataaagtctaaaaaagctgttaagaaaaaaaagaagaagaagagattccctagtgataccatgtgaaaattaggggtttcaaggccaccaatttattaatttaattccgtttctctttatatgaacagttcaaattatgagcctattaattataagtagaaataacatatttgaaaaataaataaattttgggttttccaataagtgcattgataaaagcaattgcccaaaaataggtgacttttatttcaagtcctgcaagaatcccaacgtagagattcaacgacaaaaagaaaaaaagaaattgtatataggaaaaggaaaaaaaaaatcttcttgaagataaccatgtttgggaccactcttaaaatatattttcaatatttatatattaacaattaaaatacaaataaattaattaagcgtgaaaaataaaagctgtaaggctattattaaagtgatattataaaagaataacctctctctttcggcttatcttcatgtggacacaattagaatgcttattaagaagaaaaaaaaaatcatttctgttttagatatttatttttttaaagaaaaataaaacgttcattgcaaa

SEQ ID NO: 296068 - DNA, 3025 bp, Cannabis indica
gcagagctatagcaaggcacctccgggaggcaccagaccccatctgaacagtcacctcgcatttaatgacgcatgggagaaggcgtattggaactgccataagtattaagtttgacggtgtaactcctcttctacagttagtacgctatgattaataagcctagtgacggctactttttgaggaatcacatcaatcaagaagggatagaggattatatccacctaatccctaggatacctagggtataaaccatgtctttcccattttatatttgttgggaatgtgtgcctctactgaaaaaatatagagagacatgtagctcggttctagggatcaccacacaaaaatactataaataccccgcaaacacattaaggcaggggtcgagaattctgggtttcataagaaccaaggagagaaaaactaccaagaacattctctgtaataagtactctcaaatacaaaagactcgtggtctaaggctcattaatgccccaaccacgtaaaaatctcatgcattaaacttcctacagctttttcatatattattaacttgattgccgaaaacttcggtcaacagcaaccctatatgttttgtaattttgtaaaaacagatgcaaaagatcccctataaaagtctttgtcttcagttaatattagcaaatacctaagatgaaggtttcattattttttttaactatatatagaagttttgaattttttttaacatgaagataaaaatcttgaagtttcactttaaagacttgagttgtttaatttcataacttaaaagatgttttcaattttaaaaaacagaaaataatttttaaaaatcaaaaaggtgcatttggccaatttttttaaaaatagttttttgaaaactgaagtacaaaaaattagaaaatagaaaacaacaaacaaaaaacatcaaaatattgttctctattttgaaaaacaattttttttttgtttaacatattcttttttctgtttacgttcatatatccatatctggacccgaactcgctcccagaccccaacccggaccctaaccacctcgaaccctaattctgacctcgaactcgtgttcgaggtctaggtttgggtccgagattcggccctgagattcggggttcggggtcaagtcgatccctaggccaagtccgagtctggagtcggggttcggggtctaaatctaggtctaggtttgtggttcgggtttggagtcaggttcgagggggctaggttcatgtcatggtatggtgtagatggtagaatattaaagttttttttagtaaaaaaaaatctaaaaataatttttaaaaaacataggctaaacacagttgcatttttaaaataaaaaaaaataagcaatttttaaaaataaaaaaaaaataaaaaaaaaaataaaaaaaaaaaaaaggaaagaaagcctaatttctgttatccctgttttcatctaaaacacaacccaacaaggcaacgaccttctggtttttatgggtttttcttattttcattaagaaaaaaagtactaagtaaaagcctacatttagaatagttggaacatcttgataatgcgcaagcaacatgtgaggtgaagcctggtaaaaattttggtcgcactgttttgtaagttactacatagccacgcggtttggatcaacttgcgcatacataaaacaaattagaagtaatggaaaatattgacatccgttacaataatatgtaaccagaaaagttaaaactcaataaatcaggaattcactacataattatactgaatgtgattaattgttgagacactaatctccgttacaaactggcattgatgttgtttaacaattcaatttacaatttacagctttgtagcggagcaccacataagcaacgattatggaaatacgatgtgttatcgaatttctgcaaattcccacccaccggaatcttcccgcacaacctattataactcacattgaaactatacaaattatccagtgcggttagtcccacaggaagactcccggttatcttattatgattaagatccaacgaggtcaaactctttgaaatttcaatcttagacatgtcaaactccagcaaattcctcgacaggtctatatgctcaaccgtcttactcaacccaaataacgcatgcgggtcaccttcaagcttgttcctggacaagtctatagaaccgaagtccttttctccaaacgaatctggaattttacccgacagttggttatgggacagcaccaaaaacaaaccctccactttaaactctccgaacgagtccggtattggtccggttaatttgttccggtctagcccgaggtagctaaggttcggtagcttggagagcgaggccgggatggttccagttaggttgttgaaagatagatctaggtccatgagattggtgagttggcttaagaaatctgggacggaaccggtgagactgttggagtctaaacggaggaactttaggtttttgagtttagcaatggatggtgggatgggacccgtgatgttaacttgtttgcggaggctgaggttttcgaggtaagggaggtctccgagttgggccgggattggtcccgtgaaagaaccaggtgaattgattgttaaggcgatgatacggtgcgttttacggtcacacttgaggcagcaccaataacaacagtcggtgtgttgatcccatgaggtgaggtaataggggtcattgaaagctttcttgatttggaggaggacttttttgtcatcattgttgcatagcacggagagacaaggttggagctggaacgtggaggagaagaagaggagagtaaagataatgggggtcactaatttgttctccatctcaatgggttttggtttgtgggctttctaagcgcgcattggatatggttcagggataagttgaaaactatccttttttattacacattaactaaatataattctaaaataattttaattgataaataccttcttttataattaaagtaccaaatataacct

SEQ ID NO: 296069 - DNA, 4684 bp, Cannabis indica
gttttttttttttttccgaattgcccccgattggagagttgtggaattcagctaatatgatcttcactaaaggggatcccttggaaatcactaccactgccctcgcatcctttacagtgaaccccaccagattcttcctatgctgaatgtcttgtctaatgccctccaggaaggcatctttttgaacctcctcttgcaattgttcctagtgctgccactgaggaatatttaactccttaagctccatacaagctaatttccttgataaagcatcaacaactttattactcgatccaggtttatagaaaatttcaaatcatatgtcataagcttggcaatccatttttaatactcgttaccaattactcgttcaaggagatatttcaagctttgttgattcgttctgacgacgaacctcttacccaacaataggctgccacttgttgatagtgaacacaatagccatcaattcgttttcataaatagattttagctttcctcttgggccgagaatgtgactgtaatatgctattggtcgaccctcttgcattagcacgaccccaagaccatagcccaagggcgtccgtctccactataaaagtttttgaaaaatctagcatggctagaactggcacagtaaacatagcttgtttcaagtcaagaaaagctttgttcgccccctcattccacccaaaactaactctttagagttgttccattaaaggccaagctatttgtgcataacctgccacaaaccttcgatagtatcccgtcaaacccagaaaacaatgaagctcccttatgttttgtggtacaatccaatctctcatggctgccactttgctcggatcaaccagccacagcttgaccagaaataatatggctcaaatatgtcatatgtcgctgcccaaattcacactttttcctgttagcaaaaaacttatgttgctaaagcacttgcaacactatggaaaggtggtgttgatggtcctcgctgtggctaaacaccaaaatgtcatcgaaaaagacagcacaaacttcattaaatatggtcggaataaatagtgcattattgactgaaaagtagcgggagcattggtcaaaccaaaaggcataaccaaaaactcatgatgttcatcatgagtccgatcagcaatctttgggatgtcttattcacgaattcttatttggtgatacccctatttcaaattgggtttgaagaatatttgagccccatgaagctcatctaatagctcatcagtgactggaattggaaatttgtttggaacagtagctcgattcaaggctctataatccacgcatattcgctaagtatcatcttttttcttgatcaacaacatcgaacttgagaaagggttgtggctgtctcttatgattcctgcttgcaacatgtttgaaatttgttgttcagtttcatttttctgacattggggatatttataaggtcttacaccaataggagcagtgccttctttgagaataatggcatgttcttgccctcgagatggtggtaagccttccaattccttaaagacagatgagtgttgctctagagtaccattcaaaaaggttggaatagactcggttgtagcttgtttacactctaccaatgtcttcagacatctcttgtggccaattttcaacatattcttcagtcactgaattttttcccattggcggctcccccttgacagtcacagtctgcaccccctttttaaattgaaggatttggtgcttccaatcaattctctattttgcccaaggtagtcaaccattgcatgcctagaataacatctgcactgcccaacccaaaaggcaaaaaatctcccactatagtcaacccttgtaactccaacacgatctccctacaaactctctcatttttaatcgactttctggacccagagtcaccccatactgcccagttttagttattggcaacttgttcttgtccactaaatcttttgaaatgaagttatgaggggctccaaaatcaacccaaacagttaccgcttgactcccaactatccctttatctttcattgtacttggagtttccattcccgtggctgaattcaatgaaacctccaatgtccctataatcgcagcactgtccagagctaattcctcttctccgttttcctcagtatttgggtcctcctcttcttctcaagatttgatcacattcagttctttctttgcacaatgatgtcccgaatgccacttgttatcacaacaataacaaattcctttacgcagtttctcttatgcatccgcagtgattgatcggcgaaactggcccattggtttttgttcattgtttggattcctgtcccttttcttcaatataattgtcgttgcccctgtaattctccaaatttgaacgattctggaataaagattagtcttgctctcaatcttgagagcaaaaactttattcaaatccccgggttcaacctaagtcatcctgaatgcctctctttaaatcattcaagaattgactcaaagccattacttctgagactccatccaatggtgctaatgactccaagaaaccttcacagtaattctctacagacccttgttgaaacttaagaaattgttcatggagggatcctttactgatgttttggaatttattcaatatgaggagtgtcaaatcttcccataatacaattgagcgtcgcctaatttctcatctgtaccaagagctttgtcctaaaaatttaccacaacagccttaaccttctcttcattgttgtaacgttgtagagtaaaatatttctcagctcataacaaccaaccatcagggtctacgccttcgaagataggtagttccaattagcagaagcaaaattcccgtcgagggtcgaaacttgagctagacccatctgttttcgttggtgtagattttgcaaaacccggcggcgtttcttgaatcggctttgctagacctcgtgatgtgggttgactggagttgggttctgcggtttcggcgaagctgctcccttccatgattcgactgcatggcctttaaatcatgaaattcatccttgaaatgttgaaggtcgtctcgggctaaccccactttttcccggacgtttgccacttcattacgcacggacacactctggttgtccctcttctcttccaactctgacagatcctccaccttttcttgatcattctcggacggtttcttaggcatcgttccttcccactcgaccagctctgataccaaatttgatacaactctgttccagcagcaacatagcaaaacagaaagaaaagagaagaagaataattttattgatgtatgaagaaattacagaagattgttcgaagctcttcgagtggcaagggtgagtccttgagtatattctactcctttacaattcaatcataaaaaaaaagagatgaaaagaatattctatttgtactaaactgagactaagactaataaactttgactgccatatcagcaggaaattcatcactattaaatgccacgtgagcaacaaatttcttttcaattacatggcttatttcttatttcttctagtagtgtaggtcttaattggtggtataatagatagtcaagtatcactttctatacaagtattagtacaattcgtttagttgagagaggaaacttccttcatttgtatgttggcaccatttttgtttttcttgttttccattgatttgggctattgttgtttggtaaggtttccatgtgatgaatttattatgacaggtggttgacatattgggagacaaacttggggaacccttgaaggtggtcgttaaaagagccaaaaataatttagtgactctaactgtgatccctgaggagtccaatccggacatatgataacatccaacaccaacccctctttttgtttttgtttttttttcacctaatactgaacagaataggtactttctttcttgtacctttcaggaggtgtaacaaatcagcttgccaagaaaagaagcaggctttaaagttgcagggtctataatttttgccttttaatactgtagattcataccaactagttcagcttaaaatcacatgttgcacacaaataaatatgaacttctataacaattttttgttttttttttgcttctttctttctttcttgtttttctaacttgggttggatgaatataaacccattattactcttctcagaaatggacccttcatcagctaaagtgctcaagccaaaaatgtgtttttaatcctctggctatgaaaacataatagatctaaacatgtcagataactctttagcttttattgtttcctgaaaaaatatacaatgaagaactagaaaaatagtaagaaaataaagagaaaaatactctgatggttcatctagaagtaggctcccatatttctgagcaatctagaagactacaatactgaagttttacaagatagttttatcttttatatttgcaagagtaatagcagtagcgaaatttttaaatatccaatgccattagttattttttaatgaacttcattctaagtagttatgtttgtcaattattggtccattagttagagctggtcaaagttcattcttttactcttctaattattaggcgtttggtatgccgtattacaccgtattatattgtatagtat

SEQ ID NO: 296070 - DNA, 948 bp, Cannabis indica
aaaaaaagaaaaaaaaaaccatttgaattgaagataacttctagaactataaaagaaaccctagtctcaagataaacattattaagtgcaaaacaaaaaagaataataaacataaaacaagagcaactgcaacaacaaatgaaaccctaaatcaatacggccaatattacaaccaagaaacaaagaaaaataagcgatgtatgtgttcgttattacaaccctaattaagactgatataatcaattcacacatatgttgagtatagtcttctgttgtgcttttttatttttcatgtaacgatgaaatcctcgttgcacagtagtagctgcaaaaaattttatgcctttagacatagcttcaatggttgaatatcttttagagaacttagaccaacaactcgagagtacatgttccaagtcatttgccatcaaaacaaaggcttcaactttagtatgcgatttgagattacaagtcgagattggaaactcataatagaatgttgagttcaattgccattctatgagttcatttccatagtagtcgcctttttgaaggcgattcataggaatgatgccatttccaaatgtccacatagtaccttgtgtgatgaagagcaccatatcaataggctctccctttcgaataatataactgttctccaaatatgtaactggctttagaaatttgcatatcgtttcataaacattttcatctatgtttcggaatgatggaacctataaatacaattatgataaatagttagacacatgatgaataatttataggaagcattaattactcgtattataaggtgtggaacaaattttttgaatcatatatattttagtactataaattattcaaaatatcactacaaaaaacagttacttttagtaataattttttagtcacaatataaattttttatgactaaatgtgacttttagt

SEQ ID NO: 296071 - DNA, 2567 bp, Cannabis indica
aacaataaccgtgtgaggggtattttagtaataaagaatgctattttgtatttttggtagtaaaaatttccttaaattatggttcataataaatatattaattattagtatcttcattatctttacccctcacgctcttcaattccatcatcggctagtgcttcctccggcaaacatattgtttcgcaatcaatttccacgaaaacccaaccctaatctctgtctctgccaccgctccagttgggtcctccggccaacccacctcgccggttctgtgctcttcatcgctatcaggtatctattctacttgtgttaattactctttattttccatttctgttttaagttttaattacaacttttaggaatgtaatgctggatttagcttaggttctcgtaagtgaagtgaaataattccgtcaatttttggtcgagttgatttcccaaagaactgataagattgtttatttgctctcaaatttgttattaatcacaattccttggctctgctcctgcatttgaagattcaatttcaagcaattgttttcagatgcttgcattgagatgttttcctcctgtcattagaggtcttgaattagtcaaaatttcttggagtacatcaacaacaacaagaacaagtagcagaagcagtgtagtggtaagctttatataatgaattattagaagaaagagcattgaaatagaagaacagaacttgatgtgtgtatctgatttgttaattttaatgaaggtatgtgctgcaaaaggccccaggccaagatatgctcgagtatggaaaaccaacaaaaggattgggaccgtttctaaatcggcaaaacttgttaagagtgtaaggctgtggtatttgaatcattttgagcttaaaattttgagaaattattagaagttgtgtatttgatttggaacattggaaatgcataattttgagtttttcttttttagattaaggaagtgtcaaatgtcaaagaggaagtttacggggctctcgattcctttatcgcttgggaattagaatttcctttgattacagtgaagaaggcaattaagatccttgaggatcaaaaagaatggaagagaataattcaggtgaatttcatttccaaatttctcttgtacccttttgttttttaagtctttccaatttgttgaaacaattatggaattgtagatgtcaaagtggatgttaagcaaaggtcaaggaagaacaatgggaacctatttcagactcttgaatgctttagcagaggatggaagacttgaagaggctgaggagctttgggcaaaattattttcagagaacttggaaagcacacctcgaatgttctttaacaaaatgcttgctatctattaccacaggggattacatgacaagatgtttgaggtattgtaattcaatgccctgtctttattcaatgaagtttttttccttttcttactgtctcttgagccacatccatgtcatttcgagtgccaaactttggttcagactgctcccgatggggctatgagaagctctgaccaaacatttgttcctgaaagctttctcatttagcttatggcctgtgttggttactacgagttctatggatgtgctcatattgtaaatttggcatctcaaattctttcctttgtagatatttgctgacatggaggagcttggcattcgaccaaatgttgccattgtttcgatgatgggaaaagtctttcagcagctaggtatgttggacaaatatgataaattaaacaggaaatatccaccacctaaatggcagtaccgatatatccgaggaagacgagtcaagattcaagcaaaagattttcataaatatgatgattacgctgatcaagatttaagtgacgacgagaactctatccatgatgaaataaacgaatcaagtgcagatgaacatggtgatgtactagaacctgaggatgtaaacgttgactcaagtgatatgttagaggaaactgaaacaaggaccaatgaaactttgaattcctaagatttacttaagccattcagatcttgtttagagtggaggttgtgcaaggcaacaaagttcattttatcttgttggacatatggcggagtagataaaagaaattgcagttttcataatttctgtatcttatggaaaaggatataattgattaagagtaatgataattacacacattaacatgatagtttttctaaaccaattacatgtacggaaactgacactagaaagaaaaagaaaagagtgtcacatcattgtgtgcaatttataggtacatacttttgattaatttctctggctcggccaagacaaatttcagatggcttgagcatgtagaactcctttggccactggccatgtcttactgttacttcttcaaaagaaaggataagatgtaatgcaattattgtgcccaataattacgaagagatctccaatttgggtgggatctccaatgggctcaaatagattggaaaggaaactattaagtatatttcaaatactggcgcacaaaaggtttagtattgctattgttttttttttttt

SEQ ID NO: 296072 - DNA, 2999 bp, Cannabis indica
tcaataatgactaacatcatcgtcctagtaaaaagcagaggagctagtacggaaaacaccagtagttttaagaatttaaacttcaaagcttttaaatgtgttgttgatatgttagttttataatgtcttaatagttcacttccaatgaattccgttctagcaaaagatgagcaactggcattaggctcattacaacttacaataacatgccgggtcaagaataacaggctctccatttttgtcagcgctgatgttcccactccacaagtctccatgtaacaagcatggctctattacgataccatcaaataggggtcccatacttttcaccaatctttgtcctgaatatatggatgacaaaaacccatggtcaacaagtcatttatcagctataattaaagggttctcaacaatagcaacaaactctatataaggtttttaaatatgcatatatttgtgtgtattcataatctaagagaaccagaacctgacagaaattacagttccagtttacagtaatggcatagtgtaccaggcatgaacagagaattaacaaggtcacctttctcataaatggtcctgtcaccatactggtcttgtgctagcttcaactgaaaccccaatctatgttctccataaaactgaatccaatccgaggtccaagtatttatctgtggagtactgcaagacaagaataaatcatcaaatcatctcattataaactatttagcataaacaatttaagcagtcagtgaattccactatattgtgtgttcacaagcaaccatgttttttccatatccaataagactaccttccaatagtgttatcaacatcaaatccaaagcctttgtctgtttttccagctctatgcatttctgcaagtttccttcctaaaacagactgaagaccaataaattcaatagatttggacgtcaagatttttagcaacatttaacttattgaaagaattgaagtaatcctcacctgatcgcctctagatgcaccaaattctataaactccatgataatgtaagaaccgcccgtaggtagggacccaacctacaatgctttagaatacattcaactaagtctgccctcatagctagtaaactattaccagattaatagattcaaatttgaagaccttgaatggttttggaacatggattgaattggttttgtacatggcatttaatccaagagcttctccctcaaacattgatggtccaatactcctgattcaggtttttaaaagcataagtacttgaattatttgagaatgaatgttaagtattggagtaacattacaacaacaatgaccaaagagaagcaaatttcgcaatactctgatccacgacaatactagccactaggtgtgtatacctgtttgttttgacaaagaaagaaccagcatcagtgtcataacgattggcacgattgatgcaaccaccacctactggactaattcctgttattttcgtcgcgtttccttccgagagaatccattcacgaattggatcatcactcatggcattcactgtgagacaactcataaacatatgagtttagttagcaaaaagagaggtcctgaattttgaaatttaaggctgaagaatgcaacctaacagctagtgttaatcagttccattcaagttctaatttataacattcaataattgccaaccgttaaggtgtaaattcttctaaaaactccaataaatccatttactcaagtaacacaaaaacaagatacaacaaatgaaaatcaaattgatactgtaaataagaacattaatctaatcattatgaatatgttaaaccatctaattactgggtacattatagaaaaacagactaactccaatagccaaatgcaaagttaaaaagagaaagcacattcataattgcgacaaattaggaaatgagtactccgaaaaaaaaaaaaaagaaacagtgtaaacattgagctcaattcttcatggaaaagaaaaattaaagctaaatcaccatctgggtcccggtcctcttcattctctatgttaaatataccacccttttcattatataatcataaatttgatggcatatacttactgagaaaaggtctatgcttgtgcttggtagaggagagtcgaggtagacgagtaagacgacaagggaagcacgaagaaggagctatggctcccaggtgagccaccataatcaagtttaagaaaaatctgtttttacagaacggaagaccactgaactgaggtcggtgatctgtgactcgtgtcgttttgattgctgggctttcattcgcctgttatgaagcgagggaaacagacaacgactaggatgggatttcgtcaaactgtcgtctacgtgagacacgtgtcacataaaactggcagcaaaaaatattaaaaaaaaaaagttttttattttgacttgagatttgagaagtctaatttttctttttttgttaaattttcttcatatcagtcaacttatcttcttccaaatttgccattttcctttaactttcctttggacttaaattaagggttaaagtgtcttttcaatggcggccattttctcaccattggataagatgaatccaacggctaatcgcacgggttcgttgcagtacagtaatttctttctcttacgtctctccctctctctttcctgtgacagtcctccatctctgcaccccaaataaaacaccgagctttgttaatcaatatattttttttaatgcgaaattcgtaaattgaaacaggttattggtgatctccctgggtcttttttattctggtgagtttctgggttctagtttattatcttttacatattattttctttggtttaaatattatttgtgttattttattttaggcatacactttgggatcaaaatttgagggtttctttctcttcttcttccgcgaaaggcatgtttctttttaattattattgttgttgttgttgttgtttattggtttttttttttt

SEQ ID NO: 296073 - DNA, 7158 bp, Cannabis indica
aaaattaaaaataaaaaaaactacatgaaaataattaaaaaaaaaagcaacatccaaacaaaatagaaacaatatataaaaaaaaataatatacaaataacaaaaaatgaacaacaaaataacataagtaaaatataaaaatacataaaatgaccgtagtttttataaataaaattttaaaaatatttaaaatttcgtacaacgtattttattttttttaataatttgtgtgtgtatttttttttaaaattaatctccaaataaaactcctcttttaaattttgttagatatattaacatccaaattactttccattttaagtttttaaataatacagtacaaggaggaggagtgaaattgaaatttcaaaaaaagtatatttatgaagtaatatagagttatgggaaggatgtttttgtaattaaagtacaaaagtgtaaaagtgtcctgtcctttgtagcaaagaaaaagtaaaaggagacgggtcttcagggtaaaaaagtaaacacaaagtcaatatactcactccactatccactactagtactatacatactagtagagtcaatgactcaatttgctaaaatgtccttcattttcattttatttattttattgagattagaatgaaactcaccgttggattattatatcgaacggtgatgaaacgtggaggttcccatgttaaactcgtgtcccctcagctgacacacggcatcaatggcacgtgattctattccacaacggacgttctgatttgctattcactattttcccctgtaacgcttcacacatataaattaaaaataaatattaatacttctgtatatatatacattgtatagtatatactgtatatatatatatatatgtgttcttagtttcttcattgtaaagctcaacggagttattttctcggaaactggatggaaaataaggcaactcttttatataatttcgatttctggccttataatatactgacctgtggatacaattttatgtatatattatgtatgtaaacatatagaaagttagggtttagtgtttgaaaatttgagtcaaattttaaggggattagttaaagtttagaggattttggtaagagaaggtatgtatttgtaatttttgtgtttgggaagtgagaaagtgagctgatgctggagaaatggacacagtcaatccacagccactgcaagtgagaccgtatgtagcagaaggaggaggtcatatcgtgcagtttgcagtactgggagaaagcagtggagtttgttttgatgttgatgttgttggaggtggaggtggaggtcgaagcgattctatgaatggaggagttggagattctccgagggatttcgcaatggttgcctgtggaaattccggtgtgccttctcggactagtgagctcaccattgcgttcgaaggcgaggtctacgttttcccggcggtaacgccagagaaggttcggctttgctttgctatagtaatttgatttttgatgcaataattaacatttgtgggtaaagatagtgtaataaaatgggttgtataattgtgttagatgctaagaaatgatagtgagctgttacgaactgtttgtttttattgattttgtttgtatagtgttgaacaatgagaaatttaaccaaaaaccctttatttatagttcttctggttgtttgtgttaagttcttaccaccttatcaaaaaaagaaaagagatcagggtatttgagaaaactttacacatgaagttgattctgctgccaccaaattggaaagttactcggttggattacttttacaaaatgtagattttggtggtaaacacggaacttatcttagtttgtgtaatgagtgaagatggaatgttgcaggtgcaagcagtgttgttactattgggagggtgtgatgtacccagctgcgctcctagctctgaatttatagtagagcagaatagcagggtattcttgtacacactttctttcctcttgcaagcttaatgtttttgttaactctagacttttctttaaaattacattagggtgtgagtgacttgactcgaagttcaaaagtttcacgaagaattgcatccctcatgaggttccgggaaaagagaaaggaaagatgttttgaaaagaaaattcgatacacttgtcggaaagaggttgcccagaggtaatgtgcaagatttctgggatttgccaaataagatgattttttttatttattcttactgaaagtaagctctgatggtttatagtagtatagacaatggagcttcaaaaacttattttcgttaggatggaatggcctttgtcattattttcatggttgtgtgttttactacattgatttgttgatgttttgaataaatttactttaggttggtttggttcaattttactcatgatattgttggtcttctaggatgcatcgcaagaatggacagtttgcatcatcaaaagagtcttgtaaaacggatgtaggaaactgggattcaagtgatggcactccttgtgcagaatctgagtgagttagtctgagcttttattggttaaattcatagctatgcaatattttatttttagggaatcattctgctgctgttacttggtgatgctgacgtgttccatgttatttttatgttgctattataagattacgtaaatgccaacattgtgggatcaatgaaaagtgtactcctgcaatgcgccggggccctggtggtcctagatcactttgcaatgcttgtgggctcatgtgggcaaacaaggtaggcctaactcttaatcaatcaaatttagagataataaatgttacaggagatttttttttcattgagaaaaaggaaagaaaggaaagtaaaatgatctgtgctatctcgaatcacaatgcattaaagctgctccaagtttttcaaactataatgactagtatcagtaaacttttgtcatattacgtttctatgcctactcagggaattataggtcttctttatagtttataccttatttatgttctgcttttatttacttattttttttgtcgtgataattctgtacttgaagggaactctgagagatctttccaaatcaggagcaggaagggctattacttttgatcaaaatgaaatggtatgtattttgagccatactggaaatttttcctgtcttattgtaccatgttgggaaagtgcatctggcacatcagattcatgttcaattcagttgcaacctaacttttgtgagatatttttccatttcaaatcttgtgccacttagcaattgccaaccttaattatctttcacttaagtgcttttgatctattgccattcatgctttttatgttgccactatatttcaatactctgtagtctgtaataagaaatctagcccagaaggttatggttgatggtgctcatgtggtctttaggaaactacaggtgatgttaagcctttggctgtggaggcggaaaactcctatcatgagcaggatggtcaggtgtgattcattggattgtttgtgcgtattcaaaatgcacatttatggtgtggcttctgttttgactcaatcattttctctcttcagggaagcccggatgagattaagcctgtctcattggattctgaaaatccttccttgaggctgagtgatcaggtattcaaaattgcgtcataatgttctgatgatttcatgttgttatcaaattctgaatttccgtctactgaacaaactacagaaaaggccaaaagtttccttttctaaaatgcttgtatagatctatgacttaattttgtttgtgttttttgtggctcgttatcacatttaataataccataatgtgcaggaaatgcaggatttgcaggacctgcaagatatgcacgaaatacagggaactaatactgaagtagtaactgatcatgtgtcaattcaagtagagaattcatcagttgagcttgacgagcaggtatatgattgattgattcaagtattgaggattagactgaaacatttgctattgtattcttcatgagctctccatttgtttgttcctaagtaacacttaaccgtatctccgtttaatgcattttatagtgctagagatttgaaaattggaattttctttttaatcaaaataaagtttggaacttttttgggtgtattttgcaggaagttttagatgaatttaccaacacatcagggacagaatttgatctgcccgaaaactttgatgaccagatatcagtgtttaacagtctaacgtcaaatattggagactaacgataacaatacaggatttgggtaatagaactagctctaaatttttataaaggtgaagaaggtacgtacaggttgggatatatatataggtactattactactcacttcactaaagccaatagtagtatggtaactttgtgaatttaatgtatttgtgaaatctggaagaagaagcaccacacatggtttttatgacccagaacctaggtgtgcactactgatcactactcttactaacagtacacttgattatcagagaatgaatggtttatgtttatagacacaggttccttcatctgtattatagtgaagaagaaattttcattctatacatagtgtgattaagtttctggattatgatctcttccctcttaatattattcatgcttgttgtatttttcttatataaagttttctatgaaaagcattacatttattacattaatttcaagtattaaattttttatattaacaaaaattagaaagttcattaatgattacatgcttctcgaatggtctcttaccattttgatttgtttagaaaaacaattaaaaaaatgacttcaactacaaaaagtcaatgaattggagcttcgagtgttattattaaaaataagataaatataataaattatacttcctctaaagtaggagtgtggaatctatctaaatatttgtggtttcataaatttctctacgggctcttctgagaagggaaaagtaatagaaatagaataactatggctgctaatatttactaacatagagatgcattaagcaatatcttgttctcatggtggcggcggcagcaattctggtggattagattgtctttcgggcgtgtcaaaggtttagctctttgtctgatactgatcatgtgtggtggccgggataccccgagccgattgttgctttgattttggctgtttttcggtctgcttcatgaagttctcttttagtccacaactagttacttgttactaaaatgtaatatctcagtctttaacactaacaaaaaactaggtcccattttaatgattttcttttgtttatttttagcatgaaatgaatttttgtgtggctgaaagtcaaaaaggaaagtagtggatttttggctttgtcaaattgtcaattacatggacggtggacctacctaaccattcttcccatttacaccaaaaagattccaaaacaatgaatgggataacgaaacctatctatatatatttcctttattcccaacccctatagtgtattagtaaggaatatttttgtaaattaaaatactattttctaaatataaaaaattattctttaccaatttcaaaaaaattcaaataatttaacatcctagatatcttcacagatgttttttttaatgggggaggtttaatgaaaggtctctttaaaacaaataaaatttattgtttaattaaaaattagttaatagaagaaaaagagaggagcaatcacatatatttagttttatagatgtcttttctaataataatgctttataaatgataatgtgacaaataatatccctcgacaatgcatgttatataaatacccatattaatgattttaaaacatcatggatcgtgttcgtgtatgtctaagaaataattaaatgtatttatattgaagagaaatcattagcccattctcaatttctattatttattgatcagaataaaaagacaaagtaaaagtactctttcaaaagtggacaaggcagattgaaccactgtaattttctatgtttattttatattatttacatacttgcacatataattttattatttttttgagtactcgctattctgagtgattacttgtatagatttggtgttatcgaaaattcttccgacaacaagtgttatctcaagtttacatgaagatgaatttctcactaagagagttctcgagtagaatggtctccttcgaatagagtaaaaaaaaatgtaactcttaagcacatacgtgtgtatcgaacggtggtgtgttttttccagtgaaatgatggcatgataaacattgttccgagagcactggtggttgtatgagcgagaatgctatatagaaggaggcttctagtcaagaaaggcacctacaacaaggattaaactattgtgcattttgcgtagtaggactggttgaaggctagagccgctctcctaatgattccaagacaagatgaaatcagttgttgttgtccctcgtactggatggctaatcgcactagtggatgttgcgataccatatgggagtttgcgggtgtcaacgcaaaactcaataacaccaccaatacctaccaagggtaccttcttccactactttatggggcgtttggtaatgaggtttagacttaataaaaatgagattgtaaaatttaaatcaaatttgaattttgaatgataaggggtttgtgtttccaagtaggcctcactttttaaattaaaatggtggcaatgttaatctccttaaacgcatgagtttcatattccatccaagtttacttctccaacttcacttatccaattcaaactcacataataaacaccccattaggtagcgttttgttagaaagaatgaaaacataactagaatcagaatgacattccaatactttaaaataatacctaataaaataataaaataaaacttgttacctttttattccatttcatttcattcactacaaccaaatgtcaccttaggccttactattggtattttgggataaagggcctcaacgatatttatgtcatttattaacataatatatacagttggtaatttaaaaaaaaatgctaattaggatttttatttcctaaactttgacatgtaccaaatcatgtctcttgaa

SEQ ID NO: 296074 - DNA, 6127 bp, Cannabis indica
tgtgaatcattgttatgtatataatggcctcatcctcatcctcttcgctcatcagagcttctagggctaccgggcttttctctcgagccttttcgtcctcgattcccaaaccttcttctacttcatctgttcaccgatcgcttagctcctcatctgcgtttcgttcacttcctcgctggagccacggcgttcattggcgttccccttacactctccgctctcagatcagggctgtcgctcctgtgattgaacaatttcagcgcaagattgctaccatgggtactctatctcctattcattgtttctcggatattgactttttgtacagttgaccgtctttcatttacgtatatattttgaccttagatatgattatttatgaatctgtatatatgtatatttaaatattactacgatttcgtatttttgaatctttctatgtcctgttctgaattctgatcccaaagctagctgttctactattcatttcgcatagatttaatttaatgtcgtaaatttttaaattggaaacggagtgtgttttttcagacttatatgcaattttatgtgtatgtatacatgtttataaaattcttcagttatagctgtatggattgcaaattttgctaaaactcagcttgtgaatcgcataatatttataatcagttaatggaaatgacttgttataatgttccttgaggaaaatatcagtcaagagttattgagctgaaaaatttatgttatgattttcatcttctctgtatcagcttctgaaaatcctttcaaggcaaacctgaccagtcttcccaagcctgggggtggtgaattcggaaagttctacagtcttccttctttgaacgatccaaggattggtaataagtctaacacttattcctgaaatatgttcagttctccttttatcatctaaaatgttttctaacattagtttaattttgacatgaaaactgacagataagctgccctactctattagaattcttctggaatcagctattcgaaactgtgacaacttccaagtcaaaaaggaagatgttgagaaaatcattgattgggagaatagtgcaccgaagcaagtcgaaattccttttaagcctgcccgtgtcctcttacaggtatagtatgaattcaatacttcaacatactttaacctttgtcgtttcttcttcatggcttggatcacggattagagcactgaatctttttttttctacgtttgttttctcccccactaatgctgtccttgattttcttatatttccaggattttaccggtgttccagctgtggttgaccttgcatgtatgcgtgatgccatgaataaacttggcagtgattcgaacaagatcaaccctttggtatcaaattgtagctcttttattttcttaaatatctccatgcacattatatgccatttaaacgaattatttgtaaattagaaactcatcttattatttatggcagttgaaccattggctaaacatgtcacctctcgtttgtcattttgatttgttatatgctcttcttttttcatactatatcatgttccaccttatccattcattcaggttcctgtggatctcgtcattgatcattcagttcaagttgatgttgcaagatcggaaaatgcagtgcaggccaatatggagcttgagttccagagaaacaaggagagatttgcttttctcaaatgggggtcgaccgctttccagaacatgcttgttgttccacctggttccggtatcgtgcatcaggtaaagtactttagatgataagcttctaaaaacctggcatacagttttttctttttgtaacttacaacaatatatatttgttgtttcacccgcttctgcattttattttttctttttaccatatcttttgtctgaagagtaaacttgaggtaacatgataattttcatgctctatttgattagctgtttttagacttgactcagacataacttggtgtaattcaggttaaccttgaataccttgcacgtgtcgtcttcaacactgatggcctactctacccagacagtgttgttggaactgattcccatacaaccatgattgatgggctgggagttgctggttggggagtcggaggtattgaagcagaggctgcaatgcttggtcaggtaatgaattgttggtataatagctatttttgctgtttgcatttattatagattgatattgagttttagtacaactgcaaaatcacattttctaattgtgtgtacagacttttttttctcttttcttttttcaaatggccctaatattttacgtgctttgattgatagcccatgagcatggtcttgcctggtgttgttgggttcaaattatctggtaaattgaacaatggagttacggcgactgacttggtgttaactgtaacacaaatgctgaggaagcatggagtggttggcaaatttgttgaattttatggtaatttggtaaacttgattccagtttgtgatttctttcctttatacatagcctgatctaaagttttcatgattttatgtgcctgtaggtgatggtatgagtgaattatcactagctgacagagccaccattgccaacatgtctcctgagtatggtgcaaccatgggattcttccctgttgataaggttactttgcagtacctcaaattgacttgtagaagtgatgagactgtgagtattttaccagagcataaatttcaaaatatgcaatcttctctttatttagtatttataaatcagttgtgaacctgtctttcgtttttatgtaggttgcaatggttgaagcttatctgagggcaaataatctttttgttgactataatgaggtaatatagtttcataagccactttttcttatttgttgataaattatgcagcgcaactttctcaaatataaaattatactttacaaaccaatatttttttttgtctgtaacacaactaccgtaacattataatttcagcctcaacaagatagagtgtactcatcttacctacaattgaatctgtcggatgtcgagccatgtgtttcaggaccaaagaggtatgtgatcccactgcacaactatttagctcttaaagcacacagacgtgttatatattcatgtcttaaccattatccttaacaggcctcatgatcgtgtggctttgaaagaaatgaaagctgattggcatgcttgccttgataacaaagttgggttcaaggttagtagtaaaactttgtgctccctcgattcattttttactgttttaattgatttcccgagagttatggtatttgcgatacatcagtccccagaatcaatttatctaggctatgtttacacagatgaggactggaaaataagtatttagattaccaatccaggagatggaaaatgaaaaaacacttattgtttctgcatagttactatgaatttgtttcaatataatctcgtctactttttttcctgattacctgacataatgcagggatttgctgtaccgaaagaaacacaagacaaagtggctaatttttcatttcacggacaaccagcagagcttaagcatggaagtgttgtgattgctgcaattacaagctgcaccaacacatcaaacccaagtgtcatgcttggagctgcccttgttgcaaagaaagctagcgaacttggcttgaaggtagggcagtgttctaatgattacctgctcattagtttcttcaatcacagctgttcttttatgtttgcctagtgtttctacttgatattttatttcctcttcaaacaagagttaattaactgagggcttacaaatgacgatcaggtcaagccatgggttaaaacgagtcttgccccaggttctggtgttgccacaaaatatttactgcagaggtaattttaccataggattaaccaatttatttcttctctgcagacgagaatgtccactaaattttatttgcttgttgcagtggcctgcagaaatatttaaatgaacagggcttcaatattgttggttatggctgcacaacctgtattggaaattcaggggacttagatgaatcagtttcttctgccattgctgacaacggtaatgttttaattctgccttttattgagttcagaccataaaaaggggaaagtattgatttagttttgtgcatatgtaaatcctttatcccaaagttcaattgctaatttattgtttctttgattcttatgcagacattgtagcagctgctgtgctgtctgggaatagaaactttgagggtcgtgttcaccccttgacaagggccaactacctcgcctcacctcctttagtggttgcctatgcccttgctggcacggtatacaatcttccccttaaaatgaaatcttgattatttcagtcccctctgcccccctctaaatagaataaataaataaaacttgtatgttattgaaaagaagatgtgatgttcacataatggactctgttttatggaggttgtccttgcatgaaattaagggccacaaaacctttagtttgggcttgctttagtctcttccagagattattttttccacatgattttaggagtaaatattatatgttctggcaattattttggctcttcttaatctcttgttgcaatgttttatttcatgcacattagataacttataaaattttgtcaacaggtgaacattgatttcgagaaagagccaattggaaaaggaaaggatggtaaggatgtctttttcagagacatctggccatcaacagaagaaattgcggaggtagaataaaattttcatgcttgcatgtgatgatgtgcttagattattgttgtgaagttacctattgcctgatacaaataaatgtatgtcatacttctttaggctgtgcaatccagtgtgttgccagaaatgttcaagagtacttatgaagctattacaaaaggaaatgcaatgtggaatcagctgtctgttccatcttctacactttattcttgggactctaactcaacctatattcacgaacccccatactttaaaagtatgaccatggatcctcctggcgctcatggagtgaaagatgcctactgtctgctgaatttcggggacagtattacaacagaccatatttctccagcaggaagtatcaacaaggatagtcctgctgcaaagtaccttatggagcgcggtgtggatcgtaaggacttcaattcttacggaagtcgtcgtggcaatgatgaagtgatggcaaggggtacttttgcaaatatccgccttgttaacaagcttttgaatggtgaagtgggtccaaaaacagttcacgttcctacaggagaaaagctttttgtgtttgatgctgcaatggtaggtgttttctgtccttttgtgatgaagactatgtctctgcccaaataatttccaagtatggttaatcactatacgtttgccttctatttgcttctacagaggtacaaatctgctgggcaggccactattgttattgctggtgctgagtatggaagtggaagctctagggattgggctgccaagggcccaatgcttttggtgagttgtttctattactgcaagtctacaagtttgataagtttcttaaagtattggttagtttttatcgacttatcttattgcataaatttggtacatgacagggagtcaaagcagtgattgctaaaagttttgagagaattcatcgcagtaatttggtcggaatgggtattattccactttgtttcaagtctggtgaggatgcagagacactaggattgaccggccatgaacgttacaccatcgatttaccaagcaatattagtgagattaagcctggtcaagatgtgactgtcacaactgacactgggaaatctttcacctgtaaggcgcgatttgacacagaggtactttcaatgctcacacctttttcttacagttctattcccattgtctggcttcatttggttttgggcactttttcggttggtgatggaattcttctgattatttttgcaggtggagttggctttttcaaccacggaggcatcctgccatatgtgataggaacctgattaatcagcagtaggaatgaggacgatcacaaaaacgaag

SEQ ID NO: 296075 - DNA, 3874 bp, Cannabis indica
aaaaactcacccacaaagcatgatgggtatggaattgagctggttttccttctgataagattccaagtattgcaaaattttgtatacctgcttgaagacatgtactgtgcttagtggaggttactcgggtggctatcaacaaatctactactatgtataagaacaatacagtttaataattacaaggaaacatcaactacctgttgcaatctcactatacacaaactagaatcgtgaggaaataacaagggtgttcacaactagaatctctctttcaaaattggctctttggttttgccaaagaggaacatttaactgaaggtgtaacaattgagcaacacgatccccaaagtcgttaaacagcagctctcggtggtgtagaacactaaagtagtccttgtgcacagcagtcagcagacctgtacgttacacatacaatacaatgtctttcagaaagatcactaactgatgattacacttgctttacttaagcctgtaacctgtctttcttatcagcttgaaaaaagaaataacaaaaacctatgtattaactactagaccagtctaaagagagcaaaacacaaaaacaattatattgaagagaatccatggaagaaacaagcaaagacaaagttcatgttcaggtgtaaacatgatcaaaaaatcacacaatggaatgacaacggagtaaccaaaagggactaaattccagattccataaatcacataatcaataaatgaagctcaatgatcaatcaaaagaatgtaccatcaccacggttgttggttcgtccaagcttgaaggttgtgtagcctgcatcatgaagtctctccgagtacatacgcacaagctcttcattcccaacccagaattcctatttccacagtaaagaacccagttagcaaaatacacataaaaacaaccatgcccaagaccttagtagagtaaactccacttatttatttactaatattaaaatcgtcccgcggaatcttacaatcatcgagagaccaaaaaagaaaagtacgaatctaacaaagctattgagcaagcaaaagggtacataaaaatcacctgtaaacatataatggaagacgcctcgtaaagcagccaatccaaaatcctctggttcctatccagccagaacgctttaaattcactctctcgaaggccttgattctgtttcactcacacccatgaaatagctaagaaaaagaaaaacaattagctgaaaaaagaaaactcaaagagtggtaccaaaattcgcgaagaaaaataccagagggtcaagccttttgtaaatgggagccagaatattaaaagtagtgcatgatactaagcaaggcaatgcctcttgttccgtctcacgagtctcaatctcaatctccggcaccgacggaaaactggttgctggtagtcgtgaatgtgaatccatatcgtgatttgtcacagccacctgaatagtgaatacccataaacgacgttaaaacaaagaaccgaatgaaattgaaaggaaaaacaaagatagaagaaacaaaaagcaaccattttcgaaattccagagctggagatggttttggaaagtgagagattatggaagggaaaacagttatggaagagcgatggagtgttattgtgtggtgagtatgtaatcgatcattaaaattaaaaattatactcaacagaaattatataaaaggtattatttatttatttattaaagatatttatttatgatattattacgaaggagtgacggtgagggccttttctttcttaaggcttatattatttgtacagctggaacttctcaatccaagtggactttaaaaccaaataaattaaatgcataaaattaatatttattttttatgggattaatttaataacttttcacccgttataattataatcaatataggtatcacgtattaatacaaaaaataaaaataaaaaagataggtatcacgtatttggtacaaaagtcgtttgttgcattctctgtatgtatatttaataaactttgtttatgattgctaaaaaataatagttgtttttataaattttctgaattagagaaaaaatatctttattcaatagtttgtttttgttgtagtatgtatctgatcgtaatctgaggtcagaatatgtgtggttacttgtgattggtccaaactattttgtttttacttttagtttaaatttatttaattcttaaaaaatgattattttttaaaaaatgaattcaaatcttgaagaaaaaaaaaatcaaatttaaaaaattaaaaatctaaaataatattttgaaaaaagtactttatatttaatacaggttcataaaactaattgaaatattaaattctaaacaattattttaaaaccagtaaattcatggacttaagatgaataagatgttgatgtaaatatggaaaccaaaaacttggggttggtggagtaatgaggggccagtatgagagaatagttgttgctttttccaaaccacatgaatttcataagtgatgtgatggaagtaaaattgcaaatactaataactcatattgaaagggataattttcgagttttctttgttttatcttcaatatttaagatttatttagtttctttatcttttatttattttcctttgagttattgtctcacatattagatagaagacacgctaatcaagcatttaagttgctcatgaattaacaaaatatgctctaaaattagatagtgacactagttggataaaagaaattcttcatcttattttcaattttattgtaaacgatttttgatttataataatattgaatctctctaaagaaaaaattcaataaatttaatgtgtaactatgaacgtgaatgtgatacaatgatattttatgtagatactcatgaatctatcttaaaatcttccctttcaaaaaaggaaaaagaaaaaaaactcttgaaaccctaaatgtgatagaaactcaaaataaaacttctgttttaagtaaaaatatgtaaaatttataaatattatgggatcttcatcgtcatttcaaaatcaacttctctaaacagttttgtatttattgacatattttacattagattaatttaaataaataaaaaacatattttacattagactaacatgcctaatgtctattgttaatgagtgtaccaccttattctagaaaaagaaggttcgattcaaaatctatctctccaacaacaagaataaagaattgaattcaagctttgttggtgactttcctcttggtattggtccaacccttgctcatgatatgctagtacctagaggagaaactttctcattccatttgtagcaaggacaatcgtggttcccagggtgttattagtattcatgatgatgataagagcaatgcatctaagtccccttccactggtcaatttgttcgtctctcggcttgtaaggcaaaagcaaggctaacagatattgcaattcttactagaaaggagtttattcctgaggatgtgggctcacagattggtaactctgaacaattgttctccctgtggaggttggttgtgtgccactcccacaaacaccatgtgaggcattgcttggaacaatagaaagttggggcaaacttctacagttttggaacttcaagcctttattcgaatgtgttcacctgatttcatttttcttaccaaattaatagttgatgtgactcaattggtacgttctcttaacaaattacacttttataataatgttgttgttcctgctgtggggtgtgcggagggtattattttggcttgaaaaattggcttcatctttgagaggattagagttaaaaaaaaaaaaaatcacatgtattgtttactcaaatc

SEQ ID NO: 296076 - DNA, 8571 bp, Cannabis indica
gagaagattacaaataagaataaagagatacaggaaattagggttcatcaattgcaaaagattatacactactaactataactcttcgttttaataataaaaacctagttactaaaactagagacatcttctcatagctgccatcaaaaaatggtccaataatccacaggcccaggcatgcaccaatgtgtacaatcattataacctttcatccatttgttatcccaatgagacccaggatgcccatctctcctcatcttcatagctctagtcacatccacaactccaaacttacatttatttcctttcttaactccaatttctcttgctctttccatctcttccaattgggatttcctatttcccactcaaacccgtccaaatcgatcttcacttcactcgacggacttgttctgttacaactacccccagtgttccataacccattttcgaaatgagatggggaatatgtcctcataagagttacaagactacaattcttacaagagttgatgaaatcgaatgtggttcgaaatgccattcgaatcgcaaagttgctcttgtgttgtgttgtgtttggtttgttgttgcaataaacacaacctatcaagttgttgtttttgtgaagatacataattctaaagaaccaatgtccagttgagattatggcatagtttaactttggtagaatattagcccaactattatctaccttgtcaagatgaagattgtatgtgcctgaacttgttccattcaccattatctcatctgcctctattagaaattttgaccatataatcataagggtgaaatcatgactagtaaagtaccatttcttgaatcgatcttcagagtccttgtaaatttctaaaggaatttcctcctacaatatcaataaaaatatgttattaatatgaaaaaaatacttatatatatatcattttttttcttcttaaatttattgtcatcatattttttgtttcagtgggttgtagaatattgggttagattagttgtgtttttaataagacagcttaagaaaattgttatatcaaatataattgtgaatattgctcattcttttttaattaattattatgttttttctcagaatatatgttgcattataaaataaaaatggagttataaattgtagtgaaaaatcattaaattcagaaagaaaaaaaattgcaaatatgaattaagtgaatcttaattaagagtactttgaatttcatttcattaattaataaattgcttattaagatttgatgatcaattttgtcaaacaattacccaaaccaaatgatgcatgtgttaaggaaagatcacaatataacacgaatgaagagtagtttttttcaaactattattattattaaacactttaaggtatcgaacaccatactgatatgaagcattataagtaactggtgagctcatgttcctattattaaatcaaattgtgtagaaccccatattaaatttcaccaataataatattcaactcttgttgtggacttgtggttccgctctgcatttctaaaaaataatagaaaagttggccacaaattgcaagagcaaacatttgatatattttccatattgagttcaataatcaatattcatttggcatatttagtagtttcaagaaaaagtgacatgatattgatatgtacataacatctttatagctattgttatttataaatttgactataaattaaagtttcaaagactataacaaattaaatgcatgatgcaataaatggtaagaagaagaaaaaaagtgtgtactgacctgagacaataaacaaagcaaagactcaacatggttcctagccagtgagtctccaataaaagccatttttttgcctcgaaccatctccaaaaaggccttagcatcaaaccttggcaactcacacttttcaggtttccatttccaattaagaaaattcacatcttgtcttccatttttgaaacaattcttcgattcaggaatagttttacagcttaaattggtataaagagagccactcggttctggaacccaatgacctgtaaacaagtcacaattctcctcttcttctacattaactaccaaaacagaacacacattattaatgtttctaaatagaatacatattcaaagttgaacaaataggaaaatccaattaccaaactcagttctgtgaaggttgtcttgatcaactactccatgaaggttttggacagaactaataaggccttgtttggaaatgaccttaaaagggtttggcctcataggaaagaaactcaatataatgactatggtcaaagaaataaacaagaaaggaaccatctttcccatcttggacaatctctcttttgtttttacaaaaaagaagagtacttatagacttttatcatttaatctcaacctatcaaaatccaatcctataaaaaaaaaattgaaatgattagagaataatacaagtaactttcatcatgaattgtagtgccttgcatacctctgttttatattttatgtatctaacaacattatcaaatttggtcatataacacaaccaaacactagtgtagcatataataattgccaagctagagtttgacacaagccaagtttgggagcttaattcgaatctacttataaaggttccaacataaaatcaaagatattctaattaagataagggaaataagttaaaaggcacaataaagtagaagcacattaaccaaatattagtaaagataggtggttaatatgtagttgtaaaatcttaaacagataattatacgtgtataactgagaattgcctaaaataattagtcgtgcatgcacgagcatgtgtagcgttgactgttggggacaattttatttaaaggccaggaattaaaaaaaaaaaaatcactaatttaatttatgagagttttttttgttattattattatttaagtgtcaccaacgtatacatataatgatataaataataatatataattgtattttgagcgccttgaggtgtcatcaacgtatattttgtggcaaggtgtcacatttttttttctggtaaataattaccctatattttattgaaacataatatcttatgttctcaataatattaatttagtaattataatttgaaattacatggtaccttaagctcaacaatcaccaattttttattttatcaatgtgatcgagttgtatttgtaattaaggaattgaatttaaatttgaaacttatacaattgaggacaatttggttttataattaaatttattgacgaaattttatctcagtatatttttaaattacatagatattaactcttcttatttaattttatattttacaaaattaattaaataaatcacatgcgcaagatataaaaaaacgaacaaaacaaaaaaaaaatagataattgtctagctaaatgtaacctaaataaaacaatttgatattggccaatttaagacatccaagtaaacaaactatttgaggcgaaaaagagaaccatctaccaaaaagataaagggagtttgaggaggtggtttgacaagaggctgtaaaagaggagccacttcattgtattttagccattttacaacccccataaggcacgatgaacatcttcatgagaaaggttacattggaattgatgtaagttccttctcttttcagcttggtcttggaagggagccaattgtgacagagcaatatttacacataaattccccccaatggtggtcactttcatagtgttacatctaacattgtagccacttttcccattatagttgccaattgtcattctttaagaaaaggccaaccaaggacatcaaaaacattaatggagaccctgggattccaaaatccaaggagacccaacttccatacctcatgtaagaccatactaacttgaaagttgggctttctcactctccatctggtccccaaaatcataacctcacgttatcaaaggatgctactccaaagagcacaactatgattgaaatttgtagaaaaaaaaaattccccattcacatcatcttttaagctaaggaaaaaagaaactccacatcatctgcagtacttttatatcaaaattatcaatttatttatttatttgctagaaaaacattctctggtcgagtcctagagacgatggatacttcaccggcgcaacttatgtgaagttactgtaacaacgtgggctaccttccgttatcagtaagtagtactaaggaaatggttcaggggatctgaggacttagaagtgtacgccctcattctgtaaactttctttggaatgggaaagatggttgcttgagctaaagttcattcaaagaagaacgcaacaattatatctgaatattcagatatcaattatatctgaatattatgaagttgctagtataccctcctagtctgaagccacttgagctagggtattgaggggtgcgtgactgtgtgttggggattatgtgatcgaatctcaagtgtgtaactcagaagatgtatgtaacaaaaaatgcttctttcaagtaatttttttttatttgattagtactactgcaaaaaaaaaaaactcagaagaatgtatataatgacaactaatgctacaaatgtgtacctaatgagtcgatgactttgaaaagaattttctaattactgaaaagtgtgaacaagttattaaaagtatgcccaaatgtagttaaattacataggtattagagttcagtaatagatggaaatgcccttttcggtcttacattggtttggagtggtggtactggttccatatagcaacagttccaggatataaactagctagaatcctgcatgaaaagcaatattacccattagtaataaatttatatttaagaatatgtagtttaaatttctaagtgtgtagtactgtggatgagtaagcacacacactgacttgactctcagagttttgagcaattctttatgatttacaaattaataatagttaatgtggtgttacgcatagcctagtgtttcatcactcctcacaataagatgccccaaattcgaatcccccttcccaaagtcaaataaataaataaaaaatagctaatagaaataggctgaaaccaaacattccttggaaaactatagaaaagcaaagaaaacaagaagagggtttaaatggaattacattaaaaggtcataagaatttcgagttataggctcttaggataatgaaatgataagattttaatttagtaataatataataagaaagattccatttaaattgaatcaaccattcaatgtgaaaaaggtataaaagtgccaaaatctacctggtaatgaaaagttggggattccaactccagaaagccatggagaacgctcatcatcatgctcatctgcctctttattcctcaattgaacttatctccctctcgattgaaacgtacacagcagaaaggagtcaaatgcaccagaagaaaaagaaaaaatatccatccaaaatttcctctcaacttgtgagagaatattttgattctggttataacttgtaatacaaagggaaaagtacaaatatacatgaagacatgcctgtgcaaatatcaataaccagaatgatttcttttcaagtaacaaaaattcgacagtcatgactaaagtaaataactatatttgtaactggaaggtgggaaagaaaaatttgacagacagaagatacatgccggccacagcatgaacagttcgtacaatccaatcccctcctttaaaatggatcaatatctacaccaatttcatagttcctaggcagcacaacaaacatgcttttttttccttttaatcgtgagttagatatctacacgggggaacttatctgcaacaaaatgattcatttagcatcttgactgattccagggccataattttccaaagttaagagatggtggtatggcagtgttcagcaagacgaactcttgggcttcacctccataatctgatcgttcaaattaccagagttctgacactcgtcttgtagagctgcacatagttagataaatggaaaaaaaaattaactaaaagagtatattatctatttattggtaatggtaagaacatgatgccaaaacacttaagtattgagaaattgcagttatgaacactaatgacagctcactcaattatttactcacagcaataaattctcaccaggcctaaacagattccgaggtttttctcatcgcaacccaaccctactgccacgaagggtgtttgtagctaattctatccactggatcaagtccaccatcgggttttgctctcttcaatacaccaccaacctgaaacatctttagctgctcctccacaagggcctgtgaacttgaaacagaaaattgtctcaaccctgcaggtagcctctcatctcttcgttcagcatctacgctcccaggtcctgcattaaggtccaaaccttgacttccccatttcctaccatcagggtcaatgttactagcacctcctggtaggttcataacatatggacgagcgaaagcagatgggactacatctgcaggcccaagaagaggtgagggaatggtaggaaaacaaagcggtccaccggaggaagagtccatatatgctgttgaacaacctgaaaaggagttggatgacaacggataactagtttcaaaagggtatcctggatatggaatttggccggcaggtgaaaatggaactgcaagggatgacgaaagcactggacccctgtaaatctcaggaacaaatgaggagctcgcagtaggaggacacaagaccctctgtaacccagccggaggcccataactctgctcccctctaccaggaaaaattggcggcacagtgatggctgaataagcattgccaggagggaaccatgatgaaaagttcccaaaatctgtgttgttgactcttattccaacaggtcctgtcgatggcaaactacttttgataggcttaacaaattgtgctgcttcagcaccaacatcatcaagccctggcccattgttcaaatcaaagtctctggaatcattaaccgcaccaatagataacccacttaatgatgatctagcaggtaaagacgccatttctaacctagcatggttgctaccagaaaatagctcaacatcaggactctcatcagctctattcaaatcaagatcaagtcctccagcagcagcacgaacacaaggtccagactcatcctcataagctgcgtcatcggttacattcaagtcaaaatccaaaggagcacaaccttgtttgctaacagaagagtcaattgcatcactggtttttttgggttcggtaggccgaaatgcacttgtagctgctgaccctttccatccaagttcacccttactttgcaaagggttttctggaagattaaatgctcctttggcaggagcagccacagtaattgaagatgggaaaccccaagaagtagatgaatttgaaaaaggtaaagtgcaaggcaaatgaatacctgctgaacttccatgttctaccattttcagaaggtcctcgttactcgcatcatcagaaggaaaatcttcatttaaatcaaagtccagttttacaacagaatcatggcaagaagcattcgcagtggaaggttgttgttcctctgtcttagttgactccaaaccatctatcttctgcctgttagacttcccatgttcactttcttgcccaacaattgcatgaacctcaattttgggagatgaagcaactgaaacatgaccaacagattctttttcatgatcaaaagtagtacgtaaatccccagcttgtccatctgtcccctcagctaagatgccagtcttgagattatcagtcttttcaccattacactccgcattcaaagtatttccagagccagaagaatgcaagggattatcacttttcccgtccaagggttcagcattacttactgtctcaagagatggcttctgttctgttgaaacatcattacctaactccttgtcagtgttctgatccccacgacccaactctgaagatgagtaagctgatgtttcattatccttctcgacttttgcactcccagaatgagcttcagatgccattggcacactgtcttccacagttctcccatctccattaaaagctttcttactatcaacttttttatcctcatcagatgaagtttctggttttgatttatgatcaaaactgctgatacttcttgtcctacgaactccaaattttctttgctcttgaatctggtaagctcctgcagcatccgtataaccttcttctctagcagcaggtatggttacagaaacatcgtatggttcactgggtttatgagcagacaattttaaggaatctacattttcttgtaaactcgaagaaccatccaaatctcctttcatatctccagaatcattggttggaccgccactaacaatatttcttgaatcatttttagcaagtgaagagtccaccgtattacccggctctgaaggggaacaaccactaacccccccaatagattgacacttggctagag

SEQ ID NO: 296077 - DNA, 9604 bp, Cannabis indica
tgttagttatgtgaaaaaaatatatgttttaataaatattaaataataaccgatctaattcgcactttcgaggattagattagattggatccatagtatgaaatttgtacttagtggggatcggttacactatgaacaaaatagtgcagattggattatataagatgaacacccttactgaaaataatggcagaaccatgtcaaaaaggaaaaatgttgacataagctggttagaacttgggaacatttcacactaatatatagtctagtgcaataattgatgatttacctttaaaatgatgcaaagttccaagcttagttccagtagacatttcccacatgtacacaagcccatcatgtgtgccaatgatcccgtggccggcagaggctccgatggcagcagcactgcatgaagattaaagaaaaattcaagaaacattttaaaggttatccaaaaaaagacataatattcaattgttgggttggagaatgaatgagtattgttttagtaccttgggtccaatatactccctatgattactgtatttttcaccagtagagcaagcctccaccatcctactgattttgtttgataatcacttgatttatagtcatgttcaacatcagaatcaggcataacagagacaagaagccatacagcgacatcttccccatctaatggcaaaagggaatcgtcattggtctgtaccgaaaaacacatatttgttgcagttatcattctatggacactttcttctactgttgtgtctctgaaactttgacctttctttttccaattgaacaaaccgactggaatgaacttgcaaaaggaagtgcttggtgaagtgaactttgaaacgatgatgcgttttgaaatgtccctgaagagaaaacaataataaaaaatgctgtcaagcattacacaagtcaaaattcaaagacagaaatatctcctcttttcttccttcttacctggagattaaaatgtaacacaggcaatagagaaaacactctttaagaaaatcaatattgtaaggtttagttatatgagtgcaaatatacatgagttgtatcatgtataagtttctgcagtcctaaactgtagcaaaagaaaatatgtattaccagctgttcatcctagtcaaggaatcagaggaatcatacagttcaagcaatctcagagtggaaaaagacttaccataaactaaattctccaaaaccattatggccgagaacaagactagtgcacttgggaattttctttatctccactataccaggggatacaaaagcattagcaggcaagatgaacttctcaacctgtgcactgaaagcatggatttaaaataaaataaattaaaaccacgaaataaatgtgaaaacaagggtacaatccaaatcttgtcactaccagaaatgattgacaaagtgacagaatatccagatcagatgctaacaaagtttgcgatcatacaaacaggcacaaatacaccagcccaaacaagtcaatgaaattggtaagattaataaggttcttccaattgaagaatggttgtccagcagtcagtactctatatcgtcaaaccattctttcatttaaaaaagattaaagaatgtgtgagaatttaacaagttaagataaagggataagagatgcctagatggatagataaatggaacaggtataatgtcaaaacaaaagcatgtacaagccaccaaacatctgataataggttcactccataataagaacctaaatgtaacattgtcagaaagacctacacaatttccttgagtagaaagtaaaacttgataacagggtacaataaaactcaccaccatgttggattcataacccagagatgtaatctcccactctctccaacagcaacaagacggttgggttcacaaaccaaaagatgttgtaagctctcagctgtagtcagttttcccactactgagacatatccaaggtttacttcaacaatcttcactgcattcccctcaaagctgcttgatgcacatactgagcacgtacaaggaattctcccttgcctgaaagaacatagaggaagatgtttacctaaaacttcattcttctttcaatttacttatattatataatcagaataaagattcaacctgcaataaggagttctaatgctgtcaagtagaagaagatatagccctcctggagtgaactgcacaccagatctttcaagatcaatctgacaaaggatacacaaacctcagtagacatttgatacagcgaacaagcttagtctgtatacaaataacaacttacttctctaccaaaatagtcttttagaaccggaaataatactgatgtgtgacccacaaaagagggatatccagctgttggttcatgagttgctaccttgtagataaatagggtcctgtacttatcaagcaagtcacacaaaacacaaatgtggatctcgttgtccccagtgctcaccgttaaagacaacacagggagtgggtggacatagcatccaacaaggtcaaaattacctagtaaatctttttccatgggcatgcctttaggcttgaaatctgaactgtattggcattcttcagcaatatatgaagagctgtgggagttacttgctgcctgtttcttacatgattcagaactctttcgccctaaggggttttcatgccttatctccttgtcgacatgaaggcttgacaaacacataattgactgatcatgtgatacagcagaaactgtattgtttagtagacttttacaatcagttgtaggtctatatacaggaatactcttggatggccctgaaatcatggattcagaaccaaaaacatctttacatgatctgtcataagaccagcccatttctgatgcttccagagtattacaatttcccatggtggtagatgtttcaggaacacagctatccgcaaaagttcggcatataatactttctgagagaggagccctgtacttacttttatgctttatactttcgactttttttcgtctggaatatactaaacttggtgtttgagtgagtgacatattgcaggtttcttcaagcactgttttaacaccagattcttctagtagcagactctgtgaactaagaataccttgagatttggaattatcatctgtaccaacagctgcataaaatccaatatatgtaagataaaatctcaagagagcaattatgtggtacatcttgagaaatgtaagttagacagattcaatatgcttaaaactattctaagcaggaaacaaaaaaatatttatggctaccaaaatctacatctgcagacaacttgaaattttctagcaaaattatattgtaaggaccaagaagtgactttaaatagtataagttgcctacttcagacacaaaataattagctattaagcgtaaatccttttttgtcagttaaatagattaacgttttcaaaacatttgagaattactgaaagaaatttgttggactgacattaatgtcaatcctatcaggtgcagttttgagatcattatcgtgggaacaagttacaatacctactaagttttcatctatgctcgcacaagcatcccttatttcttcagcaaattcatttttcttggagatattgcaacttggcagagactcagatatatcatggtcagcctgacaaattgctccatctgactccacatttacttcattacaacataatttatcttttctttcagtggtctcaagacagcagtctaatggcttgttatgctcctgaacaccaataggaggtccaagagtgtcccgggggcatgcttcctcgtgaaaacaaacttgatcagctttggaatcaccaaagggcattatctcatggtaagatacttggtgaacactcagatgatctgctacgcatttccttgcatctgaataaccaagacttgtgcactggatattcatcagttcctccatatccaccattttgttttcagcattcattaccgctgcagttgtgaaggtataaaatttcaataaaattatacaaaagtatattaaaatgcttaaaagaggatggcaattagaaaagataaagtaaattaatttgaaaccatgaataccattattctggttttcagaaggcaccacgcgagaccgaatttccaaagagctaacgacagcttttttcttccttgatgacttcttgagcaagggaattgcttggggaagcagaaatgtcatcatggacttggcagtttcttgaccaactgaatcaatttcactctttccggaattggatgtccctatttcttcttctggattggattcacttgccaaaccttcagaaatgaccatctctgctgcaataatttcttcttttaacaatttagagcttttatcatggatacttagactataatcacaaatattatttgcatttaacaactagcagttacaaaaagagtgattgggataacaaaatactacttgggaaatcacattaaagatgaataattcaagaaataccttgcacaacatccaaggtatcaggagcataaagctcaataacattcttgtcgtcgcaacctcctggtcctgtagaaatatcttgcacaagatcgaaggaatcaggggcataaagatcaacaacattctcatcagggtaatctcctggatctggtaacctgtcaagctgtgagaatataagaatgtttcctgtgttaaagcatttacctgagtactatgatcccaactaattttccacatagaaaagccctaactttttgcaacattgtgataaggaaaaaaaaaatgaagtgtgctcacggtattttccttgttggccactgttacagtaagaccagtggatgtacaatttcctgaagtaatgggcaccattgtttcttcagcagggacaacgcctctaagatgattagagatgccaaatgaatttgattgcaagtccttttctgaaacgtgactcttttcttcttgaaaaggtagtaaatatatggaaggtgacaagactggtggaggtttacaattagcactctctttgttctcttctactgggtctatagcctcagcattgtttttcagatcttgaggcctggatcttttgcggttaaccttgctggatgactttgtattggtgatttcacgtctcctactttttcccgtgatacgagaacttgccaaatgtggcagattacatgaatctgaaccatgactagtaggatcttctttaccagtctctttgcaggaggtggaggataaaaaaatttgttctgccgctccactaacatttgccaccatttctcgaagtaatctctgaataaatggatttttaaatccaaaaaactgcataaatattgcaaaaggaaaaaatgttgattgagcacatcctgtccatgacatagcaactaagcggggtaggggtaggggtaggggtgacaaaaaggtatggaaaggaaattagcataatggttaaaccatgctgtataaagcaaatgataataaacactgcatctgatgaattatcagattttaaagaggaatagcaaagggattttttttaattcttttttttaaatgctccaacataagttccacacagtgtagttcccgattaactacagcataactccttcatcgaaacaacttcagtttatctcaaataaaaaaaaactaaacaacttcagtcaatgcatgtaattttgagtagacattcgtgcaatcagtatcatgtgtcacaatgtgcatggattgttgcactgtcatacctccacaccatctatgttgcacgaaaatctcttcccatgcaaaatttttggacgagaagaacagttcttctggaatttctcccacgcaatatctggagtttgcccagaagacgaatgtccatcagcagaggtaatctgtcagagttcatttgcaatgtgtttatctcaagtctctacaacctcataaatcattatgtcgaaagcaagaggaggtgactaattaccatgaatacaggtcctttaggaccctcattaatttccatcctgtatacactaccgttatgtgctcgaacagcttgatacccaaccggatatggataccgatcttttccctgttaaatatcatcatttatttacttgccattaaaatttaaagtagaaattaacaggagcaaagtgtcacataacagagaaacataaatttatgcacgacacatattcttgacaagtaataaatcaacaaataagcacttcgaagaccagaacgtcctcaagttctcaataaaaaaaaaacatatgaaattataaaattacataaagaccgaccataaagaattctaaacccattaaaaaattcctaaacgtattcatctctatcattcaaaaaatgcccccagctcctgaactaattcaatgaccaagcatttttttaagaccttattgacaatgggtaacttcaacgtcgtctaatggcaccagaagtaaaaactctcagtaactaacattaagcactagatcaggttacactagtaactttcagtaacagcagtctctgaaagcagttcatgtgaataacgcgcttcgtaatccatactataaatcaccgccaaaactggtcataaataagttcataacatgtctataaaaatcagattatcacacacaattcctaaacgacaatctgattctgaagcatctaatcgaagatcaaagcgagtaaccacatgacattttcaagcaacattgaagaagaaatggaacaaatctaaccctagaggagctccagtacttcttgtccaaaggaccaccatagagagagccaatggacgtgatttctagaccgtctggtttatcgtccttgcctttgagcttcttcatattgaggacgcagagtatctgagctcgccaaatcaaagcatctcatttcccattcccagaagagattgagaagatttcaatggcgggaatgaaaaatcagacttaatttcgcggtctttatacgcttttcctccacacccaatgaagttttaaaacccaaaacggtgccgtttccatgcaatagtcaatagaatactaaaaaatttcgccgttgccggggatcgaacccgggtcacccgcgtgacaggcgggaatacttaccactatactacaacgacttgatgatctagatttatgttataattaaaatatacacataatgatatttgatgtatatatgtggctttttttttaaagaataattaacatttttctcccctaaactttgggcatacctgattttgccctctcaaatatacgacttgttaagaagtctccataaaatataacagttacataattatgtcccttctattagattccgtttcttttaccgttaaacattagtatttttaccccctaaaccttgattaatacaaaattttacccccttttattaaaaaaataaaatattctactatttttttaacaattataatattctattaatttagaaaaataataaaaattagaaaaaatattaaattaattagaaaatattaattttgcttaaaaaaatattttcaaactttattttatttatgtatcttaataaaaaatcaaaccaaaattattgagaatctaataaacaatttaaataaattaagattttttgaagaaaaaaaattaaacttatttatatatataaactcataacttatcaaataaagaaaaataattaaaaattcaaaaaaaaatataaaattattttgaaaaaaagtataaattaaactaaaaaaaatattatgtttacttaaacaaatttatatttttttataaaaataaaatatactcaagattgctcccgtaaaatttcatttttacaaattgaattttaaataactaaatgattctaataaataataaataatttttttatattgcttaattagttttaaaattttaatttatttttttaattttcttaatcattcaacataatttttcttaagatctaaattaattttttaagatttattaaaaaaaaaaagttgaatcctttttatttttattttgagggggtacgatttgatagttgtcaaagtttagggagaaaaattactaattgataaagacacgtcttcattcaaacggaacaataggacagaacctaacagaagaactaaatttctgtaaatgtaaaagttcagaggggattcttaacaagtcgtatattttaggggctaaaatcaatattgtcgaaagttcatgggaaaaatttactaattattctttttttaattaacgaacatattttgatatttgaaaagccctttcaccatattatttcgggcttatttggcatggttttgaaagaaattttgaagtctcgaagctacttttagatctgtttgggtaaaataagagaagagttttttatttaaaagagctttctagagctatgtacataaaaaataatgtgattaagataaaaaatttatatacatattattcaattgtcatatattctttcttttacaatgataattaaaatctctttattactgaggtgttttatatttatatatttttctttttaaattaatcactatgtttgtttaattttttacattcttattttgtagtttttttttctttaaatggttgatcattaataattattattgttattactgtgattttgaatagaataataaatagtattattttgtgtgtttatttatacttctcatattattttaaatagaatgaaaactgaggtaacacaagaaaaatcaaaaagagttcgggattcaacaacacgtgagaaattgattgatttagttatagaacaagtgagagttggtaatagaaatggatcatatttaagaaaattaagttggaaaaattttattgaataatttaacttaaagatgggtagaaattatgatagaaaacaaataaaaattattgggataatgttaaaaaggaatggcagatgtgggattcattacttataggagagactcgacttggttgggacgcacaaaggcaaagagatgatactcctaatgaatggtgggaggaaaagttataagtagatttttgtacatactacgtataattatgatttttatatacataacaatcatattattttattttctaattgatgaatcaatcgatagtattatcttaacgctgctaaatttcgagggagaggtttagaatattctttcaagttggatgagttgtttagagaaagattttaggatttatttgttaattaagagactttgtatggtctaattaataaataatataaatgccagttttatttaataattaattataattattaagtaaatagttttgatatttataagattaaaattgaaaaatatggtattattgaaaaaagaataagtgattgaaataaagtgacaaatttgtaactagtgaggcccatgtatgatcggccactagtgatggattttttcccattattttattctttttaatccatataattaaaacctaaaccctagttgaaatactataaaaggaatatgatgctttcatctcatccaacaacctacttcaaccaacctaaacctagttttcattct

SEQ ID NO: 296078 - DNA, 10284 bp, Cannabis indica
atatatagatctataagccaatcagaaaccatagatagagcaaccttttaggaaaccatcaagtctttagatgaataaatgttataacaacatatgtatcacaatcatctcattcaaatgaacagacagatcctaccttattaccgatagcacgcccgaaaccacatagaactgctgctgcatcaacatctccaacataagctctaatatcaattcttaacctaaaagatgaaatacaataatcattgataaaaatactaacaggcaaacagaccaaaaaaacataaagtaggctaaatgaaaaagcattgaaagaggataacaaaaaaaatcttaaatataaggtttctattggcatttttttttctctttctctcatcttttcatttatccacacacttaattgtttcacaactctaatcaattttgcttcttttgttttttctctttttttaacccaaaacagattttagatctttgtctcatcttttcatttatccagttaaagagaaactaactaaaactcaccacagttcactagacatacagtaattaagaagttgaagatcattacagagttaatgagacatgacgcaaaattaagtctgcatctgagacattgaaaaacataataacaataacaatttacagaagattttttgatagaaaataccaaccatgcagcaataagcaagcctgccaactgcctagaaccaacacgttcaaatgttgatccttcatccaatgttttgccaatcatatccagccaccactgcccgacagaactcccctcaagacccacctacaatcaagaaacaagaaaattgactataaagagaaacatatatttgttcaccaaaaaatacaaaaaagaatatataatcatgttacaatttcatatttttattcctttaattaattctatgaaaaagaacacgtgattagtcgagcattcacctctcaatttaattgcataaaatcaaaatatatattctttacccaagattcaggaatcaaattattcgtgattttttatattaaattataagggcaagaggtgcttgatggaagcattaaagtaacaaagtttcataacatttgtttttttacatacaacaacttacagtctctttagctgcagacatggcaagaagccagctcccatctcaacttcttgcaacccaacaacaacaatgctgacatcagaggtgacagaacctagccatgatatgagtgagtcacgagatgctcttccttgtccaacattccatgtaccggtcaatattttcaaactttcaatcctcgtatataaaaattctttgtcagtcaactccgaacgcactatattgtcaaggggtccaggtaatgtgacactccatccccgtatgccgccatgatttgccaaagtgaatatataacctgccccagcagtcatatttatcacaggacagctatgagccacccatcctccaagcagattaccctcaaggtccaatacttgaacagtgccacttagataacccacccataatcgcataccaaaggtacaaaggcactgaaccggagaggaatggtaaagaaaatcttgtaagcggttgccatttccatcccattgcacaagcgaaccacttgtacatcctgtccacaccataccgtcaacagctatcgccattgcttctgttcttcgattgtcatctccaaaggcacccttcgctgcaacacgacgaacagcatctgctgcgcccattatagcattgcgggagcgctgaaagaacccaaaggagttttgtgttttctctttcttcgacccagaggcaaagtctatagaaatgtcctgcacagatgatatgtccactcgattttcaagctgaccatctgtattgtaaactttcagtaactccctagtacgtgcatccctgcaacataaaaactagtatactatattaaattcagtgtctaagtttggctttttaatcgtgttcatccaaaaatcatcaggaacatattctttgtgtgtactataaaattcatagtcccataatataaatcctgtttgtcaagaacttcccagacatttatttgatgaaaaaggaaactgacattcatagagatgcaggaatgtaggcgtaccataatgcaaaggataaataaccggcagtccagactttggctctggaattatcagacaagaggtacttgacatcggaattaaagacattgacaaaaccatttgcagcaagttggccccttgggtcaatgaaggacctctccacgagtagtgctgccatgggcctttcttcaacagttaaagacaaagatctttcaatagcttcccaaggccatatcttaataacaccagcctctgaacccgaccacaggtctcctggaatggaaggaacaccaaaatcaaggtcacaattttcatattaagcaaagaaacaaaattagggatccagatgaattaccataagctgtgataacgagagagagaacggggcctctatgagcctgccacgacaagctttccttgaaataggtctgatgattctggtccattctccaacacctaatcttaccgtccctatggccgctccagacaacccgggacccctgatcggcgaccaagcatagagtgggagaagtacccacggactccagaaatggcagcgcatcctcgggaccaccggaagcgtagagattgttcaatttccaaaggcgaaggccgcactcggttgctgcccacagttgagagggagtggcaacaatggagcgaaggaagcggccaatctgagtttcccgaagcgggtgaggcctgagttcgaggctgaaagggcggttggggtgtactgcggcgcgaagaggaaggcggaagatgccagaggctccgccgttggcaacgaactcagggagcggaggagagtggttttgagtttgagtttgagtttgattttgagttggaggagtgggcgaatcggaaataatattggaatgatgagaatggagctttcggtctaggaattggagcatgtaattgaggcgcttggaggcagactcgagggaatcggcatggttttcttcttcgtcggatgagtcgaggaagaagcggttgtcggggttggtggaaggagcggagtaagaccgaaagttggactgaggctgagagtcagcagaggcagaggctgaggctgagactgaggcggtgttgggggtggtggtggtggtgaagagaccgaaaacgtcgtcgtttggatcgatgtccatatttttcgggtgaaggagaaaatctagccaaatcaatagaggcttttactacagtgccagtgcctctggacatataaataattttttatttttgagaataacgtataatcttttttgcaataataaattttataatattaagttttttcaaaaataaatataagtttacattacaatattacatcacaaattttccaaaattaacaaatcaacttttatgactttacatttgcttcgtatattatttgttttgtaatatataaaataataatatttgagcaaaagaaaacgtaaagttgaagattagaaaggcaacgtggagagtactagtgagtttgttttgttggtaattggaatagaaaagaaaagaagaaagggtatagaagagagagtgtgccacgtcaacttgaacttttccttcttctctttggattttagtaaacacccataccctcatatccattccatacccatactataccatatatatatatatatgattaattggactaattaatggtagatgaaagttagctccctccactagtctccatttacatttatcaaatacaaacttatttaaatacaattcatcttttgtagattttgtccattattaattgatgaataattttgattacatatataattataatcttctctattattcatccataacattattatactcaaatctattttcctgatttggagcatttgttgatgttatatgattatgcacatggaaatagattatattttgatcataacattcacatctcaatataattaattctataaaaacattataccattaatcaattaattatagaacattaaaagattaaaaaaatggaggatatattggggtggtctccttcacgtttagatctatgactatattttctaatatttgtattgtggtttttttcttttggcttgatgtcttaattttcagagcacttccaaagttccaatagcacttttaaaatagagattctccacacaaagaagtaaataatgatataaactctttctttatttctttaaatgtttctcgatatgtaaagatatttaaattatatattctctatgaattatatattttaaatatattatttaaatgatatataaggagaagatataaaaaatagagaaagaaatggattgttgtttgatgtgaaatagagaaagtatggaaaaaagttattgggtgctcttacatatcttacaaaaacaaattaactgaatttaggatgtgtgttattctattttggtaaatggttggctttgttgttgttgttgttgttgttgttgttgttgtattaatattattcttgactttgagtttattgctctattatataatatattatagtaataagttggttggcttttcttttatagttgtgagatgcaggcagtcaaataacaaatgaaaaagtttttgtattattattagtttaggtttaggttgtgtcaattatttttgagaaaattattagagatcattatatatttagagtcaaataaaatagactacgtccgtaacgtataggattagggagagagacagagacacatgttgaatgttttgtgtttgattaggtggttgggttgggttgggttttggtgggtagatagttgagttgagttggtttatacaataataataataataataataataataataataataataatatagtaaatagataaagaaaatgaaaacaaaagattcgttggtatatagaaaagaaacaaagaaagagtaagaagaagattatgatttaatggtcataatggagaagtgagtgatcaaagcaccttactttaggaggacttcttacatatacatatatataattaaatatattggttcacgtgatcacaggacaaacataaagtgaagagaaaagaagaaacaaacaaaaaacgaaagaaaagaaaagaccaagaagacaagtgaagtgaaccacccacacccacacccactctttaattaaccttttttctatttttaatgttaccaaactccttcttcttattgttcaatgaaacataacagaagaagaggaagaagcagaaagtaattgatggtgaaaatgaatgtgatggtggttttgctggtaatgggattggtcatccaaccttgtcattctcttgaaaaggaaaaggaaaaggaaaaggaaaaggaaatgatgattaagttatggccaatgcctaaggatgtgaagttcaactccacatccactacaactctgttggttgcctctcatttccacctcattacccaatataaagactcctcctccattctcaaggatgctttccacaacctcatcaatctcatcaatctcccatcttcttctctttctactcttaattcccaatattaccttcttcatggcttaaacgtcgtcctctcatccacccatgacaaccttcaatacggagtcgacgagtcttacaacctatccattcctcatccacactccacttccatttccaacaaacctctttatgcatatcttaaggtaattaattaactaattaacattaatctcattcatattcatattcatttttctttttccttttttcttcttattcaggcaaacaccatctacggtgctttacacggactacaggttatgttatatctgttgtatacatactcattgattcattcatgagatcacttaagacttgagaatatggactattattgcagagcagaccttcagccaactatgccgttttaattatataaccaaaacagtggaagtcaacagagttccctggaccattattgatgaacccagattctcttatagaggcctcttgattggtaactcactcactcactcattctcactttactctataaagatatgtaaatctaaagtttattattcatcagatacatctcgacattatctgcctctgccggtgataaagagtgtcattgattccatggcctatgcaaagctggtatgtaatatgtaattttgatttgatgtcattttgattttattaactgatttgatttgatttgatatggtgaattagaatgtgttgcattggcacattgtggacacacagtcttttcctttggagataccttcgtatcccaaactgtggaatggtgcttattctaatgcagaaagatatagcatagcagatgccacacaaattgtcagctatgctcaaagacaaggcattcacgtaatggctgaaattgatgttccaggacatgctaagtcatggtacaatgtaattctaaactttactaaatcaatcaatcaatcaatctatctaaccatataacgtaatgagagttttcatttttttaggggaaatgggtacccatctctatggccatctaaggactgtcaggagccccttgatgttagcaatgacttcaccttcaagctaattgatggaattctttcaggtatttatcatactcatactctcatctaatatattcttgctgtgtgtgctaattcactttcacttgttccagacttcaagaaggtctttaaatttaaatttgtacacttgggaggtgatgaagttaacacaagtaactacactaactaataatctatatatgcttgttattatttcagttttcttttttcagaaaagaataataataacaataatgttgtgtttcaggttgctggacaaccactcctcatataagaaaatggtaattaacttttatcttaagaagaaacatatatccttaattaagagatatccagttatttaataatcttgtgtgcaggttaagaaggcatggtatgaatggatatggagcttatcagtactttgtattgagagcacaaagtatagcactatctcatggatacgaaattgttaactggtacagtatatgcttgcttttatatatctccaatctaatttaatctaactattatatatgaaattgttacttaagaatctctacatcatccccttgtttgaaaatttttacagggaagagacatttaataactttggcaaaaaattgagcccaaagactgtggtacacaactggtatgcaaattgaatagaccttatatttacatgggatttggtatagagtatttttgttgagagggtaataatgattataatattgtgagggtgagcaggcttggaggtggtgttgcagagaaggcagttgcagctgggctaaggtgcattgtgagcaaccaggacaagtggtacttggatcatttggatgctctatggcaagatttctattcaaacgaaccgctcgcaaatatcagagaccccaaccaacaaaaactagttatgggtggtgaggtatgtatgtggggagaacacattgatgcctcggatattcaacaaaccatatggcccagagctgctgctgctgcaggtatgtaaacttacattgcaatgcattaatgaatttccatcattgattatgatgagggggcattttcactcatggtttttcctgctttgaaatgtcatgtgatgtgatgaagagcggttatggacgccttatgataagctggcaaaggatccgagggaggttactggaaggcttgcacacttcagatgtttgctgaatgaaagagggattgcagctgctccattagctggaccaggtagggttgctcctgaggaacctggttcttgctaccaccagtaaaatcatctttatatttataacattcacattcatttgatgtcatgttactaatgtgagtataaatattttcccattagatgagttttgctttgtggctgggacacaacattataaaaaccatctctttttacttgtgcatagcaattaggaacagagaaagcatctcttttataatataacagtgaataaattgaaaggcctctgtttgcaccagatagataaatggaatgtaagtatgataagatccttgctgtagaataataaagcagtagccaaatcaaacaaaaattgaaaagccaattacaagctattggagctctcaggcccctttgatgcaaagagtgaacactcataggagtcaagtcatgggtggattacacgaacgacctgcttgccaatattcttgccagaaaataagccaacaagagcagatggtgcactttccaagccttcactcatgtcttcaatgtacacaatctttccttgcttatagtaagtggaaacatgttcaaagaaacgagggaatgaatccaagtaatcgctttgtaggaatccttgtatcttgatacgcttgggtatgacattgaacaagttgtgcattgtttgaggatcagagagactgttgagggacaccattccacaggcggcaaccctaccgaaaactctcatgttcccaagtgctgcatcaagcatctcttttcccacattgtcaaagtagatgtcaatgccttctgggaagtacctgctccatccataacaattaaactaagctaactctaacatcaacatgttttaactcaaataatgctatatctgtctcactatactaaggttgttcatgaacatgagtattggtcccccttacctacctaattaacctaattaactttatggtcaccatcaccagctggaccaaccaatcagattataagtggtcaatttcatggtaccaagattgaaaaaagataaatgctaaaagatacaagtggcccctcttaagtgttatatcgttattggtacaatattgttaatcaatagcaacacttaggtgtcgaatagcaatgctcttcaaaaaaataaaggagaaaagggaaagagtgagtaacctcttcaaagctgcaaccaagttaggctcatccttgtagttaaaagcatcatcaaagccaagcttattcttcaataaatcaacctacattattatagttaataaatatgtatgaatgtatgtatgtatgtatgggtatagtagttgttggttaaagtaattactttgtggcttgaaccaacacttccaacaacatagcaaccatgtaacttagcaagctgaccaacaagctgaccaacagcacctgaagctgcagaaacaaaaacaaactctcctttcttggggcaacacacctcaaacaatcctacgtaagcagtaaaacccggcattccaagaagtcccaaatggtatgaaagaggaatttgattttgatgatcatcatcaattttcctaagttgttgggcttgctggggtgaagaggttagtgtgtattgctcccatccagtcatcccactcacataatcaccagctttgaaatctgggtgatcagatttcacaacttgggacacaccaaaaccttcaagcggctgtatataaatatattacaatacaataagttattattacgttaagaaattaaggagaaggataatatataagatatatatatacctgggcaggaagaaatgggggtagataggagtcatgaaaatctctcatacgacctctcatgtaagggtcacaagagagatagagattctttaggagaagaatatgtttatttggatttggaaggtaattgaggtgagttgtgttgagttccatgtctgattcctttggaattgtgtctacgtagcctttcagcaacacttgtttgttctctattgacattgccattttgagtaacacagaagagagaatggatttcaatattgtttgtgtttttctagtctaagacgtaactcatattaaatacccatttcttcttccacttacctaacagttctactattactaacagttatttaacactgttacacacacactcaaacacaatgaaacgtgacgtggcaccattttgtttacaaatcctacctacttagttactttccaatttccatccacatttctcacattgcaacattattctacttaatatttatatactatagcaacactttctgataaaaatataggaggcaggagtcccgagcacaatgctcttattattaagtgtaaaattttgtggtaagttgaaaaataccatttttatttatca

SEQ ID NO: 296079 - DNA, 7639 bp, Cannabis indica
tcattacccactaactcaggggggcgacctctataaaaatctttgtgttcttttattatttagttctaattgcgtaacacgtggcaagcatcagtttaatacaaaacccactatcggttggccaaattctaaagtcaacagtttggtgctctcattgagagcaagttaatatcacatctgatcaaacgccatggttaacacgaggacaactccggttacaccatctgcatcatcggggcttcctcaacatcaaaaccttctcaccgcaaattctaatgtcaatgttccaaccacaactagaattcccattaacactgcaaatgtggttaatcctgccatctcgacatgaatctggccactacagctggccaggatgacacaaacatcccggtggatctgaacaatcggcccttgcttccaagggaggaccctccacaggcacctcccaatgaaggaaggacccttggagaacagccccaagaacaacaaccgaacctcgtctcccagtactatgctggagagacaagaacaggaatttgcgagcctgctatatcagtgagcctcatgtgaacttgggagaagatctcgagttagccagactaagagaggtcgtcggtgaagctgacctaactgaagaaccacaccttgttgattgtgatgtatttattcagcagatacgcaaattcctgagatgaatggatgaccaagagtacatcctttaatttcacaagcggagctggatcaccgcaacagagaagccaacaacctgataagattgttcagttagagaaccaatagaagaggcaaggatctctaatttttaggtagagttaaatataagaagtaaaatacctccatacaacaatacaaatgaattctcaatttaataattgaattttgagctttttcttttttttttttttttctttccattttatcatgaacttgttattatgatacacatcatttttttttaataacaaaaaaattaattaccttaatttgatttataaaagttaaataacaaggaaacttttgggactaggctgaactaaaaaacgacaccaaaccatatgtcgctttcctaatctaatgaaacaaagtatatcattggtcgttcataagatacatggcattatcattgtgcataaatatgagattgaaaatcataacaagttgaagatttttcagtaatttctaactaataaatctattagattgataatagtcttagtaaaagacttgcaaagagtggctgtgccgggtgtggaactttcatgttccaatacaaaattttgaaccaatgtttggttttcttggagtgtaagaaaattaagaatagccttttgagcatttacaaaaattataatgaacccatttatcctaacagagcagagcacactttgctctcaaaaaacattgataataaatgggattaaatactctgggccaactcaaaataaccgaaaccaatctcaaatcactcttcctccgccaagttccgttcgctaattaggtaattttaactagaaagactagaaagcatgcctccacttgtagtaggtaagacaacctcccaacccgggcctttaaggggatatactgcagctgtgccgttagtcttctctgcatcgacagcaactgtgttcaaagccagatcgctgcggtccatcaccttttccaaatcttcatcactgatatcagtttgaatcaacttgtcttctgcactttcttcatctcggagaagagccaatagatcatcttcctgaaatatgcaaagcaaatcatggctaagccagaacacaaaatgaatagaaaggatatatacattaaaggataatataacaacatttttttatgactttcttaaggaaaagtacatccaaatctcctaattatttttataaaaccaagcaaataactggcaagtagcaaccatgggaaccaataaagcaaacctccgcaacatcagaactattctgagctggtctttctagttgaaactgccctttcccaatcaccacgtgctcaagcttcaacttgctaaaagctcttttcaacatacgaccctgcaaaacacaattatcaagaagtcaaattctttcaagtatttaaataaaaagctataggttaaaaatggtcaatacaaattcgaaacactatttgcgccacccaagtccaacatacctcaactgattgagctgttgcaagcctgtaaacgtgaacaggcttggtctgaccaattctgtggcatctatccatggcttgcaaatccatttgggggttctgggatgcacaagcaggtaagcaactaatttattatgatgtttttttatagaagaaaaacaaagcatgagatcacaaaacgtacccaatcactgtcatagaggatacaggtatcagcagctgtaaggttgatacccaacccaccagctctggtgcttaaaaggaaaattctgaattcgctattgaggtcattgaactcctgaatctgtttactcacacataaatttacagcgccgagaataataattatttaaaccacttcaaaatcaagatgtttagcagttaggcatcattttgataggcatcgtaagggtaattgtaatggggtattagtattatatatatgagtgaataggaaaggaaaatgtgagaatgaatgtgtaacagaacagtagctcttgccttgggagagcactgggtctctcaaatacccagtaacattgtccacttgattttctactatcaatatatattagctattttccatggttgctactgtttataccaaaatgttaggaaattcctttcacatttctggcacaatgtcatttctttcagattaagtataaactaacgaatcaaagccaaaacttaggtttgattaaaggacgctgaagacaactgaccaaagaacggtcaaggatagataatcagtaagaagcttatgtttcgaggaagcaatttcttcaatattgaagcagaaaacttgaacatgccaaagccaaaatcaaacaatctaaaaagcattgctaataacaaaaagcttcatattctccacaaaatgtgtgagctgggaacaaacctgtctcctcctttcatcaagtttcacactgccgtcaattcgacaaacagcaaaaccttgttcgctaaaataatattccattatatccaaaatcttagtccactgagagaagatcaagacctgaaataataaataaaaaaaaaatgagaagagatttcgcaacttcataactaataaatacaaataggtaaacaacaacgcaccttatgcttccgagcaaatagcttgaccaaaagtcgatccaacaaacgaaatttgccacactgctcaactatctgctcgacgggtggatataagtctgttaagagtacaccataacaaactcagtcaaattgaagagaatcgattgcaatatagcatagaataagtgccggagttacatgagccatcaaatgctccttgtaaaagatcaggatggttgcagttcttccgaagttgaataaccaagttgttaagctttccacgattacaatgagctaaaattttgagcagagaaacactctggttattgtccattataaaatgcatatgaccaagctatcgcacaaaataaataaataaataaataccatgtcccccctcttgagataaataattctctaatgtcttgttgaccagatgaccctgaaaattcttctgaaattctgtcatagtagcatatattatgatctctttctttcgaggaagcatcaactcaacatcagacttcattcttcgaagtataaaaggacgcaatattgaatgcagttttgctaccacctgcaaaatcaaaaccagacccgataccaaccattacataaacacaacaagtgtctaattcaaccaaaatacttgtgatgatagtaataggataattcatacttgagcccttcttttctcttcctgcccctcctcaccattgcattttccagacaaatcaaacctgaaaataggatttccataaactgtcaatgcagaaaaattgctaccaagcaattaaggtcttatcttaaaaaagcctacacatccttaacccatatctacaatacatacagatgttgcatggcaatcttctagtggctcagtaccatatgaaggccaaccataaaatcatcacagcagatggagttttcaaaacataatagactatcatttgcatagaattagaatgtggtcacatctggaattgagaagctgcaataaattaatctaaccatacatgaatgaaccatgggaaaatcatactaaccatgactcaaattcttcatgagacgaaaaaatatcaggcaaaataaagttcaacaatgaccacaactctgccaaattattctgcaaaggtgtcccagtcaatagaagcttgttctccataggcaacaatttcatttccttaaacaatttgcacttagaatttttcaacctgtgccccttcagaatataattaatagttcaaaaacagagtcagaatagcctacagtgcaattgtttcaatctgcacattaactaaaaagaagatggctcaaacaataggttcacccacctcatcaaccactacatatttccaattataatgcctcaacgtttttcttgcttcagccaatgctatttcataagaagtaataactatgggaaatttagggccaattgctttaggcatgtgcttcctacggatctcatctctttgcttcttatcaccatgaaagataatagcattcactgaaggtgtaaacctatttggacaccaaacaaaataaagtatcaaagaaaataaaagtaaaaatgatttgacaacagtggtaacacaaattgaaattaaccttgaaaattcattcatccaatttgaaagtgtagaaagtggtgcaatcactaaatagggcccatccaaacccttcccttttaaatgagccaagaaaccaatggtttgaatagtctttccgagtcccatttgatctgctagtataccattgagaccattttgccataatgagatcaaccacttcacacctttaatttgataagattttagttttccaccagtcaacaaaggaacaagttctgtttgctctttctccattctttcttctgcagtgagattcatatcatcagctgtctcatcgtcttttgacctagtaagcatagctgcaactgccctcttggcctttccctaacataaaaatatcaatacaagattaggggtaaaagaaagatttccaaaccaataatacattttgaatgtgatacactacaacatttacttgatatatattataccaacatagaacatgttcattacaatacaagatcttaccgtattgtaatttgtagcatttttccgtttcctaccacctctcttctttttttcagtggtttctggctcctgctcgatgccattctagtaatacaattcacatgaaaacatgagcagaaattaattagcatgtaatgcacaactacaaagaatcacaaatgggtgtatgaaagaatacatttgtgatgtcatctattttttcgagcaagaactcagagaacagttgggtttgtgtcagaagctcatccagtttggtaaattgactatcattcaagttcggtgtttctgactctttgttccttttctcttcctcttccttaacccgagcttccagcaacttttcttcctcctccaacatggctttggatacgagcaaggaatctccattttctgcatcagcaatgatctcttcctccaattttacctcagtctttatatcacatgcatccttcatcattcaaaaaaaaaaaaaagagcaacaacaacaaaagtatataaacaaaaaagatgagaaatcattccttacgtcaaaataaatcagatgaagctatgtaacaactaccaagtaaattgcagcagtgaaaaatagttaaagactctaactcgtatctgcatagtggaaaacaaacaggtaatactaaatgtgaagctcataaatttcaagaagtccccatacatattttccccaactctatgcaccacaaagatcattttttaccgttttaaacctcaatacgacatggagaaagataacaaggctgaaatcttataaaatgaatggtaatataagaaaaccctattctctcactcctttagttgaaacaaacagctcttgattttaccacttattttcttcatctttcatataacaagacaaaacgaacaccatttaagaaaacacttgccataaccagataaaatgaacaccatagaacaaaaggcctagagaaaaagaagaaaaaaatattcaaacctcttcctcaagcaccgaagtcggagaatcagcggaggcttcgataatcactttctcctcaagttccatttccaaaaccctaagacaaaacaagtaagattgttgctccaacacttattacttttttttccaaaaaataaaaataaagactggcgatcctaacagtcagtagggttatggttttcgccattaatgattaaaatcaaagcttaaaatgagttacgcagtttgaaaataaaagacataaaggtaaaggaacacacgcagggcttaccggagatattctgtaatggaagttgtcggaaacgagagcggcagagaaatggatttgaagtgatgagagtggtgagacagtgtgtgtgctctgttcaaagatattaataataaatacatttatttttattttttatttaagggttttattgtgtttgggcgggaaaatcgatttggaattgacctcgattatcgagttaattactactatacccctacgtttagaggtttttgctcttttttctatacaaaaaagcaaacaacatttttgcacgatttagctaatttattataaaaggagtctttgatgtgattgaaaatgttattaccgataatataatttgtctgaaattttgtaagttgtatttgaatgtgcttagaaatatttagttttattttaatcgttggtaaatttagaaatttaatatattattttgtatataaaaaaaatgaagattattatactatgtcaaaatagcttatgtaaattagtaatttattgctaaattatattattttgtaaaatgtttgctttaatagtatgagatttgtctcgattgaatatacaatgcaaaatacaaggcataatatgcaagtttagtacaactagttaattagactaactaacccaataaatctgttataactaacttaactaacagtaaaactaattgtaataggtcttattaagataaagtgtatagattgatgacaccctcttatgtttatccaaattttgacgtaaataatgtggcaagtatgatgacacgttgttgtttaccaaaatggtacgttttacatttatcaactcgcaagtgcacgaatctttattgtagtatggagattgtgaagaacgaggtcgaacacatgggaattgcgtgaaatcgaagaaaatacttatttaatctaagctaataaaactctaacctagttccgaaaattgtgaggtttttggtaacaaaataaaataaagtgtttaaatgataaaaatgacagtaacagatattttcagaaatatttt

SEQ ID NO: 296080 - DNA, 4057 bp, Cannabis indica
tggcacatagtgcattggggatttttctcagaatgattagccattcactagttggattctcattctttctacatgattatccttgcccttttgttttggttactactcaaggtaagtaaaccttcattcatgcagtaataggtagcctgtagccagcaaaagtaaggattattcatcgaagtttcgaggttttgtttttccagataattatttccaattactgttgttgatggtactctaatttaacttatggtcagtttcatcaaactactattctttttggtatgcaactatgttgctaaccaggggcagctgtatccactcttgctctgcctataaaaaatggtcataatttcaattatttattcgttgtgcaaatgataacaaataattgatgttgtaaatgatttgattcccttggttgtccatgttatagataatagtttaacttgatttaaattattgtctcatgtctgcaggagagacttgaatacattgagagagatcaatgtgaatacacattggatgatgaagacagaaagatacaggatgtaattctgcaaccagatcccttggcaaataaccctgccgtgttaaagaaaactctttcttgctcctaccctaacttaccttttaaagaagcactgaagaaagaaaacgaaaagcttcaacttgaactacagaggtcacaagcaaactatgatgtgaatcaatgtgaagtgattcagcgtttgataaacgttacagaaactgttgctgcacattctcatccagagaagagttcacctgaaaaaagtcacaaaaaaatagagcggaattattcagatgccgatagtgagaaggaagaaaactatcgcgttacttccaggttaatattattttcactttgtataccatgcagtcatatcaatttcatatatcaaagttttcaaacaaaaaaaaaaaaaatttcatatatcaaagagtaatttgatgacttgaaaatgtacttacctgcagaaacacttcttctgtttcatctggacacgatcttttgtcaactagaggctcatcgcgacatgaagaatggcatactgatctgcttgggtgttgtgcagaaccttccctgtgtatgtcttctttctttaattgtgttgatgcattaggttgattagatatttctatatattgccatttgcttatgtttggcaatagatatctattcggtgcaataaacagattagatatttccaaaacttttccttttgcttctatttggtaataaatatcttgtttttctcatctgatgcctatgtgggtcgccttgtcactttcagctatgagggacctgattatttgtttttctgtttttccatatctgttagaatgttctatcaacatgcccaaactgcccagttttgatagcgatttgtgcgtaaaatccatcttgcaggttttaagaccttcttttacccttgtggagctttgtcaaagattgctacagtagcaacaaacaggcacatgtgtaagttacttcaaacctgtgttaacacttggtataatgactgacgtttcttaataataacacttttattgcctgaatagcagtttaaatttagtaaatttgttggtatgggttttgtgcaagaaattttatggcattgcaagaaattttagttatttgaatgttgtgctaagattttcctattttacaattgtggccatttgctaaaattattaaatagacattaagaggcagttgaatagctgttgtagattgttaagcgaaggtgaaataatataaaagaaccgatcagaagttcataagttgtttggtggcatgggactaattgagctatttgtaaataatcatttcttcaagttgagtgtgaattgttaaggatgattgtgtataaagttcagcatgattatgaaggtttcaatttgccaaagatttgcactcaattgtagaatgttgtttgatttgtggtgaccagtttagagaatcatgctatttatcattgatggcttttgaaaatagtgtttggtatttatatatttctaatattttagtatttgtatttgaacaagaagccttgagattgcttcttggttgtattttggtcttatgtagtactcttgatttttcctttttaattttgtactattagaagcttatgtttttataatgcaagaacttctctgtcatgatgatcacagcttcggcagaagcatgtaacgagttgatggcatattcgttgattttgtcttgctgttgctatacttgctgcattagaaggaagcttcgcaaaacattgaatatcacggtatgcttctgatccccctaatttttggtgatcatatctcaaagtgctgtagaaactcacgacggtcatgatcttttcattacttctttggcagggaggtttcatcgacgatttcctttcacatttcatgtgttgctgctgtgctcttgttcaagaattgcgagaagtagagatgcgtggtgtttatggtatgaactctcataaaagcattgcatagcatatgtgtgtgtgttgtttgagatttcaaaatgttaatataacaaataaccctttgcaggtcctgagaaaacaaaaaccagccctcccccatcacaatacatggaatcttaagtaatagactcaaaaaagtgctattcagctattgtgatatacatatacctcaaagccatatatatatacacgtaaatggctagttgccacttttttatgtcaaacttgtaatgtgattttcattttcatcaatttcactacctcagatgtaaagtagcttctgtgaagttcttagtttgagaacatggtgtattatattatagacatattttttaatgatatagtgttgtttgagttaatcccaagtgtgtatgtgtgtgtgttttttttccctctttggtatgtacattaatcattggcttctaattgagatagaatgatcaatcccaataaacaaagaatgattctgggttcttatatcgcttactttatggaagagaaattctcctattgactcctaatttctcaattgtattataagctactgattatgatgtagaaggaaaaaaaacacttcaaaattataatagcagcaaaataaagtattttagtggaacacagccttgcacgattgcatcttttgaattgagaactttctcaagtcctagtcttatgacttagtgcctaaagcatatggtggcaacaatcacatgctcatcattactctttattttttttttctttttcaaaatgtggataactagtcaactgaatataataactttaagttaagataaaccatatatgtaatgttggagacaatttacattcaacatttgcatgtgacttgcttcttgagatgtttgtttttatgttattgccaaatcattaaataattatgattttgaaacaaaaattattaagattgttgaacaagatattgttgacagatatatagtacttaaaaaaaaggaagaattttgataagattacttttctctcaaagatacacgattcctcaccaaattctcttgcgaaataaatataaattttggtcttatatttttaaagttggtggtggtttctctatttagttaaattacaatttaaatattgtgttttgcaaaataaaacataataatacagtgagtctatttataatcaaacatttttactctaattttaaaactttttcttctaatttttaataacaatttgatttctaatctaaatacaatttgaactaatccaattatacttaactaatcaaattcaatctaataacaaaaaattagatatctaattacaattaaattaaaaatttagtatatcatgtaaattttcctaactatattgtaaataatattttttgtatcataaattaaattatcataaataattataatttaaattaattatgtaaggaccgtcagacaccatctatttctccattggtatgatattattcgctttgggcctaagccctcacggatttatttttaggcaccttcccaaaatgcgtcattccaatggagatagtg

SEQ ID NO: 296081 - DNA, 12534 bp, Cannabis indica
ataagaaatcaagtaatgattattatgctttaatcataacataatatatacttcagatgatgattttcacataaattaataactatttagataaatatgttgtcactgaataagttaaacccattaagaagtgttctatatatatatatgtgtatttattaggcgaaagttgcaatgcacgtatcgtcagatttaattgacatggtacgtcaataatagtagtattttcattattctaaattagttagataaaaaaaatatacatcattgttaagttactctatatccaaaagaaaaaatagagtaagtaaatgaaaatcaggtacttattttgtttagtagcatttatatcattgtctaagaatcaaactgaacaagacaaacaaatctttgatcaattacatacgtctatttatcaataaaccaacatagcataattatcatacaaaaataaatatattagacattttataacacaataaaatgctttactttaaaatcattgagtccttagagaataaggcagcaaaataatttatacaaaatttccagcaacactccaagtaaagggaaaagaagatgaagagatcaaaaaaaataataacaataacttttgacccaaataatcgataatgaaaaaacataaataatctcataataataaaaactggaaatattattgcgtaacttcttgacaacaaaaagtaattttgaatgtccacaaataaagtgtaaatagtgattgtggttattttttcagttacaaactttaaaattagatacatatatatgacatgattatattaaataatgtatttatgatatattaaaaaataaaaatattatatttaacctaatcatttaattcaataaaattattattttattaaaattttaatataaatatttgtaataatgtaaagaaaatatattattatagcactatattatttttattagaataaattgagtatctattatttaattaatattattttaatttttaataatctatctatgataacccaaaatagtaatggaattagttacccaggctaaacagtgacacatgactagttaaaattttcagcctaattctgtccagtccaattctatgtgtcaaataagtcctaatctcactaaaataatttagaacaagaatcaaagccgacaacattcaaaggggtggaggattgaaacacgaacaaaatacacactaagagcacaagcatggtgatctgagttacaaattttctccaaattggagggtcaacccaaactggtattaagtttccaatgccaaaaaaaacaatctctcgatttgatgattttcaaatcaacaaattttgcttataaatcgggatcaatggtacaaaatacaatagtatatttgatattcaagaatcttgctatgacaacgtacactatggaagattcaacactcctggaagaaggataccgtttcaacaacgctgagaccagaaattgaaaaatggccaggtttccatatttggatcctgttcaaagctttaccctgaagattatgccaattttcatggaaacctaagagttacaaaaatcacttatacttgggccatttttgtataacacaaacgaacatccctagccgtagaatttttttttttgtcctctcacttgaattgagatctgtacagtttttgctggcctgacattggtaggagtggcatgatgactcctaagaacatttccccccagccagcagagtccgtatcacaagaaacaaggaaaaaatgtaaatgaaaaccatgttgaagtaaacttagcctgctgacttccaaagaatatttccgccgatacagttacaaattcctcaaacagagaaaaacaggccatagataccatcagccatccacagataactgactccactaatattgcagtgacttgcatatacaactacaattgacatattagtgtcaccgagccagcttgttttcaatggaggactcacaatattccattcaaaaccctttgataataatcatactgtcgtgtccgccatgcatccaagctgctgctaatcagcgaaagcaccaaggacacacattgctgaagataggaaaacaaaatctaaatctatcatacaaatcatagcaataataacatgaacaaaaaaagatgatttacatacctcttctgttaaactaagatggaaccgcttcctaggttctgtattgttcgtggaccacctttaaagcatgggaatccagaatcctaattcaaacattttacagtagcaatttgtgtcaatcaaaattcaaaaaggctggagtcgactttctttattttcaacaatatacaacatcacaccaaccgcatactcaccgggcatgtcaagtattagtctaaccaacagtataatacatatttatttccgttatgctaaatacatgtttacgcatgatattttgcctatatatatagctagattctaaataaaaaacctatctattgtttagtgttttatagcagaaagggtttaggaacacgggattgacaataaattggttctagccaattcagcttttttttttttacggtaaagtgtatactacaacaattcctatttgaaatgagtttagataaaactaataagacctcagatgcttcaaaatagagaatactaaactaaaaacacgctacatcagatgctctaaactatttctctattttaaaacttctttaaaatttactgttcatgctctacatttatagaatacaattcatttctctaaacatattttattaattgtttgaggttttaattttattttatatagaaatatgtgtaaatattaatattatatgtttgaaatgaataaaatatattaaaatttaaaaaatgtaaaattttggtgatgtattttaaaaaaagttaatgtatagtgtaacgtaaaagtttgaggtaaaacaaagaaactagaggtttgggaggtattttgaaagataaagtagagaagttgattatgtactctaacataaaagtgttaagtttttaatcaatagaataccttctataatttcattaagcaccactaaaaagttcacgactagtagtgttataacatattgtgtattacattgttcataacaaaaaaaaaccctccaaactctaataggccttttattttcctttttcacaaaattcgcttggaactcctaatcttctacctattaaataaactaatggctaaaatcctaatcttctacctattatataaaccaacggccaaaatccctcgtcaaattttgatattctagctaacaaacatcatcatactagttattaatcacttccacccttttcgcttgttcaacttccatgctcaaatacattggcagtgtccaagcattattgactaacaacaacacagatttctgttcataaattatatcaagcatataatgttggggatgtaagagaaagtttgtgatacctgcaacatctcaacaagaagaattattcgttctgcatgcttacggcatgtgaggaagccttgaatgcataaaacctagatttgagaaagaaaacttgagagtgaaactcgtatgcattgagtctaaatggcataacaagtaggttttcaacttcatatcctgggaagagaaaaaaaggaagggacttttgcaattaccttaaaataatcaaaaaattcgcttggaactccctcagcatcagaatccatcacctggaatcacagcaagcatccaatcacttggccttagcaatgtgatacaaactaagtctaaaaatgttaaatcataggcacaacacagccaaaaagaattgtatgctggttgcttgctagagaaaacgatggtaaggaaaaataaagaacagagataacccaagctatgactttattaccatctaaataaataaaatcagtctttgcagtgtaaaaaaaattgtgtttggggaagaaaacagatattctacaagatagaaaacaaacagctaaacatattacaaagagacttaacagtttaaaagtaataaaatcagtttaatatggaaactcaatattattctgcagcaggggataatccccaatcaaataagtccacggcagagaatattgatttaaatgctaagaccactcagcagtcagcaccaatatccagacatcttgttggggaataaaaccagcattgtcttacctccagaagttcacgagttagtttgaatggggcactctcaaaattcactccgccaggcgaattagagagcatgaacccaaaatcaatatgtataatatgaccttcttcatccataagcagatttccattatgtcgatcttttacctacacaagaataaacgccccaatgataaacaggtttaacttttcatgttctacaattcatttcagagaactaaacaaatatccaaaaaagcacaacagcaaattaatcagcatctgttagtaacttaagcattagcataagcatcagggcacaaaaatgaataatcatcgaaaattgtatcatgggcattgcaaacagtgttctaccacctgaccagacatacagtaaaaaatgaggaagagaagaacattacaggttccatacctgtaaaaggtagcacacaagagaatatccagccatactttcgacaaaatttctctgcaaaaaataaaataattataaataataaaataacaatgacttgcatcattaaaattatactttgaataaaattcaatcaaattttcattgtcaatatattctaaagaaaatttaacaaatttactacaagttgttccagctttctgtaacaagaaaatgaattatgactcagtattccacagaaatcattttcctgaaatgaaatgataagaactcaccaataccatttaggggcctcaatagttacctgggcaagcttaaaacttggagaattttcttggtatttcgcaatgaagaaatctcgtagactattgatggtgggatatctacttttgatagaatgaagcgaagcctgaaaatagtaacagaacaataaagctaactaaaccaaggaattacacattccttaaagaaaacaaaaatgattagttaccgtatctggaattgtttcaattaaagctgtgtaggaagaggtaaccaagacttcataaggccgcaaccatagtggaagaccagcttcttgaaatatatctagcaccatggtaaaataccattttgtaataggaagaaagagcataatcaaatgtacaactagttctaacatacgattaattatgtgaacagattgctaatcatgaaaaaggaagtgatgaggcagttcagcagaactgcagacttctattttttctttcttttggacatgagacaatatgtttagtttaaagcccaaaaatgttgcaggggcaaaataagacactaagacaaaactggggaagataaaaaagaccaggtcctatccaagataaaggcaaaaggaaagaagaaaaatgactacccaaaattaaataaataaagaactggtgacatgaatagaattggatttggaataaaagaatttctagtaaagatacccaccatagaagtgtgaaataagttgcacagctaggtgttcctgcctacaatcatcaccactcttcacaattacctacatggaagtacaaacaagaaacctaatcatgcttcactttcaagcaaaagatatttgcagaaaacaccaatctaatcatgagcatgaatggacaagacagtgacaagagacctttcaatctgaacatccgaataagaggtgcaagtcatgacatatatatcatttacatacagccattaagtatagctaggatatattattctgaaattcagtagctagaaagtgtactacaaatataagatctggataacatatgagttttcagttctctttgtccaacctgtaaatgttgtattctcagaaagcatacttaacactaggattgatatggagctaccagcaactaaaatttaaccatctgtaagtgactctcaaatgttcttatttcaactgtaatgtggacatgtaagaatttgcagtctaccaaaagcatgattacaacagttaaaagaataataaataaatgaaagaatttcagcatgtaaacttacagagcgcaggtcccaactacttgacgatccatagactgacgctttgcgtattctttctttttttacctcccaaagttcaccagataaggcatcactggccttgggagtagcaccattagcctgttgacatatgtataacttataaataaataaataagtcagcacccctcgaaaaaaaaaaattccagcagttataaacttcaccataggctgtgcatctgatgaatcctgaccagcccctttcaaagggagtccaggaggtgcttctccttttgcagcagcagcctgaataaagatatttgaagcataagtaataccacagaagctttatctgatcgacaatttctttttccagaaataaaagcagaatttttttccatgtagatcttccattacacaaaagtccaaggcaaaataagcattttatatcgtaaaaacctcatatgcctcaacattagctcatgaggcatcaatgaagctcagaaagatggttgatagatattaacattaagcaaaacaaaatattttttagaattcacattcagcgcaccaatttcatattctttggagcttatctacagtgtaaggaccaactattgtttctaatctctctttaatttttttaaagcaagaccggcgcttgtattaattagctattgtttctagttagtaattactgaattgatcttgcttttctacatccaacattaatttatgacacttaatgaaacaataaaatggaagaagctgtaagtcataccaataaaacaaagataaatgacaaataacaatgtataacatctaagaaaccgagttaagaaaatggtcatgccaaaagcaagcataacctatgcaagttcctaaaggaaatacctatttattgagaatatcacttctcaaatagtaaacaagaggaatttatatttaattccattgctatgtaggtgtccaagagaggctcaattcttagttcttgtgggagcaagcaactgtaataatagcatcaaatagatagaacttataaacatccaagtactcaccttgacttcctcaatagctactgtacttggaacgcgacggtgttccttccgacgtggtggaccttgaacctcaatgtcatccattcttacaccagggtctgctgtcaacactacccttacccactccaaatcacaatcatgggctgattttgatacatcagctccatcatcttcaccttgacaattcttagacaaaattttaatagcatgagcactatcacaatggacgcttgcacatgaattaggttttttcatgtcctctgaatggctgcaagatcgcttctctacagacagctccacattagcaaactttacttttgcctctgacatgtgagccatagcctggtcaattgcttgtgcagtagaacttgacatcctatcattactattgcgatacacctcctggactgtccataatggatatgcccaaggaggtggctttggcagaagcgcatcaccatttgctaagggaatccctcctctagaaagcttttgagaactggatgcatcctttgggttactaaatcattattggtatattgtgggaaagaaaagagaaacatatcagtttgaatggattcattagtgaactcaaatatttcccaaaaaagtaaacttatttcacggaattaaaaataagctacttgcagttcacgtaataagttaatgaaagaatacctaggaatttcacttttcaagacttcaacacagataaggaaaggtgctttctccctagaatttaaaagcacggcttcatcttcgggtatatgaaccacacgaaacattccctttcccattggaaagcaaactcctaaaatatatgatcaaagaactaaattagaatgcccactctagcttagcaactataaatgcataatatgaagaaaaataaatcaataaataaacattcaaagatatataccagcagtaaaccacactggaagtaaagtagtactgcattacaaaaagacgaaaatgaatttaaaaataaacaaataagtttaagcagtctagcgtggtggtattttttttataattgaaaaaaaaaataaactgaggccaaaagtcttgactgatctctactcaagtttattaagcatggcaatatttgttcataatcctcttaataatgagaaacaatgaggttttgtttcttgctttagtatagattggtggcagatccctagtccttagcctagttttttgtgtcatataaaaaaataaaataaaataagttcatatttatatgcctttaaatggcaagcaatcctccgccacaatctaactaaatgtgcaccactggtaattttagagtttaacccataacaaattagtgcaaaataacacattattaaagattgtggtcataggcataacatagtggtttcacatttctcctcacaaaaaggaggtactaagttcgaatcccctcccctaatatcacaaaaagattccttttccaaacccagcacaaaacacctcaatacatttgacaatcttttcacgaaaataaggaaatttacttctacatagctacagataactgatactcaattgcattgtgctccaaaatctatcaggccaagcccagaatcataaatggaaaaagaagtacctccaccattttgggcctcagttacatgctggttgatctctacaagagactacaattacaagaacgagaaaacacgtaagacattcaagcacctgtatatgcacatcataaatgtaacatgaaatgaaaataatattgataaaataatttacaacctcacaaagagcatttttacgatcttcaactggaaatatatccaccaaaccatatgaagtgtcacataatgactgcacaaagtccaatgattcatgataagtccctttccggaactgggacgcagtatgattgggaagcgggggtttggcattagctttctcattctgttgctgaggcgaaccaggacgcttctgcaaaattaaaagcacatttaagtcttcttaaatcattaaaaaacaagcaacttgcagttcattgaagtctcttcaatcagtaaagagcaaaaaaaccacatataatatgactattcgaaatccatcagccccaaaaatggctcctaccatgaggcaaaaaaccaaatttaaatattttattaaccctttagtcagataaaatgtaaaataaagagtagctgacgattagcatgaagcatccttgattcaatgcctgcattttgttcaaggtggacctgaactatagatttgatctcaattttcatcattgtatcagctcctttcttctagttacaaagacaccaactttacaccagggctacatgtcttaggtaaaaatatcccataccaacaaccttgtaatgtagtaaggttgcaagctcttagcatgaaggtgctacaataagcctataatgaacattcattctttcattaaattatactgcacaattttaattacaaattccgtttataatgcaaatcaccgcttgacaaacatgaagaaaagtaattatctacaagaaatcgtgacttcaaacttacagttttgtacaggaagatggtatccacaatttctacatttatatacattataagaaacaagattgtataaataaaagatgaaaggaaatcatctgcaatagtctagaaagccacaaagaggctgctcattctaagacattatataagacataaatgaaaaacacacacagaaacatcctcacagaaaactaagacaagtaacaatcgcaaagaagcattaagaaggagatgtattaaagttcttagtgttgaaaatccaattagcaacccaatgctcaactttttaccatatatttgtacccataataatgatgtcagtaagtataaaaaagctttcatttttaggtttatatttcataaccctgaatagatttaatgcctaaaaatgttctggttgtacatactgcaagtatgatataagctgatacaagccataagaaaattctgatagccggttcaaaatcaaagggagttttgacatattcacgatttgtagataagcactaaaactgaagaaagaaggcttgcaagctcggatgataacaatattatatagtaagtacattcaaaatgaccagtaaaggtaaatcatacttccaactgccacctgagcaacaggccaggaaaacaaaacaaaaagacagagtaaaatacctctttatgcttcttcgaaccaaaaagctcagaatcttcaaccgatcggtcgcgatccctaaacaatttgcgaaaaaaattctctgttcctggactactttcagccaagccaccattactgctttcatttgccacgttatttttagcatcttctgggtgcactctaaataaccttttgaataatgaaaattcagaagagtcatcttcctccccattgacacttccctcatcagctttatcattaccatctctcctgtcgtcaaatttatccctaaagaatttccgaaagaaaccttctttatcatcatcttcagtagatttcgaacctttttcttcagagtaaatcacttcttcatcttcatacctatcagctacatccctcttatcatcagccttatctttaaagagcttcttaaagaacccttctttttcctcatcctcagctgatttcaaagctgatttatcttcagaatcgttctttccatcacgaaacaacctcttaaaaaaaccatctgagcttgatgttaagtcttcatcatcccctttactatctcttaaaagtcttttgaagaatccatccttctcagagtcatcatcatccttttcagatgacttcctaaaaagttctcgaattttcgaacctccctcatcttcacccttactatcccttaaaagtcttttaaagaacccatccttctcagattcatcatcatctttatccacagatttccgaaatagcaatgcatctcgaacctttggacctgggataaatttcttaaatattttgttttcgtcgggagactgactaccatcctctagccccacacttcctgaaggcgagaaagatagagacttctgagggggtggagaagatgtcagtgacaacagcctttgttttgaagataatattttattcaaaacctggttcttgctcccagggctacttgactcactttgaggccgtatcaatgtcggccactcccccatcaaggtggccgcaatctgacacttctcttggatcctactaatcccttcattgtcatcagaatcctctaactcagccaacaaaaaccagtgcaccttcaaagctatcttaagcgattttgagcaaatgtcaatgacaaatttatccaatgaggggcttggcttgtgaaccatcatgtaacatatttgaaataaatagctttcaacacccgataagggtagggtgtacattcgattacataggtaatcacgtacccctgaatgctcatgcttgtagaggtagctaacagcaatccactcacagaaaaacgcagaatcgaagaacctaataagccacccgttctcaccggattcgctcgtcgggtttgcccgcgaggtgatctcccgaggcgactcgtacgagtcaccgcgagtcagtcccaaaagccgcaccattctcgatctatcatcataaaccctatccacccctcaaaatatgcagtgggattacaaaaaaatcccaaaatttctcgcaaccaaaacacagctacaaccccacaaccaaataatcaaaccgataatggcaccatttcttaattacaaaaccctaaataataccacaaaacctttagaaaaccctaaattcccaaaatggtgaaactccagctcctaacaatccagttaaatgtgataacttgaaatccccctgatcaactagtaaataaaacacaattcccgatgcgataacaccagagaaaacacttcctgtttgtttcccgggaaaatagtagaacggataagaattgagcagaaaaacttcagaaatgatcgtgaattttagtcgagaaaaaaaaatgaatttgaaaacaaatatatagatagtcgaatcgtggttataccagaaatggagatattaagattcggcaaggtgaaagtggaattgaaatggatcttcctaagcttcaagtgcacgatgccgttcgctggcccttctgctggtggtgttggtggtcgtcgttgttgttgttgcctgttgaacaaagaagaaggaagggagagagagagatggtaaattaaaataatttaagttgtttaagcctaagcattagtaaataattaattaataataaaatcaccatttcaaattattaataataataataataattattacaaaaaaaa

SEQ ID NO: 296082 - DNA, 4519 bp, Cannabis indica
atttctacgctatttattgataaaaaaaattttagttttgagtttaagtccccaaaagtgatttagcgggtcacttatcagttttacataaattgtgacttagggctttaaattgtcgagcagtattttctacttaggttgactggcacacttgaattcagaatcaatgtgagattagtataatgatatgtatggttacatgtttagcatacatgttttatagtttccagttagataacatatcagtaagagcagtattagtgtacatagagttgcactagatactgacggatatatgttagccaaatctaagccattagttcaaaatatccttaagaatggtatcgttgtaagtagagttgaattggatatcaatgaatatatgctaggctttatcacgaatgttccaaacttagtacgcattagaagcgagataggattgtgattaactttatgggtgcctggttatgatatggttatatgtttatgtttatacttttcttactgagtttgtcgactcacatatattatttacatttgtaggaaaaggcaaggcaaaagctgaaaattagtgagttttgggctagattaagattgtacataccaaggcagttagacctggagtgttcagatcttcaagacagttgggcctttattttgatagtcgctaggcggtaacttttgtagtacatgtatcttggacacagttgtaacttttaatgggatcccaaaatatgtatttatatatatttatttatgtttaagtttagttatgaaaattttaattaaatatgtttttcaataaactctttgattagcaaagaagtagacaataattatgaaagcacaatagcacgcctaaactagtagggcgttataatttggtgtcagagccaccaagttatcttctgaagattgttaagatatgtacaatcatcatcagagataagcttgactcacggtttattaagcctttatatgctttagtagttttatataataagatgtgtataagaaaagcttcataagaagtatgttaggagcctgacagcttaatattcccatgtatacggtaattagattttaaacttcattgcggtctgaccaggctaactgatgatttcgtaggctagtccaaaagaatggatgcccaaaaaaagacgagaaaccaaggcaacatggtcttatccagtggcgatcggggagattagaattcccttaacatctgtggctgaggtagaggttgaagatgtagggctcgcaatcggggtaatgttaacccactgtttgctgccaaggattgggaaccaaggttcgtagaaatgcaagccaaaattaatgaacaagtcgaattgattcgacacttaaggcaacatgatcctcctatggcacctacccctgaagtaccaatagctcctggtccattgttgccagtggagaaaattgttgttggtaatctcatggaattgctttacgaaagattttgtaacctctagtttttttaggaggtctaaatgctatgatagtcgagtagtgacttacaaccgttaacaaaatattgaacttcatggctgtcaccaaaaatgatagagtgaccagtgccacctttcaattccaggaggatgctttaattttgtgggatatggtgtcccttaattgggacattaccagaattacctgagaggagttccaagatttgtttaatgctaagtactacaatgaggcagttcatagtacaaaaaggaaagagttcaccgagttgatgacccaagggaagaatatgtcagttacgtaatattatacttagtttgatagcctggccaagttagccacaggtatagtacaaaccgatttcagtacaaaggaaaagtatttggctaggttgaatcctgaaatcaagcattatttgttgattactatagatgacacgactacctacgcttggttgagaaggcactacgagctcagggcacagtggaatttatttaggagccctgagggactaaagttgttggtgtggccactactcctcctacctttgagagaaaagctccatttacatcaagtggcttgagtttgaacaagaggttcttatggaactaaggccgaggtggtcgtcagagaggctcagagagtcgttacacttacccagaatgccctagctgtaatgagcatcatctgggtgaatgtaaagaccgatcttgtcttcagtgtggtgtgattggccattataaaagagactgcttgtagttgaagaaataagagctgaaacgagaggtaaaacccgttccaactagggtgtttgtccttatccaagctaatgtcaaaactagccttttagtggtgataggttagcttctagttaacaactctttctactctgtattgtttgattctaaagatacacattcatatgtggcagtcaaagtaattgataagttaggtaggccttgtgactgctatgaaacacgatttggaaccctactacctagcagagaatcagttatctccaaaaggtagatttagtttatgctaattagagttgagaatagggagttgagtgttgatctcatagaattgggcatcgcagagtttgatattatactcagaatggacttcctgtctaagtatgccgctagtagatattgtgtgcagaagatggtaacttttcaacttgagggtgaataaccgtttgtatgtgtgctattagtttggggttctcagattctagtaatctcagtgctaaatgctagtgatctattacagaatggatgcatctggtttataacagtggtgttagataccacctaacccgagttgattctgaagacattaaattgatacaagagttcttagatttattcctagaagaacttctagggttaccaccatagggagaaatagattttgtcactgacttggaacctggagcggagctagtttttaaggcacacgaaagaatttctaccgcacaactcaaggaagtaaagttacaactttaggaatgcttgaccaaggggtggccagattagaccttccttggcaaagaactccaaggttccacaacttctccctgcctcgacaagacaaaaactaaaagacaaggtggcctacgttgctcctatggagctgaagtgtgcagaagaggttcgtaaccactactaggaaaggtttcgggcagatgttggggtgtcactaggtggtgcagatgtccttccacatgacatcctcatgggaaacctacttaaggactttaccaaggtaatcttcatatattttgcttttagttcgtctgatcaatgctctgtttggtgaggtcttcaatggaaacctcactgagagtgtcaaaacttgttgtactagccaatttaactagtgagtcactactacaatttggctttttagtgacactatttagtgacacgcacaaaagtgtgggtcactatagagttaggagtaacttttagtgacatgcataattagactctaaacattaggtgttagtctcctgtaatgtgtgtcactgaaaatatagagtgtcactaaagagtaaatataaatttttctaatttttattaatttaaaaaatattgacctataatgacgcgccaaacatgactgggtaaatatatcccctcacacttagcgcgtcactatatcataattctatttttttaaaaaatatatatatatatatctataattaataaataaataataaaaaaaaataaaacacaaaccctatcacttttacaaactctatcaatttacttagtaaataatagaataataaaataataaaatagatcattgggaatccgaatgaatgattaataaaatacatttgtattctttgttgtttacacatttcaataataataataataataataatttatttctctctcttggttccttaagactatgcaaccctaattttatcacattttctttctctaaccaataacctcactctttctatcttgacctctctaacatgggctgatggcggaagcacctcccagccccagcgaacgacttcccgacccgacggcagaagcacctcccagccccagcgaacgagacgatttttgttttcaggtcgatggtggatgttgcgacttttgggttgcacggtgtctctgccttactctaggacaccggcagctgaagattcgagtcccaacccgcaaacctatggtaaaaacttatggagatattttagtggccgtataagatgacttgctctacctctatatataaccttcgaagtcatagggtgaaaaccccatttcgaagaccaacagagagttaggtgagagactcatagaaatatcatcgaaaaatatagttttgctagataaactgtgggatgatatcattgccaagccttcacctaagcgtgggcttggtaaacttaggaagatcaccacaccatgtcatcgcccttgatgattatcaaaggtccgtacgtaccatttatattattatagtgttggaatttattttaccaggatct

SEQ ID NO: 296083 - DNA, 5980 bp, Cannabis indica
cctccctttctttctggcccaacctcacattgggtgtatcgctacataggactcaggactgtgccttgtaaaatttttgaacaaatattttttcatgttccataagaaaaattttgttgattcaattttttttctatacaattattttcataccaattaaaaaaattgatcttatttgtcctttttttatattctttttccttatatttttcttacctttttctttctcactaaaatccaacttctatagtctaaaattattatttcctaagcaaatcttatattatctttattaaaaacaatgccggcaaaactaaataatataacttatttttttatttaagaaaagaaattaaataattgatcattttctagcagtattataattatgtaaaactactataataatttatattcctaccactctatatacaataaattagaagataagcactaaaaaatattaattttttaatttattttaagtattaagaaattattaatcatgattttaaattattttatcattttgtgttatagtttcaaccatcatcttctatagttttttttttccaatgtaaaataccaacttctaacaatattattattattattattattattattaatttgataaggaaaaatgcggggaacagactaagacgtcttcataaatgtcataaattattggatgtgtaccttaaattaatacataaatggcttttattgagatttatgataattcatgttcgttttcataaatgtgctctgctttataattgcacttacagtgagcataatttcaaatataattaaattagaattaacatctgtcagaagaaacactgacgataagagaatacaactagtattcaattaatatattttcatttcttggtcaatactattgcattggctgtaatcagaaaacatgagggcatatgataaaagtgaaattataattgaaaaaattcacgagtaacgtgaacattcctctagcaaacagaaaaattcattgagaaactcgaccaaaaattttctataacacatcacccctttaaataatcatcgatattatattttaaaatatcatgtatttaaagaatcaccaaagaatgaaagtagacagaatgagtagaaaaatcacaaatatactctcaatgagattctaaaaacatccacttccatgacatggaatatcaaagaaatcacaactaagagacacgccctactatttgaccacattacaccccccatacaacacaagtaaaaagagaaaaaaaataaaaaaaagaaccccgaccttcccaaatcattctccataacatgaggctaaagaaaaataaattatatataatgaaagtgaaagtgatgaagcacccaaaactgtccgagaacccttctctcaatactccatgcaaactatcaaattctactgttgtttgcattcaggaggcctctcgccttgcgcaccgtccgtacctgctgttcttccggttttctgtttcgtattaaaagtatatgttaacacacataatatatatacacaaatatatatattagaagatcaagaaaaagaaagattccatacctttgacccagctgatgtctgcaagagctcccaaaaacatttcaaggaaaaattaggaccattccaaagtatataaccaattctagcaaaataagtgcaaagaaaatagagctatggtcctataccttctttttggtcttggtttcctcttcgtcctcatcatcgtcctcatcttcatcgtcgtcctcctcatcttcatcctcatcttcctcatcatcctcatcctcatcaatgtcttcatcatcgtcatcttccaggtctccaaattcatctccttgaatggcctctcccgtaaaccaagaaacagcatgaggaatgatcttatcacgaatggttgaccttcccgagtaaaaaataaaagtaaaaaaatattagcaaaacacaggaagcaagtcatgtatcatcaacatctttagttaggatcaatagcagagtccggtgaaagaataatagttttctgccattaataaattatatcaatacaagatttaagggctcacccaatgtcgtaatcttgttccatctggttctgaagctcctcagcctgtgaagagcaagaaataaatataataattaaaaaaaattaaataaaaaacatgcttcttaaagaggggttaaagaagccaggcttactgcatcctcatcaatgtcttcatcttcttcgggaacttgaggtggattaaagaaattgaagaaactatcacaattttcagtttttgtgattggcttagcattcttggcacccttcttaggcttctttttaagaaccttctgtgttaaacactttccaggaagccattcgatttccgtcctatgaaatacaagatacaaaaaggttaatacaccatatagatctgacgatctgagtctgcatcatacatacttcaaacaataattaccctattgctttctctagaataggttcatcttcatcgatcatgtgatatgtttttgtcaagacagtgttcttaaagaaagggttagtctcaaagaagaactcaagtttgaaacccttgggattatctatcctgcaccacttgatgtccttaaggtatttgagagctccttcgtcacgctcagtaacctgacatcaggaaaacaagaaccaacacgtgattaatagaagaccataggaaataggaattaaaagaaatacgacaaacaaaagactacctcctcagctaggacttcattatttttcattgcattgagccagaaatcaggcactcctacttctgcagaaacacataacaaacatcaagacaagaaaatagttgccacgatggggctagaggttctggtaagaaaattatactgtaccattagcttctttatcctcctctttgtctgttgctgcttcagcagtaacaccttcaacttcagtaacaccattgactatatcatatctctgcaagtgatcatgaacattattataagaaacatagagatgcaaaccacaagaatgaacataaaattatcccacacaacgttgtgtaatgctacttgatgtttgaacatattagtaaaagaataaaaccagaggcatccacaaaaccttacttgacaaaaacagagcacacccctatatcttgaaaaagtacacaagtaaaggaaaagaaaaagacatttaagccgtgagaaaacaaggcctcatccgcagtttagaatgtaacaagtatgttaccttggtgtatagaggctgatacagtttctggtatttggcttccagagctgctctctcctcaaaaaacttggcttccaactcatcgtgttgactctgcaagtcaaaaaattaacttaagatactccacaaataaaagataaaagtaatccaagttcaattcctcactaacaccataatagatgatatataaataaacaagaaaaacgcagagagaaaaaagagcagagaacaatttcaacaaaaagaacccacgacgtccaataaaacccaagagcattagtcaacacatgaagcgtggaagatggatagcatacatttgaacttaaaataaatttttcagcagaataaaatgcccaaatttaaatatacatatatatatatagaaggacgagaaagtgaagaacagcaatgaaatcccatgagaaatgtaaaaacaaatacctggatttccctaagaacctcgaccctctttctaacattcggtgtcaagttctccaacacatcagagtgctgcccagccaagctctgtatcttattctgcacaagatacaaagaacaccccacaaccatcagcaaagcaagccttatcccacatatacaaaaaatcttgcgccgcaaaatttaaaaaccgtcggacttttcaaaagttagagtttttcgtcatttcccgttccgacgagttttgataattataattataattataatatataaaatttctgaccttgagagcgttaacgaggcctgctcgatcctcttcgttgagagctgtacagaaaaaccaacaaaatatcagatttttcgaaacactgactagcacacaatgcttaagggaaggaaaagttagaacaatagggattagggtttatgggaatagaaataagtaccagaagtgagatcggacatggtgaagctctccttgtcgttgctcattgtttcagagaagaagaataagaaaagatgagttgagagggagaagtaaggaagagctaaaaccctagaaggcggtgtttgggggaaaaagtggtgaagagccctcaaaacgtgacctcctttaaatcctctctcccctctttttgaaacctaaacagctgttctctttatcatgcggggtctgagcctacctgtttcgatttattttcattttccttttctgggagaggcccaatagttgggctctgtacactggaaagcccatatttactgggcccaatggcccagaaacaatgaattgtttccctctttctcccttaattgcgccttccttttacgaaataattacataattagccaatagccagttgtgaattgtgatagccaggataaaaaagagaaacaagtaaagtagttagtagttaccatttccggtatatagagaaaagtgattgtcaattcatgttcattttgtaatttctctaaaaagtttataaacaaaattcttaacggttattgtttgactcatggcaataaaattagttattatattcaaaaaaaatatgtatttaacggtttttttttggatctcgattaataatgtgcctcttgcatatatgtttgaggcatttgcccgtgaatggggaagtttaataggaaaagttgaggatgtaagagtggttaataaaattatgaaggtccgtgtgtgcattaatattactagacctttcaaacgtggtttacgagtgtccattgatgagaagagtacggaggtatctttactctttcaatatgagcacctcccagaattttgtgatgactgtgatattattggccataaaactttagatttccctcttaaagactatcaagatgatgaaatatggccaattcagaatggacggtatggatcgtgcatgtgtgctcctagctcaccgcctaggaatcgaggatagcgtggtagtggcaaacattttgagtcacagtttatgaacatgagagaagcgggaagaataatggaggttgataatcgctctcgtctaagacgaaacacagaagaagagtttgttgcaacatctatttcaaaaagtcgagaacgggaggaggagttacgtgttaataagggggttactttagaaaatgaggtagttactagagagcccccttcaatccaaacgatgagaaatgacaccccttgagtcccacctgttcagattaatgctggagaggagcgcccaccattcccatcttcgttaagggagcttcaatcgcaagatattcaactgcattctaacagtattttggtggaggagtctgagaccactgaatccccactgttaggggagcaacaacattgccctcctgaattagtgcttcgtgttggagagtcccatgggcctattgaaattagaaatcgtgataaaggaaggtccattgtttactccgaggtgaaggtgggtaagttgtttcaaagtacctttgggcctatggtcaaaacccaaaagaagaagacatggaagaggcgtacaacctccctaaatagacatggtgctagtattttgttagatggtgttgtggctacacaatcagatgagggtgagtggccttcttatggtgtgaaaaggaagaatgatgttgttggtacgatagaagagcgaatagagaaaccgaatattccatcaggtgttagtcttatggtggtcgatgatgaagtggcgcagtctgtagaatagactcgccaggcccaatgagtatcgtatgctgaaatgccc

SEQ ID NO: 296084 - DNA, 2288 bp, Cannabis indica
ttagtacttggactatgaaccatgatgaataagcaagggtgctggcaagcaacatgattgtgccacgtgtccaatgatgatgaggtgtgatgatgatgggactatgatgatctgaatgatgattagatataaaaaattcatttcctttgtaaagggcagtgagtagagctccactcacacacaataaagcccctattgtctttactttcccttctttgcttcccaatctaagtctctccattcttacaacaaacacatttttaatcaacattaattaacacaaatctataatttcttaattaattacatgcatatatatatatactatatatattgtaccttatgatgacagaaacaacaaaagtgactataggaataaggttgaggaagttggttgcatatgtagctgttgtgtcttttaaaccatagtagaataatcttgtggttttcaccttgcaatttatgtatacatttatatatattatatcaaactataaataagctcattgtaacactatgattctctaatcaatgaaacacttttttctctcttttctcactctgtattactctgtttttctttactaaaatggtatcagagtcaagaagatcttgagctcctttctcttcttcttcttcgtttttctgtgtcctttctattcttctggctatggcgaaaggaggagtaacacatactcaaagaactttaaactaagatgataattctgaaaaatgcaaatcgatcatttgctactgatccattgctattctttctttctccatttttagacacttagtttgagacaatttgaaatgagcagctaatgggtcgtaactactttggctttgtccatcttgaatttttctattactttctctaagtacttcttctgatgcagcttaattatgcctagttcagtcctttcaatcttaatacctagaattctcttgaccttgccaaaatcttttatctcaaattcaatgtttagttacaacttcagcttattaatctctacttttctctttcttacaattaatatatcatcaacatataacaacaagtatatattatgattcaggtagacacatgaatcaaaattattcttgacaaaactaattttagtaatgaattggtcaaatcttttgttccattgcctaagggcctactttgaggccataaggagctctttagaagacatacttcatctggattaccagttttaaaacttttaggttggctcatgtagatttcttctttaagtgggccatgtagaaatgttatctttacatccatttgttccacctcaagtccttctagggctttcggtcgtacacctcactgcctattgtctccctaatatttaaatccgctattagaactcttgtcccaagatgagttgaggtcttcgtctatccggtggtcacctcgagtagtcgctatggtacatcttcaaaaaaataaggaacatgaaggtgaatagcgctagtatgttatccatgatggacacacttattagtaaaataataataataataataataaaagaagtggagagaaagcatatatgtatggcacctagtacatatatataaatggtgtgccaagacaacaccaatttatatggagaaactagatgagcaaataaagacaatcacatgtgataaattttgtgatggctatcttattggtgctctccaaaattcctatgagtgtggatggtataatatggtgcatataacacatagaaaaagtgtacatatgttacgaaaattatgaacaatacgcaagtgtacgtaatcaagtagtaaactcacacaggtgaggtcgaaccacagggaattgaactgaataccactaaactagatttatgattctatttggcagataaaaataattttaataaagtttgaaataaagataatcaagaaaattaaagaaagcagtaaagttgtttaattaaggatgagaaattagggaaaagaatcatgttgatttaattacccaattgttaatgctaattactactctctttctcaatgtgaatgacagattataaaattaacctaactcttttcagatcttttaggtcctaaattacatgttatctaatcatctctgaattagactaacatataatcagcattacgcaataatctaattgtcacaaaggctatgtaaatactttcgtttcacatcaaaacctagtttatccaattttagcattctcaattctcacttttcagattttgaattgagatcataaagcatgtaaaaggtgatcaagctt

SEQ ID NO: 296085 - DNA, 2635 bp, Cannabis indica
ttttataattttttctctataatttaaagactgaactattttagctcggaatgctcttactctactgatatccctataattttacaaaatatatttttagaaaatatttttatttttataattaaaaaatattaccaaatacactcataaaaatatattcttttttaaaagtatatattgcaccgtataagcactttatctttttattgtaagaaaatatttgatatataattaaatataggaatttggtcacataataattcatagtgatgtacattattgtacgaaaaatagttcagaagaatgatatttaaataaggtcacatttgggtcaacgaagtaataaaaatatgcccaattatccattagttaattattgtgggtccacttgtcataaatgtattttgttatgtcaaaaaaatccatttaattagattgagttagagtttcgatccaacagataaattttgatccgaaatatttaaatacttattgattctcagattagattcgttctgcctcgccaatttttttttttttgaatcggatctaatccgatctgatatgtttcaataaaaaaaaacttgattcaagacccaaattcggacctagacaaccttcacctatgatcgaacccggaacctggactcgaacttagactcaggacccagacacggggtgagaccgagacttggacccggacctaggacagacagacccgagacctagatccagactcgaactcaggatctgaacccaaatccgaacccagacctagacccgggacaggggacaggggacccggaacttgacctaagacgaggacccgaactcaggatccgaacccagacctcgggtgagggtgggacccaaactcagacttggacctaggactggactcgaacctggatccagacccgaacttagacttggatcccagagcctggacccgaaccgaccctagacccggacccaggaccaggacccgaactcggactcgggacctgagacccaaacttggagcgagacccggttctcgggacttgggacttggacccaaatcctgacctaggacttggaacccagatccaggaactcgatacggattcaaacccggaccaggacccaaactcgggacccagacccaaaccttggactcgagacccaggcttggaccaaacacgggatccataatcgaatttaggtccccaataaaatttaaaatcattttaaaagaataagttaagtcggatcagattagatccgatctaaataagtatggccagatctgatctaatccgggcatttgatttagcagggtagagcagatcattatatgatttggatcggatcggtttatagttaaatcaaattcgactcgatctatttacactcctatataaatgttatttaaaatttaatttaataacaaattatacacacacgtcattaattaaattgttataataaatttataggacaatatatacccactcaaaaactagaaactagatttacaaaataaaaaaaaaagttgaaactagcctattacaattttgaaacgagaaaaagaatgtcaagacaatatcattataaaataaaaattgctttgtaaagaaatattataatacaactagaatagtcaaaccactaaaattagttttagagtaagcaaatgtactattagtaatattcctaggataataaggaaaagaaagataattataagaattacaataacccaaaagtattaatagagaaatgccgaagggtactagtagtacttagcactattttatatgttaatattgctattggtccaactaagtattgggtcccatataatttaatataataattttaggaagtatcgctagccaatcacaatacaacatatcgagaaagtactaagcactactggtacttaataacaatgctcaatataatactcaacaccgtagatgagcatagccaagttttgagtgcatcgatgacattgcttgagataatccgattccactaatataatatttaacatcaatatttacccatatatgcaccaacaaaagaaaaaacataatgaatgatggttacttgttaattaattaattatatagattaatattatgatctatgtatggacaaaaatttataaaacaacttaaaatattaatatatatatatatatataaatatgtaaccgtatatcttgattcttgatcataataattcattcaagtaccaatatatataaatataaatagtcaaatataattttatctatatacaaagttctgtctctttaagtacagactggccttttcttttttctcaaagcaaacttgtcaaaatgatgaaatgcaatgtatacatataataaaaacattaatataattttattttatataaaaaaaatgcagcatattaccacactaattaattaataataaagtaatatgtattggcatcttttagtttgatacatataggggatattcaacgaatcctaggattaggatatatattggcaaatgagatcatataaatatacactatatttatttatttatttattattattattattattaagggaattaaaatcctatatacaattttctaatttttttaaaaa

SEQ ID NO: 296086 - DNA, 1200 bp, Cannabis indica
aattaaaaaaaaaactaattataacatcagtatatatataattgggtatgcttatcaaaccgctgagatcatcaatataaaaacctagcgtacataaatacaagacattggcagaataatatagacatttaaaaatataagacaattctttttataaaattattgtcttgtttgatgatgtagagttactaacattattattagtgcaatatatataatattggtaaaggatggtgaaaggaagagtatgctggcagtccaaacaatacgaaacacccaaatggcttcaattttcaacgcttcagtagcgattctagtaaacacaacattggcagctctatcaaataattcctacaaagcaagccatcttcacaaccatgcccttctcggctccaaatcatatgaaatcgtcgctataaagtacgcctcaacgtcattcattttgttatctagcttcttctgcagttcttcggcccttgcacttttcatggacgcaaattattcgataacagcttcctcattagatcacgactctacgtcctttacatttccaaaagtgattcttgaacgtggtaaccttttggctcttattggaaatcgcttgctctggctatcctttcctcttctcttatggatgcttggtcctttgccattaatattctcatctgcagcaatgatttggtggctctatgaccttgattttccaagatacattaatattgtccgtaagaaatgtcataaatgagacatgggacatagtcacagaaaaaatttcctccattagacattgtatccacacaagagccttgtcaaaagatctttaagttctatatctcaacttatatcaacagattcagcaattacgaaatcaatttataagatagctctatgttttttaacacatgtatacttaggtgtgaggcagggtagtacccacatataggcgagggatgcaactgcaccccaaatattaaaaacaataaattaaagtttgtatacatatattagttaattattgtaaaaaatttaaattaatgcaaaactacaaataacaaaatttgtgtattgcttgagttaactgatattcatggcaagggtttaagtccctgcaaagtaatttttaatatatctattctatataaagtgtgcctatataactgaaattcttggtttatgagaattcatgggtgactttttatt

SEQ ID NO: 296087 - DNA, 1139 bp, Cannabis indica
tctgttctattcaactatgtagggacatttgttagtcaaaatattacattaaaaatacaaaaaattggaaagaatgaagtgaaagggtagagagtgttaccattaaaatatctcttccttctacgaatgtaaaagccaattaaaataattccacaacttaatccaatcaagaggaagatagctgaaattatcactgctctctccaccttaaacttaccattaccaccacttcttgctttttcacaatgaaagaaagtccattgtaagaaacatactaattattatttattataaccaaaacataacagttttttcagatgagttgttgtactattttacaaatatatgtaaaaatagtcaaatatgaaacttttattagcgaaataactttccaaaaattacactgtacgaccataaaacgatcataaatttacactgtgtatagtatatataacatataggaatataacatttcatatcactgtgtgtaatgttaaaagtggttactaaatctaaatatattttagagtgttcgaaaatattttaagaaatttctaaaacgtagaagactctaaaaagtttttaaaagaacatagaaaattatttaaatgaatagtagaaactagattaaggagttagaaaattagaaaattttagtgaaattaagatatcaagtttgagaaaaatagtccaaagtgtgtaagagtacaagattgtgaaaattttagaaaattaagacattagtacttcctcaataataataaaagtgttgtaattttcttactcgacatgtaattattattcgaatatataacatataagaacataacattttcaatctatgtaagtatgtacctatagttggaaagggcattcgaatgtagatatgttgtccgccgtaataaggttgtcgaatatcaaacagatcgccgaaccagaggacacaatcagtgccattaggcccttcactaagacctgagtatgtaaagctataagccatacaagaacaattggtcaagcatttagccttacattcctcaagatttacactcttacttgcccaagtatattgactatcaggaactttcaagttaacaaatccaaggaacaaatctttctctttattatgatcatcatca

SEQ ID NO: 296088 - DNA, 4137 bp, Cannabis indica
tacacgattatgaaaaaaaaaaataaactttttttgatgccgaaacaaatagagaaaaattagtgcatcaaattttccaataatatatatatctctcctgttttattttgctactttcaaaatttgacaacaattttaaaaataaaataaaatatatttaaacttatttcaaatgaagtaaaacttcattattaattattagtttataattaattaatgtgaaatttggatgcataatgagagataattatattaataattataattactttgggatcagtattgagatggccatggagggcttcaattcgataggcacattggcgagtcaatgttgcaactttaaggtattgtttccatggatgacgaaacttgaatcgaccatgacctggctcccatcttgcaaaatttgcctaattaaacacatcatcatttaaaattaattaattagtattaagctaaattaaaaatattatatatatatgatgatgaagagagatagatcaatcagttccatgaaaggccaagctagttaattaaaaataattaatatgttatacccaccaaagattcttcactactttttgagttgagtacacttttatatccttgcagaaatgtcttcttctcctctttttttcgacttgatcttctttcactgctgctgtactagtactgttaaaatattcatccccaaatcctgtcaaattttaaaacaatcatcatgagttcacactcctaattattaattaaacatatttatataaccaattaaccatcaaaagatagtgtttaccatttggattttattaacttcaaatgttacgctattaactctcataattgtattatatatattcctatagctagctagcgatgtggaaataaaatgaaggttttctcgccgttcagaaactatataatattccttaccttttgctttctagctatcctttttgcccaactcagctattacatttacaaatatatatatagggacacaattttgtccccggaatgtattctgtggtacattacatgagtttcatggtacattagatgagtgtcagcgtacgttactattttttaaccataattatccctagatcaatctcaaccctcagatcaaataactccctcatctaacggcggctgccgtaaatcacggaatacattccgtgaaagtacaatcacgagacaaaatcatgtctctatatatatatgagaaataaaaaggtacccgttgtgcttagcactttctatcgctattgatctaattataagtatcttaatattgtctaatataataatttttaaaaagtatcgataatcaattacaatacaacatgtctagagatactagtcagattgcaatgctctctatatatatttattattctaataacctcatgtctttaagtcggcaacatatgatatgagccatgaatatacacaattaatttagacatatttttttataaatcatcaggtccttttatttatatatattaattaatttgagtgttattattattaaataatataaatatatattaatataccttccaagaaatttccaagcttttccaagttgagagcgatcatattatgaagatcttcaccagcccaaacaggacaaatcaaaatgcaaataatcacacaaacagaacttccaatgaaaatggtggaaagtctcttgtgagccatttccaatatctcatcgtctcgaaaaccagaaaccgatatcaatgaaaacgttaatataaatattaacaacccatagtcatatctcgcctttatttttggaaaaaatcttacaaatgttgatagtgtagctgccaaaaaaaaaacatttaataaatacgatataattaagtgtaacaatcaataaaacttatattatcaaattatgtatatatatatatataccttgtaaaaagacaaaaaagcccagaagtattggctctcctatttggcctgataaacttgccaaatgatgagctccaacacctaaagccccagctagtaaggtagccaaacccctattcaaaccttttcccagagtagctcctgagacaaatatatatcgtacaaattagatacagaaattttttaataataataatataaaatctgttatacgtgatttaataaaatgggacatgtatatatacgtaccaacagtatattcaaaaacgacaacgacagtcattacagcccacatagctgagaccccaaaattgtcgtaaagtggttgatagtagtagaatattgagactaagcttagagcaattccaaccttaaccgaatgaattactcttcttgggtcatcttttcccagctcttttgtgtcctttccaatcttacaaactttgcttatgaatttttgtaacaacagcttcaaccatgacaagaaagacccaaatatcccatttttctcattattattattattattattattgtgtttagcagctgtagtagaactctccatatccatatacatataatgcaatgaactgatagagagagaaaattaatgagatactaatatatatatatatatttagctatatctgttgctgatataggcttttatttataagagatatggagggaaaaagaactatatgccaagtgggcttatttaatttaattttatatatgaataaaaaaatcaagtgtatgtgtgtgtctagagacacgttttggtgggtttttgttttttggcttttgtacgatcaaagtacaaagaaaatttcatttggaaaataaagttggggttgacataactgcatggaaagggaaataagtggtatatatgtacgtatgactggagaaatattgggagcccatggtttctatttcattcaatttaaaggctaaagtgatcactcaatttgttttcataaattttatccagttctatatatttttactggttatgatcagtaaaaaagtctccaaaatccactttgtagtgtgttgggcaataacttatatattgcaatatattgtagtatagtaaccctatatacatagctatatatgaattgtttccaggcttttaattataagtatttatatatataaaaatatatatttatatatagcatcgatccttatctattctattccaaattccatttcaatcacatttttcgtagaaaaggagtacatatccagaaattaatcacaagtggtttcacgttccatttttttttaaaaaaaactagtggttttttcacgtgaatatatacatacacttagtcaattcaattatgataaatcatacttaatgtcgacaatattgaaattcttataatcgttatgagatcatttgtttctgttggaagaggaaataaggccatggagagcatcaggttacttgatgccattttaatgtcacctcaatataatcaagaaatgataataaaaaaaaaagcatatatatatatatatattattcatgtatattcataaattatataaggtatttctctatgatatcattatttaaaataacagtattttgtaaaatgcatagtaaatgagtatatacactgttaaaaaaaaacaaagggtgtgtatattatacttgtctgtaactataattttgtaaaataattataattttatttcacattttaaagcattttttttttttgttattttttacgaaaattcatggggttctatttcaaaaccaattagtaatgagtggagtaacacatgttcttatatatgactcaatatttttacatttgatccatatgagacaatattgtccaatattcactctcaagatgacaattatttttttagctttaccaaccttgaatcaccttatcataaatagtgcaattaatttgcttgcttatttttgttcgcggctggaagttctatttgctcgcttattattgttcgcggttgggagtaccattttgctcgcttacgactcactaactatatgataggtgtggatcgaaagttcgctaggaatatggctttgatgccatgttggggttgcatctcaaaactaattggtaatgagtggagtagtcaatattcttatatacatggttcaatatttttatatttgatatatatatatatatatatatataagataatatt

SEQ ID NO: 296089 - DNA, 2106 bp, Cannabis indica
aaaaaaaaaaaaaaaatttgttaaggctcattttgtctcactccaccaaacatgaaacaaccacatcaaaatatgtattaacttatttttctgaaaaaactatgtattaattaaagtttcaaagatagacaaaccacaaagagataatgttaataattagagcagagaatgaggcgtacattttaaacaaacaatattcacatcatcaatacatctgatctcctactactctttacaagatttaatttttatataagttaaacaaagtaggaatattgttctctctctctctctctgtcagtttaatatatatttatatagatatatattaacctttcaaccctaccacatatacgcccttccattcggaccaacaaaaaagtgattcgtggggaaagtgacaagtaagtgatgcacagccacttgctcagaagtgattaagcaaaagcaaagtaactttggcaaattttctctgaccagtagctccccaacttgtttagtctttctgagaaaatctcgttaatctaaaaccccaattcgaaaataccaaaaatagaaaaggcttaaggatcgaccagtctatttttttttcctctttttctttttccttatcacaaaaatcatatatatgatatatatatatatatatatctaggccaccaaaaaagagtaagtattccttcttacttacttccttccattcattcattcatttctcaaaatggagctgtcaaggttctatacagactcgtacgtttttttgggcattgatgaacagaaggctctttctttttcgagctattgatctgcagatatatactatatatgataaaaaatctaaacaatttgattgacccagatgataatataacaccaaaaatacaagaaagcaatctcgagtgatttgatgatcgttattacctgtttatgaagcagagcattctctttctttagattagcaagtttaatctccaactctttagtataagcctgcaaaaccaaaaccaaaaccaaaaacagaaacaaaaggggttttgttggtgttataacccttttaatctaaacttgttttttttagatgaaaacgataaggcagagaaaagaacaaagaagggtttgcctcttttctagccctggctcgatcagctgagtctctattcttcatcagcctcaaaaatcgtttttcgggtgattcgacactcttctttgttgcccttttctttatcagttgaacagaagaattagaagtggaatcccgcttttgttgaggaggttttgaattaaccagagctcgagtctcgaggaagtggaagccaaaatcaggtgggtcagaattcaagctgaaggaagagagtgatgggtgttggggatgatgagagagagaaatgtcatggatggttgatgatgatgatgatggtgatgatgtagggttggaaaggagaggaatggggaggaagtcttggagaatagtaggtgggaagggttgatcggaggagttagtttcagggagggcagagagggttatgtctttccacacttcttcttccatggccatgggaaggaggattgaatttgagaaagaagtgaagaagagtggagagacccttttattttttatgatgttgacaatgttgtgtctccacctggcaaaacaaaagaaaacttgtttggcataaataatggaaaaaatacactgacatatttttattacaaaatggaaaattatttgactttaccgaatacacatgaaataaatataaatataaatattattcttcctatttcctttttttttgtttgaattatgtaaggtaaataagagtttattccaaccagatgagagcgttcctaaagatgaattaaaatagctcaatttttaaattatagaaaataaaaattacaaaattaagctttcaacaagtgagaaaaacctaacctaaaaaaaaaaaaaaaaacaagtgaggtaaaccttaactattttacatattttttaacttaatgaatagtgtttagctaaatgtagagataactattcattgagctaaacatattttaatattattttctttaactttttgtatatatgtgtgtaatattatatgaatt

SEQ ID NO: 296090 - DNA, 2606 bp, Cannabis indica
agatcctggtaaaataaattccaacagtttcaaccaatcatttaaagcttatctcaaattatgagatttttaaggagacatgggagaagttgaaaatcaagaatgaaggcactgaggtaacaagaaatctaggttgagagctttggctaaaccctttaaaaacctgtcaatggaagaagatgaatcagtggaagagtttcacgccaagctgtgcgatatttcaaatgagtcttatgctcttggtaaggtgtaatcaaataagaaacttgtgagaaaggttcttggggtcctacctaaaaattcatgtccaaagtaacttcgattgaggagagacgcgacattgaagctcttgacctcgatgaactcattggttctctatagagttatgagatgactttacaaagatggtctaagggtaataaaaaaggaatatgaaagggacacgagtgaaatgggggtttctttttttcataaagaaaagactagcaaaccgactgaatcagctgagtacttagttgatgaaaactttgccttacttgcgaaaaactatgcccaattcctaaagaagagctttaagaaaaactcattttctggaaaagaaaatgttaaaaaataagaatcagtttagtgtcaaaaaatttgctcgaacaagtgagaagaagggcagaggaattcaatgtcttgaatgtgaaggatacggtcatatacagggagagtgtgctaacatgttaaaaaagaagaaggctcttactgtgatatcgagtgatagtgatgaggaagaaggtagtgatggttctaaagatgataagtacatggtgtctttcatggttaaagaatgctcatttgaaatatcaaaagttgaggaatctatctctggttcagattctgttagtgtagagaaaaatagagcttatgaggagatgtttgctcagtggagttatatggacaaaagagttaaaggagttggatgctagtaaaatggaactggaagaaaaattaaaaaggttcattctagacttgtgttccaaggattgtgaaatctacaagtgaacaactgaattagttagaataaaactgtctctgactttcttacccccaagaactgctgccttaaatcaagctattcagagtaaaaactgtatgggaatcgtacatctataggatacaaaatgctatataaatagggacaagatttgtcgattgaggaatcctcatcttcacaagctaggggaaaactcaactttgtacctgcttttgagaacagcttgcgaagtcaggccaaaaaggtccctgttgaacctgtgagtaaaaccaatggaaaaaagagacacaaggtgagcaaaagcattcagtcccaagaaagatttattcttgtgtgtctttttgcaatagaagagggtatatcagacctaagtgttacaaactagacacttccttgaggaacatgattatcggcagtcattagaagaaaattctcttaatcattttggaggagctctaggtagaaattgggttcctaagtcataggatttggcacttgttgctcatacttctctgtctgctatggaagcaaatcattggtactttgaaaatggttgttcgaggcacatgattggttctcatgattctttaagtaatttcaaagaaaatcaagagagctcgattacatttggaggatgaaataaagggaaaataatggtttatggagatttgaaactttcaagagaattccctttgattggtgtgctgtttgtttagggactaaaagcaaaaatgataagtattgggcaactatgtgatgctgattatgatgtatgattcaccaaaacacaatgcttggtatcttcatctagtagtgcagtattgattggcaatagaattttttatcattgttatactcttagtagtcaagcgagatgtcattgcattttactttaaaaactcgacttgtgacattgtaaattgggacatctaaatttcagggatctaaaaagaattttcaaaccaaaacctgtttgtgggattcctgaattaaaaatgagcagagatagactctatggaccatgccaacaaggaaaataaactcagtcttctcatcctcatatcaatgcactactgacatctcgtgtgctataactaattcatgtcgacttaatggggcctatgcaaactaaaagtattgctaaaagaagatatgtgatggtttgtgtggatgatttctctcgattgacatgggtgagttttttgaaagaaaagtcagacacttttggtgcattttcatctctgtgctaagactataaactgagtagaattcttctattggaaaagtgttttaaattagaagtgatcatggaaggaattcaaaaatttaatattttctcaattttgtgataaattggggattagtcatgaattctttgcccttaaaactcctcagggaatggggtagtggagcaaaaaaatcaaactctacaagaaatggctcgtgtcatgttgtgcgcttaagatgttgctgttggattttatgccctaaataaaactcatttcaatataatcagatttacttattaatataggtcagaaataacatttaatgttgcatggtt

SEQ ID NO: 296091 - DNA, 7132 bp, Cannabis indica
ttatgtggaatgtccttattgtttttgactgacgtgactcttcacagtgtagccgtcaatagacttaaatgatcattacttcgcaggtgcagattggaggttgtgccgtcagactttattgcatgtagtagtcccaacacgtttcctcccatgcggcactaaatgcgaaatgactgctcaggggaagcctgacacctcgcggaaacgctttaatgttatttaggcttccaggagcatagggggctctgtatgctctctccgggaggcatatctcggatgttgccttattacataaagacttagcaaataattcaagtatttaggatgtttgatccacatgtccctgttcggttggtccacgtatattgggcaaaatcaggggcaacaattattatgtgataatatatattgagatatttgtaaataatatatattgagatatttttaaataaattatataatttataatttatttaacctacatattgtaacatagaaaggagttacaactatgtaacacatttaactcttttttcagttgatcacaaattatgtataattaaaagagttgttacacaaatttattgtgggactcaaaactatcatcatatagctaatgggggtttacaatatttattaagtgattaaaataagttggaaacgttgagaattgaagaagagtcgaaaggagttacaagactccatttttgagcatgttaaaattgtgttgggtgacatgtcgcataaagtggttttcaacttaaaacgttccaaacgttttggtcataatggtttaataccaactttatttaataatgcccataatttctcactagaaaaaatcttacttttagtcacaacaaaacttgtgactaaaagtaaaaaagttgtgactaattataaattattattcatatgttgtgactaaaatatttttgggctaaagatactagtcacaaaaattacaatcttactacgaagaacttcctctctttcacttgtttgttgaaataatgagctactttttactggttggcctttagctttagattttccacgtccctttgttcttccattttgtcaaagagagtatgatttttctcctagttgtatgttaacctcatgtgggaggggagatccaattccacaggtagcatagcctcataaccatatgccatggcaaatgggattgtccggtagcacttttcgcagttgatctatacgacaagagtacttcaagtagttcttcaggccaattaccttttacttcttcaagccttttcttcaatgtgtccttaagagtcatatttacggcctcaacctgtccattagcctgggggtgtgcgactactaagaagctttttatgattccttgttgtaggcaaaagtcagtaaacatttggctatcaaattgctttccattgtctgaaacgatcttatgggagagtccaaaccgaaatttgatgttttttcaccataaaatctaatgcttttttagaagtaagtgttgccaatggttcggcctccgcccactttgtgaagtagtctactgccacaactacatatggcactcctctttttcctttaggtagctacctgatcaagtcaattccccaaattgtaaatgaccatgggctttgcatatgtattagttcattaggcggagcctgaggaacctttgaaaacctttgacatttaccgcattttttcacataagccttggaatcctcaatcatggtcggccaaaagtagctttgcctaaggatattattagacaagctttgtcccccatcgtgatttctatagaatccttcgtgaacctcaaataatagttgtacaaaatcttctttagtgacacatctgaataagggcatagaaaaacccttctgtacattactgtattcattattaggtaccacacaacttttcttctcatttttcgagcgtcatttccgtcactcggtagttaacatgtgttcaagtaggctgcaattggtatcatctagtttggggttgtatccaccatctcaatttcttcagttcttgctatacttgaatctttcaagaattggactagaactaaatttgacttgtccgcaattgaattgctcgctaatcgcgcaagagcgtctgctgttgtgttttatcctcttggaattttcctgatggtgtaccctttgaattgtgcaagcaggtcttgtattctacttaggtatgcaatcattttttctccccatgctatatactcacccagaacatgattttagaccgattgtgagtcactgcaaatttccaagtaatcagcatttagttcccgtgccaacttaaaaccaacaatcaatgcttcatattcgacttcattatttgatttggtgaatccaaactttatttccccatgtacgggatgcccccaggtgtaattagggctatccctactccgaacaatctatcagtggtgacccatccacatgaagcttccaagtgggcttattttcatcattttcattgggtgctggttcttttccttgttcttggctttcttctaggatgtctttttcatttcctagtacactcaactacaaagtctaccaatgcatgcccttttattgtcgttcgtggctggtaagtgatttcatattgccctaactcgattgcccatttgagtaaccagccaaatgcatttggtttctgcaataccttacatagcaactgattggtaaactctcaaattggatgagcttgaaaataaggccttagctttcttgatgctaggaccagacaataggttaatttctcgatcaggggatatcgactttctgtatcaaccaaccttttattgatgtatgtagtagacagggtgctgagagttaccctcttctctgattaacacaacacttacttcaaattctattactgccaagtaaatttctaactcctctttgtccaggggctttgacaagatggggggttgtgcgagttgcctttttaactcttggaacgctgcctcacagtcttctgtccattcaaacttcttacttttccagagaatattgaagaaagggacacacttattagtggattttgacatgaacctactcagtgctactatccgaccagtaagactttgaacttcctttactttagttgatgacttcatgtccaaaagggcttgaatcttctctggattggcttctatccctcgaacattgacaataaaactaagaaactttcctgagctgactctaaaagaacacttcaagggattgagtttcatgttatatgttcttaggatgctgaagcattcatccaggtcatctatatgtccccaaacctttctagacttgacgagcatattgtcgacataaactttcatattgtgtccaatctagttttcaaacattttgttgaccgacctttgataggtagccccaacatttttaatccaaagaacatgactttatgacaatacaaccaaacacctgcatggaagttgtgtgttcttgatcaggcgaatgcatttcaatctagttttatcctaaataagcatccataaaacttagaaattcatggcctactgtagcatccacaagctgatcagttcttgagcggggaaaataatcttttgggcacgttttattgagatcagtaaaattaatacatacatgccacttcttgtttagttttttcactaggacggggttcgccaaccaagctagataaaaagtttcaatgataaacctatttatttgaagtttttcaacctcatcctttagtgcctatgctcactctttatcaagcaaccttcttttttgttgcacaggatttgcatccatatcaatgttgaggacatgtgtggttactgtagggtcgatcccgaccatgtcatcatgcgactaggcaaaaacatcaaggtttgctcttataaattttatcaatgttgattttattttgagcaacaaaccttttgcgattttgattttcctggtcaggttatttggatcggtttccacctcttctaactcttccactatcccaacattggaacttggttcactaaggaaaagatccacatcctcattcctgccctgggcagatccctatttggtgatggattttcctctatctggcccttggccatacttttcttcctatatcaatttggccaaggcaaggttagaacactctcacacagtcctctgattgcctctcaggcaaacaaacccattttgtgttgggaatttcacacacaaatggtaacagaagtcattgctcttaagtcgtacaaggctggacggcttaacatgacattaaaagcagatgaaacatctactaccaggaatgtgccatgactattgcggtggtcagagactttcccattatgagtggtacgcgacacgttcctagcggtgctatgctccggccggagagcccataaaccagctgtgggcacagaactaagtccttgagattaagatccatcttctcataggtgggtttgaacaagatattggatgaggctccattgtcgatcattgtacgggccaatattttgttcgcaatttccacctccactaccaagggatcattgtgcagataatttacaattttagagtcttcatcacttaaagttataattgggtcttatatttgtgcctgcttaggtttcctttcctcaacgaccaagacttattctcctgctcgtactgaagagtttaagcatatttttcacttgtattcttagaatctcttgcaatgtttgagcatcctatgatgacgtatagatgcccatcaataggtggtggcataagtgggtgcttgttatcatcctgtggggcagccctttgctcttgattgacctttgcatacctccttatgtgcatattgtttttttggatcaaaaatttaatctcttctttcaaatttttgcactcattggtatcatggccaaaattcttatgaaagcaacagtatctggaatgattcctcttgctcgtgtcctttttcatgggtagagattttttttatgactactgactccatggttgttaggatggtttctatgtcttctgtgagaatagtgaaggatgttaactttggatctttctcccatgggtgttagttttttagattattaaattttcccttctttccatttccctaattattctcaccatttgatctttttctactgcggctgcccccaacctgatttaggaccagagcactcaaagatgtgtggtattttgcttctagctggtggaaatttccctaggggaaacatttcgcactacatcttccaacttaatgaatccatctgccctgtccaagaatcctaccatggagtttaccgttagcctcttgatgtctttctacaaatctcccaatggtataattcccccaagcatgacagcaagtcttccttcttcagtcaatccttttaatcttgtggcttcagccacgaaccaacttatgtaatctttgagcgactcgtttgggagctatttaactccgaccaagtcctccaagtgttagggagttgcctagaaggtgagaattgtgcatggaactctgatatgaaagcatcccaagaattaaactttctcagtgtcaatttgaaataccattgttgagctgcctccgccaatgttgctggaaagactttgcaacgtacatcgccatatgtgaactacaaatccatttacagctcaaaattctttatatgggacaaggggtcctcttttccagtgtatgccttccaggtaggcattttaaatttgggcagaagagggagagcgtttatccgagtagtgaagggtgaacctctttcttgttcaagttcaaggtcggtgagtttgggaccagtcaaactttcaactaagcttttaagatgatctagttgggcttgcacccctggatcaacttgttttgcatgttgcctaacctgagtcatttgttgtcctccttgagtcctgaccaatgcatagttttccacattagcaggttgtacatttttgggaactaccccagtcctctgctctctccactgattcaatgtgtgtctgagattgacaggttgggttcctatcctcttaaagactgattgtcttggaggccttcctacatctttggtgttggccggtgaaatttctctctaggcaccccgatctcttcgcctttgagcgcgggttgcattgtttgctccatcatcattgttacttgaatatgactgactacgagcagttgtagtttgaccctattgtgtagccgtgtacgtgacatattgaagatactaaacctacccatttcgatcataaatggctatagggtcctgaaattctacatttgactgctcaagtgttcccacttagggtcgagagttctgactgttttgcccattgttttgacctggcagcgcctgaccgtttactacttggcccacatttacatgtggcctacgattggatggtccggggcgtaaagaattctaggtgtgagtcattggaacttctgacacgtggttattcccaggcaggacatacggctcctttcatagaggggatctcgaacaacagggatgtcttcctgcaatgtctgtccgacccgttgattaaactaccttatcaactttgtggtttcgcatgaccagtgattgatcgcctcttttgggctctaaaattctttgcctatttatccatctattcttggaagagccttttctgttgcacaaaagcctcgttcatatcttcccgggtattagcttggtcgtgatgaagtgtgttagtgtggctttgaatatgagccactacttccctcaaattttgcagctcggtgtcatcatcgatcgtcacttaagttctatttgttggtggtactctggaacccagactactctccccaacaccattgatactagtgttttgggtgctctgatcaaccataggagggcttcttcaattagcaagaatttgggaatttgggttagttgccattaggtctacaagatcaatagcttgagctcttcaagtttgtacaaccatttgcactttactgaatagacttaatcatattgtgttcttgagtcctcagctcttaatgaaagcaccaaaatattgacctcgcttttggtcaatga

SEQ ID NO: 296092 - DNA, 1567 bp, Cannabis indica
aatcttgatgaaatacttttatttgtattttgagtattttgattgtaatccttctattctctcttgtaatgagaatttttccaacacatgtacttcgcaatatctatctcaccattcagttcaccattgaagaatttgaagcgtattataagtatgtcacctcggtaaagaaattactttcagataaggcaaagtagtagttatttggcagttatatacgatttgataaacagtcatttagatgaggcaaaaagaataactgttagccctataaataggggtatggtcaacaagacaatggatgaacaattttgagagtgagagaataagtgtgtagaaaattaagtatttcttacattatgtactgaatatcttgtattctgtgagggattacaactcataaataatatagacttatgaactatgtatatttaacaacaaatacaatgaggttgcctcaacatgtacttcgcaatatccatctcaccattcagctcaccactgaagaattcaaagcatattataagtatgtcacctcggcaaagaaactgcctttggtttggataaggctaaataagcagttattaggcagttatacacgattttatcacattgtaattacatgaaacgtgagaattccacatttcataaacaattatttagataagacaaaaagaatattaattgtcagtcctataaataggagtagggtcaacaagacaagggatgactaattttgggagtgattaccctgagagaataacagtaaaaaaactcaatattttttacattatgtactgaataacttgtattctgtgagggattacaactcaaaaataatataaactcgtgaattatgtatatttaactacaaaaccatgtaaaagtatcatctcttatttattgttgtttccattagtttcattaaaagttattattattttttttttaatttatttaaagggcctcattgtggttaaccaaattaagtgttaacagtagacattgtctttgcaacttccatccggaaggtaatatgtatatatcttaatcttccatatgattttgtttttgaattaaatagtctcatgttagcccttcatggcaagacttagtaaccctcttatatttatgataggattgagcataaaatttaaaaattgtttaaaccattcaatcgactagccgaacattgctaaaattgaaattgccaaaattaaaaggtcaaaaacactatcaacgattagcaatgtcattggacggtcaattttttttggtaccgaaatgaccgaacaaaaccgaagccgactgttactttatatatattgttaactttctactttttatattatgggtgactattcaatggttatatttttattgtaaccatatggttacatttttctttaacctgtaatagcaggttactaataggtagactttccttttttaaatttaattaattataattaattattttcttaaaataattaattaaatagacatttcttttttagaattatttaattataattaattattttcttaaaataattaattaaatatt

SEQ ID NO: 296093 - DNA, 6891 bp, Cannabis indica
cagcagtggaaggtgaaccgtactcatcaaaaaggcgcataagatctccaaattgcccgtgtaaatcaccaaatatcttaataggagcccttagctgtaagacactaggttcactagagaatatcctctcagcactatcacatagatctgctatttcattgcaatctaagaaaaattgtcgacgaactggaggtttccagccacgaggtttcaaaagatgagctatcacctgaaggataaaataggaaactcattaaaaatgacaaaacttgacaataataggacttacacatacacattaagtcttaataataaacaataatttaatcattccaccaaaggaaaagtaactcactatttttctctaaacctaggccaaagaagatccaagtctcacaactcagagattacaactaacttagaaaaaaaaacaacgcgctttcatttggatacatttcgagtaactgtaaagaatgaaaaagaaagtgaagcttccctaaggaccaatgcatctgtactatcacaaccattgacccagtgcgtcccactgggcagagtcaacaaacgcatctatccattgcatttcttaaaaaaaatgtttagttcatagtcaaacaaacttggtcatgagtgagactactatttagtttaaaatacataactcttgaattttaagagaaacatcaagtcattaactagagtttcatagcattaaaatctcagggccatagtgtccagcatgatcacatagggttagaagttaagggaatgtgagatgcaacatgttaacctgaaaatcttaaggtgaattagaaaagaaacagacatgtaagttggcaaaaagtgacttcataaggtatgtcaatgagcaacatgattgcatgctatacctttttaggaacactgttgatcgacatctgtcgatctaataatttccttgctgcagtcgcactttctggagttccatagcaaactctcctgccttcattttcaaactggtcaatcgaaagctgtctgaccatgccacctagagctccaccagtctcagcagctacaaccacctggaaaatgtatgtgtgagaatatgaagtatagcagcatcaagtagcaacctaaaagtaatactgacagctctgtgatgcaaccgaactccagctggaggaatgctatttgcccctgcagaatcaggcttgattaaggtagatatttgcttcccactaggggttgcctctgaaccacggtctctgtcaggtagctcaacttctccgttgacttgacgtgctttagcagcagccaacgtggcactaattgcctctgcttcggctgctgccgcttcaactaaatactcaacacctttacttgttctcctacatattattgaaaataaataaaaaattagtagctcttttatgagaagacacaacttccacgaccacttcaccaagacaacttaccgggttccctgtagcaaggcattctcagtgcttatatcagtatacatgtctccatttacagggggtgcaactggatttcccactataactgttccatctggagctgcttcaggcaacgaccttgttctttcatcaacaaaatacctgctaggcaaacgacctgcttgtaaatttgatgtcgcagctgcagcagccgcatgtgaagctgcacttgtagtttcagcagcagcaagatcttcagcaacaagtagatcatcaagcagcacacctattgcacaaataaaccacattactatgtaacacaatcagcttgccagctaaaatgacaatttgaattcttggtaggcagtaataagagttttatattcctaaataagtgggatttttcaatcaggtttcatgcctataaagtgtattaccaagagaaaaaagaaatgctttcaatatagtaggcatttaattcatcaccagatctgatttaacttgggcaatctaaatgacacaaagctaaaacgaactcacatcaaaatccaacaacaatgttttgaaaagtgtgcatgccaataaacagctcttatagaaagaaataatatctgttttcccatacctatataactatttccattgaataatccatcttaactccaaatgactgagactcttaaaattagtttcccaagaaaattagtaacaggcatctataaataggtttaccaaatgtaaaacattcataagtttgctgatcaaataatcagaattatcatttagttcagttcaaattataaatagtatctggttgaaggattcctgttctaagatagagaatgataacaaatcctattttcaaaagaatagattcatgtcttaccaccacgtaaaccaccatagataaagattaaatcgccaactgccgcagctgcatgcctgcatcgccttgtcaactctactgcagcatctccaccagcagcgtcagcactgtatctgccagtcctggggcttgtaacaacagatttcgtatcacaccaaacccctgctgccgtatccaacactgtacacaagagaattgttagattttctacagcagtctcagacattgtagccttaaatgagcaactcccagcattacacagatatgcagcagaagaactttcctattttttctgaatgataggtcagtttgaaaatttctaatgacaagcaatcaataatactaagtgccagaaataaattaaagttttagcgcttttgtgtttttattcccagaacagaaaacaaattaagaaattagaaaaaacaaaagaaaaagaaaaaagaaacagatgcaaggcaatgggccaagacaatgaaggtcaactccaattaataacaaaataatggccagaatcaaacaaatggggaaagaaaatacaaatggcaaagaacatatcaaacaaaaaacacatgtcacatgtacatctggaactgccattcccgcataccatatcaaaaactccaaaactgccaacagcgtaatcgcatacctgcaacacttgatgagtcttctaccatgcgtccaccaccaagtgcaccaccagagacatgtaaccgtgcattaacaaaaacctaggatcacaaaatataaaagggattcaacattctatggcaattttgtatgaaacaataacataaaaacaacataaatgcatcaatagaaccaaaagacaaaaaacccactgctgcatgttgatatctcggagacggtgaaacacccggagcaatagcccattcccaacggccatccctatgtttagcaagcccatatgcacttgccagtggctgcacaaagaccaaaaaactattatacatgacttcactaaatctttgagcttaaggagactgaacaacttctcaggactggacaagatacatggcttaaggaaaggcaaatttgcaaaccgaatataaagatttttatgatggagagaaaataattcaaagttatcatgtccttgctgtcaaagtataacatacttgtacaaatattatgaaagcccctgttgttcctaaactgttcaaagggtatacaaatgtttgactccgatacagggacaaactatctaaattaaaaagttttttatatattaaaataggggggaggggggagaaagcataatttgaaattcatgaacaactttctctttttttcaaatccataagaaacaaaacaacttatcattaatgcatttttatttggaaaggaccggctagaataacttccatgtcttcaaaagatacaagtaaatgaaggtcactagattgaaatgtacagctcaacaaagtttagcatatatgattgcatttgactcccaggacaatcagataaatatcccacattctatacttgaaagcgagacttaaataacaataagatataccaatggtaaaaaattcctaaaatcatcatgtgcaaccactaaatgcaatagaacattttcataagaaaatgcaattaaattttacataaaagcaaataaaaaaaattatgccaataaataatttagctcaccacactgttagcatctctccctccgcaaagaagaagaaggccatctgagcgtgcacttgcagttgcatacctagtcaggttgaaaaaacaaagaaatgaccgtcaaatcagtgaaatacaatgttataaaaatgaataaaaaaactaaaagaaacccatataaacagggttctcttgtaagtgaaacttttcgcatatcaaagcatacatgatactgatgctcaggaaaagaaaaattcaatagagttctatctgtacagttaaaattttaacatctataaaataattttcaatctgattcaatattatttcctattgactattataactacaacaaaaatttacaatgtgcaacacaagaagtaacaaatttatccagctgcaagtataactaaaacaaaccaaaaaaaatattgccaaggaactctttgaatttctttgttctaccaaatcaaaattcaaaactctatactaacaatttttcatgttatatcagatagcatttgtattggtcctctcaatggatcctatgattattggaaggcaaagctctagcacattgctaagaataatcgaacctgcaatctcgtgagagagacaaagtatgaatccattatgtaaaattatacatcatcccatttcttttgtttcctttctcctgatacttatccctccagctgatacacactttaggaggcaggaaactctaacaactttctaggtaggtccccatagtgaatacaacccagacctcatggtagcaaatcatgcacctaaccactagatctcatccatgtcttaacactcatttatttctggttttcttttcggcactgtaacaacctattcttgcttggaatcatagaaacttaatagtgacaaaagcaacgccagattcctttactcgtagatgctccgtgaatatgaaggacaacattacagcaattttcaagcaagcaacaatgtctaaaccaactgaatagagattctaccagcaaaaataattgacacattttatatattgataaaccaacattttccacagcaatataatattaacattcatagacctgccacctgacttgacattttaggttacgtcaaaataaattgagaaactaaatcattaaagcaccccaagagtttcacagtttgacagaggaatacttgcataacagcactcaatcaacaagggtagcacatcaatttaagaaatatttagcatcaagttcacacaaattgttataattaagagtgagagaatgaattacatgcacggtggaggaccatctccctcaggttccaatttccgccattcataaggctttgcagctgtgtctagagcccaaacatcagctaaaggacgtttccctggaaagcacattcagttacccttttcagaattattttatttttagcatttagtaattattcctctcatttggataataaaaaatataaggatagacctcaagtgctcaccatcatttccaccaattgccataagatatctctgccccactaaagccatcacgtgaccataacgtggcccaggtcctggaccttgaacaacaactctacaagaacaatagctcaagttcataaaacatataaaagaagtaagagcaaacccaaaaccatctaacaactcaaacattcgcaattccttacctgtgccatctaggtctttgttgtgtgagatcaagaacatgaagatcttcagcagataaaccagctggaccaattccaccctatacaaacatgaagactccagtgaggaaataaataacaaattacaatcatacactggcccggaaatatgatttgaaagcagagacataaaagagcacgtaatataccaacctgaataacaaccatagttccaacagcagttgctacatgcgctgcccttggtgtgggcggttcgccaaaaggagtgatcctacagcaaagtgactaaattttaagtgacaaattgaaaatgtgatagagagggaaaaatggacacaaaagcagagaagggtacaacaataagcagaactttttaatttcaggcctacctagaccacttatttgttaacacatcataacaatggacatcagcagtggcacctgccaatcctgaaattcaagcaaaatcataaaggtgatcagagtttaatacaattacaaaaaaatataattgctccgtaaagctcaaaagatattgccttgtttaaaagataagtactaaaattttatcaactttgggtaacaggtgagctacgagcaacttccaatgaagtaaaaacatgaaagcactagtttttatgtttactcaaaagatactataggcttgacatctacaaggttataggcatgattgaaaatgatgtgaataataaaacggcagcacaagaggaggctcacagtttctataaaattagcttcatgtcttaaaaagaaaaaaaaaaaaaaagctccatgtcttcaaaatcaatgacaatgattgttattctccactttaataaaaacaaaaaatttcactgtgactaactaaaactaacaaaaataagtctttaaagagtagaccaagaacaatcaggcacgactattatgagtactgacaacacaattacaaataccacctaacagttagaaacaagagaacaacaaagcttagcttcctttcatcagataggacaaaatattgaactccaagcgccaaataaaaactcttgctaaacaaaattaactaaatatgtagctcataatcacaacgaattcattgtcacccattataaataggggcttttttattttgatatttcaaaacagttttttttgcatttttacaaaattccacatagaaacccctattgcaactagcgctgcaacttaaattacaacaaa

SEQ ID NO: 296094 - DNA, 2554 bp, Cannabis indica
gtatatgtcaaagttcaggaggacaaaaatcctaattagcctttttctaattaactaatattgatgggtaaattcagtctaatttgagtttcgttgctaggtccctttatctaaccctataaatagggctgaacatttatacttggaaaatttggccgactcgaacctagaaaaacttgaaaaaataggtttagaaaattataggcaagttcagataaaacttggttaaacacgatcggccacaatctattttttttatgacctaacacgataagacttgtatttttacaagctttttaaatataaataccccaatttgacacaaatgtatctacacttgtgggcatattgttaatttttaggatctgacttaaaaaaataattataattataataattgccatttaattagttaattacttatatggttataataataataataataataatggttgtcttaactgtgtagttctatctgtcagggacggatgtacacattgggttatagtggctctcgccttctttattttttacaaaatcatacatactaatattgatatataatgaaaagttacaatataatattatgtactctacatagttaaaaataataaaaaattcagttgaaaaatcaaagcaaaatttataggtaaaaatataattgatcatttgattgtgcatttcaaaagggtaaaaaaataatatattaatataaataataaataataaaacataaatttattttttaacaaataaaatatattaatatattagttaaaatcattgtgtatataaatattttttttaaaagtcaatactatgtaatttttaaaataaaaaaagtaaattccatatacatataagtgtagtcctttattaatataattaatcaataaatatttataaaacttttgaattaaaatttagagaataacactaagactactaatgaatatagtcactattatcttgaaatggagatgttggtcactaaattcataaacataaaaccttatttttgcaagcgttgctcattattggccccacttaacatataatcctaactccgcccctactctcggctctaaatattttgtcttggtatcatgcctccaatgttttggagcattctattactattggggtgacttcgggtatcacataagaataattgaatagttgttgtaaaccgtcagaatcctaccaaatgttaaacgttgatgtgggtgttcaacatgctgcgtcaaagataggtgtgcgtgttgtggttcacgatcatatgggaaatgctctggtgtccactatgattcctctcattgttaccttggagttggatgcagaagcttatagggatgaatatggggattgaatttggcctaaaaccagccaaatcgcccgttactaacttgagaaacatgaaaaattgtcaaaacccgtttagagcggataggtcaggttggacttggcatagtgaacgggtgggtacgggcgagatttttatatgtgcccaagtttgagaaatgctaaaaggcaccacttgtgtctagcaccctctacggtatcataccactattggtgtaattaattattaggtcttatataacttaagaaaatagcttttagggaatatcgcccaatcgtagggtgccacatatagaagctgctaggcaccactggtgcccaaatagcaatgctcgattaaagctcaagttagacctagacccgcctgttgacccgttagttcagttatttgttttattttactaaaaacttaaactaaacctaaagtcaaaacctaaaaaaatcataccctcccctcgatgaaccctcgtatgctctcctcaatgaatgtgcactagagactgattagacgaccccattcgtcggctaccactcctttcccttgcgattcatcacggaagcactcactccccttacccttatctcttccctataatttcagctcgtgaccaagcctagcctccacttacaacacaattgcacgttagttgtcaccaccacactagcctcctccacacctcttccttccctcacgactcactcattacaatcacagagccaaagtttgactagtgttggggataagaaggagtcccaaacatcaagtagtggaagtgagacggagattttagagagctttgatgtgcctccagttcctagctttgagtaaaagtggcttggggttatcgattaagaaggtatgctcgtgaaagagtggtttttccaaagtttgcacagactcgttttataaaatgggttgggcctggcttgacccatattttaaaagtaagcctagtcccgcccataagcatagattattcgtgttgggttagatccgtgtcgggcttaatcgggtcggcccatatttatcaaatgggccaaaacggacttatgaaaaattaccaattttttgtgtacttttcaaattagtttctatattttaaagcacaagtagattgtttcagttataaaattagcttcaaaatcacaaaaaaaaaaaaactaacaattacatgtttaataatcaaat

SEQ ID NO: 296095 - DNA, 3029 bp, Cannabis indica
aaggttctcttcattgtgacactttaaagtccatactatactttttatttttattactttttttagaaaaaaatagaaataaaaattaatgattggttagatgtttattattttcttttcttaagtcaacatagtcctcgtatcatcgtaattgtagtgatttactacagtaatttctatctttttagccttgaacaacaaatttagtcttctattaaaatggtaaaatgcaataaaattatggtggatttttattgttgcaagaaaatgtgtcaggttttgtaattcacaaaaaataccttggggttttcaaaatttgcagtgaatagcctttatgttctagaaattgcataaaacacttggaggtttcaaattttgttgggaaatatctcgtattgtcaaattttgctagcaaatgtctcatattttaaaaatttcgcaaaaaatcatactattccaaattcatacgtgatgatgatatgagagatttttgaacactttttgaaccattgaatttgcttccttgtgaatttcaaaaccatctttttgtatgaatttgtcatctggctaaaaaaataagcaataaataaataaaaaataccaagacaatatcatatccatggtgcctaaatttattgattggataggaaaatacatgattatgaagaacttgagaaccttgaaatttccctcttttttctgttagcctttttactcttattaaaagttaaatgaaagtttatcagatgacatttttctttctttgacttaattggcctttttatgttttttaatgatatttcttatggtggaatcaagtgatacatcagtgatgtgctcattcaataaaattctgggagaaaaatgtttttatttatctatagtctatattggctgtgtttacactgtcattgtgaacatcaaataaaatgttttatgttgaaatctagctatgggacatgcatatggattcctcaccaattgcaatatacaagatccatgagaacctcagacccaaggtaacttatttatatatatttatatccttgatgatacccaatgtagatgttgaatggatttgcttgccgtttgctgcttgatgtgctttgagtacctacattttagcattataaatatacaattatttgtaaaatttccattggtttttttaatgctaaaattttatcaccatctgaattagtttatatgtgcatgttttggttaaaaaaccatcagtctgagcgataagcctgtgtttttctccctcttggtctgggatttagtccagactggattacagtttttgcacaccccaaagaatttagggtacgtttggtgtggggttaataaaatggaaagaaattaattttttttccgttcctttgtttggttaaatcaatttttatttcatttttttgtttggttgcattttaaagcatagtaatgtgaatctaatcaaatgactattccatccaaaagtgggagtgaatttcattccaatgtacaaataaagaaagaaaacattttcttacttatattaaattttattccattctttttctcttcctcatttgtattcctccacttctattacaccaaaccaaacaaacccttacggttttgtgtggctactctaagaagattcagcgtgcgcgcacacacacacacaaatctttttaaagagcaacggtaacaagtgtattaagtcaaatagttaaaactttaccagccatcaatttcagttcttacctattctctaaaggaggattgatggcgtcatcataagaagagaagttcattatatgttaatttgtgtatctcttagttcatcctaaaggcttacaggctcaacatgcatgcaaatatatcccttctactgtcacctgacatcaatttctggcagttgtgcgaattgtatgataatgactgcatatttgataaatttgcttgctgcctcagtggggatggaatgcattatgcaactgggtcttacaggtttgtcttttttcttcgaagcttcagttgcattgcatccttaatttatgatgaacatggctagcaatcaacttttgatttgcccccaaaatgcagcttctctgacacgtgtgtttgtaattttaaattagcaatcatttacgcattttctcccatggtgctggaagtgatgaaggaatcacaatagaagctagcaagcatcctgtcaggtgggttttttggtttctttttctctactttttggtttccaagtagtagtttttatgttgattagttagctttccaagcttatgtttgataaatgtttatgccatccagttcagctgtttgtaaatgggaaaatggatttcaagtattaaccctttattcataaggatatttctcaaccagttgccaatatgtgcaataataaaaatgattttaatttgaaattttagttaaattgattcttaaaaagttcttgattctggtttctacatctatcatcactcactttgtaactgccaaaatgctcccacagaaattttacaaagtcaattttcatttgctttctaaacttgatagcagaaagccagttttgcatgctgctccaaggactagaagatcttctttgagcaatctgacgcgtggattttaccgccatggttagaacccttaaattcaatctcttctaacacccttgaattatatgataatagtaatcaactcttgttttatcttgtgaccaacattaatttatgtactcttatattttcagggaatgataattcaagttcaggaaataatgacttctcatgtaacttaaattccaagttattacatctggcatggcatccagaaaaaaacttgattgcttgtgctgctgggaatagcctgttcatgtatcatgcatagattcctttttgtacagttacaattctgaaagtgtttgtagagagagagagcattaaagttcactcagcttgacatgatgagagaaaggtttcttcttcttaaatatttaacaacagagaaaataaaaacaataaaaaaaa

SEQ ID NO: 296096 - DNA, 1694 bp, Cannabis indica
ttcccgaactgtagaggtctgccctaaccctctacagttccaagcaatgcctctcatggctcctgtggaggagattccacattctcctccacaggggtatgagagtaagcagacccactcgacacagcatcatcgatcacaaatgagccaatcagaggattcttcaagataccagagcggctcagggagttggaactatcttcagaaggctcgtcagggactaggtcagaatcattctctttttgcttagtgtcccatggaaagtcgcggacgacacccgggtacttgcgatgaactttgtgaggccttgagaagagagaagcagaagattcaaatttccttttcttgaaaggtgtcgtcctctcattaacttcagaggaggccgggacacctatatccccacctatcttgcgaatctcatataaatccaacttgccaaaatgttttagatcattcattaaatcctcttgagctttgaagaattgagataaagcttgttcttcattaaagtgagattgcttctcacattcaaccataggatcggaagagttaagcccactttgtgcacccattaccttatccatgtgcgccggcccactagaattgggtaaagaagtcattatggggttccccataggcccatcataaggcttttctaattcccccagcaccggcccaccactaggaaaatgagaataatcaattattggcccacttaattgattattatcacctagaggcccaccttccacaagctccacttccttctcatttaaaaccaccaacgacccaataggagaaggcccatcatccaaagaagacaaagcaacgaccctatgattcaaatttgcaattttattaattttaaattccccactctccacgccttccttcaaagtagttaagtcctgacttgctttcccatttctcagaccttcaatctttcctccattaccagaaacagaaacaattttatcacagctcacatccgattgcttaggatgccacaccagtcgatgagccttcccaagtacgcctgcagcacgagaagtcactctcaatggttgtctcgaacgtcgaaccaacgcagggttcccctttgaaccgccatcaatcatagccggggaaaccatcgacggacgatacgcaccaccatttttgcccgttatcaacgacgaagaagaactcgatccaccatagaacggacaggagaaaacgtcatggtaagccgaggacgtggaaagccacggtccgaacattggaaaaggaatgccatcacctttcgccaccgtcacccgcgacgacagagaacagcctcgacgttgatggcccagacggccgcagttgtagcagaaaatgccaatcttttcatacttcatttgtaaccactgtttgacgccactgttcagatcgaaaaagcaccctgagaccaggggttcgtttatgtcgacttcaaccaaaaacttaaagaaagtggaccaagaagctggtttctcctcctccatttctaacttaaccactttcccaaccagacccccaagaagcagcccattgtcatttgagtaaaactcatggggaagattatgaacttgaacccaaactcgaagagagttaaacaaaatcggcccatccactctcggagaccaatcttgcaaagctaatgtatatccacggatgcaccaggggccgttaga

SEQ ID NO: 296097 - DNA, 7262 bp, Cannabis indica
agtttttgtgccaatgctctttggtatttataggacaagtcaggaaaaaggggtaatcattttaaagaaaccttagacgccttggttcccccctaaagcgaaaatgggaaatggaaaaaataaaaaataatcaagtgcagccgtcaaccgtagtgagagaaaattggattttgaaatattaattgtgagatcattaattagccaaaaacaaaagggatgcccagtcagactcacatcgagtctcgaacagacgcacctaacacgtgtccccatccaaaggcagaagcagctcagataaagtctacaggcaacttcgaaagtcccacacagacttggggggcaaatgttatcccaattttcgcactctgacatggaatcgcataatggtgacacgtggaatcaacttggagtatttgttcggggggaacagcccgagcaggatgcctcgttggcatacttgaagcaaaccgatcagtgatccctgtagaggaatcaacacttagcaaattcagctttcacattatgagtcataaacgaaatcccaatatctcgaggatcagattacagggatatggcatacacacgatcccacgatcagtgtattctacgtcaatcacacgatctttgtactcaacattaatcccacattcttttctatttatatccattgtaacgagaaggcaaacacttcctctccaagtttgtagccttataaaatagtgatacatgctcactgggcaaagggtcgcaaacagtttagtcgagaccttacactaaatatattatctaagaattcttattcagagatactgttgtaagagctataagaaaatgaatctttctccttgttcttgagtcaatacaaataacgaggattaggctattaccgaactgctcagggctgaacctctataaaattcttgagtctttatatttgttttactatatatcgattgctataaatcacttatcgcttactaaataagactcattatcgttggctaaaagcgaggtcaacaaagtttaacatttatacttttaatgtatatgtaattagaattttaaattagtttgttaaaaaaattattgttatgagaataaataaatagggtagtataagaaaaaatttgagtgttatacataatgaattatttttatatttcgatcatataaagtcgttgttatcatcgtatcttatttgttatcattactgtatctcgcttggtcatcactgtatctcacgtattgtctctctatatctcactcttttgtcattgtcgtatcccactcgttgtcattgtcgtatctcactcgttctcttacctatcatgatcaccgtatctcacttgtagtttgtcactatattcaaaatcaaacttgtcactttatatttttttgatgaataaggaaagttgtattgctcaaatcaccaattacatccattgtttttgtacagaactgtattctatacactatagttagatataaaatttacaagaattacaagtttagcaaccattgcttatctattccctctgttttgcttggaatcagccctgctattctccttttactatcctgctgaacattgttgactatgacattaacttgccattatttttgattccacaaaacacatcattccttggaccccatagctgatacaccaaagcagccaaaactgtagtcatcatgcttcttctggttgctcagatcttcttcattttgctgatacattgcagaagtttctgcaaactgactgcatttgttccccaatgcagcttccttttcacttttgataacatttcttcctgtattcataattaaaacaatgctctgtggtttctttttcctttcccacataatagacatgtcatgtctatattcttatcataattaccaactctttccttagtatttaatatgccccacaacaccagccatagaatgaatatgttcttaggaataacaagtctatcccacacaaatttacaccatgatttcttttcttgtttgttgtatagtaactgatagctatgtgggattttgaatttctacaatacaaatgtagctaggtcagtttttagcttcagtttattcttgactccaaccagcttattccaaaaccagctgcaataagtgggagcttcatagtcccaccattgtttgacttttaaatacacattgtgtatccatttgacaaacaagcgatctttcttgctagctatatcccatacatatctggccaaagctgctatgttccaattctaaatatttctaaaaccaagtcctccagcatctttgggaagacaaacatgttcccaatccaccaaactagagccagccccaacctgattttctttccataaaagcgatctgtaaattgcttcaatatccttaagcaacttctttggaaaaagcataatctgagccaagtatgtatgtatggatataagaacagcattgatcaaagttactgtccccatataagacaagtttcgagtgctgaacaatctaatcttactgaccattttctctaataaaatctgacagtcagaattagagagtttctttgaacatataggtattccaagatacctgaatgctagagagctccttttaaagtttgaggcctccaatattcttccaacttcagtatctgacatgccagagcagtaaatcacagtcttcggttcatttggcattaaacgagaagttgaagagaataatttcaatcctttcaacatcaacataattgagacaaagtctccatgactaaatgccaaaagatcatcagcaaaacacatatgattcaagttcaatgataagcatctttcatgaaatttaaatccaagccattccccaatcttttgaaagatcctagacaaatactccatccctaacacaaaaaggaggggagacatgggatctccctatcttaaccctctctttgcattaaaaaagccacacatggagccattaaagagaagagagaatttaggtgtcctaatacagatcattataagatcaatgaattgagcagggaacccaaaaccagtgagcattttttctaggaatcccaattctacagtgtcatatggcttccttaaatctatcttggtcatgcagcttggcttacatttccttctcccataaagcctcaccaaatcctgacaaactaacacattataagcaatatacctaccatgacaaaccccccttattgtcaacaataaggtcaggaaaaacctttcttaacctattgcagatcaccttagtggcagtcttgtagagtacattgcagcaagaaattggcctgaagttagccacacattttggacaggtaactttaggaattaaagtaatagtggtggttttgatttccttcaacatttttctaatactgagaaaagataagatagcttcaacaaattctgttcccacacgtgcccaattatcctgatagaaggcacttccaaatccatctggtcgtggtgctttaataccaggaatggaaaacaaggcttctttcacttcttgttctgtgtattttgccatcagaatatctttatgcacatcagtaatcttagggcccagattaatcactgattgcaatactttcttcctatttttcatactagtaccaagcaagccttcatagtaccttagaaaagctttttgaacaccttctggagaatcattccaagttccttgctcatcttcaatcgagaaaatcttattatgaatccttcttgatttaagagaagcatgaaaataggctgagttttcatccccaaaagttgcccaagtgattttagctttctgagacaaggacatggagtaagctttatggacttcattgtatcttctacttgcttcctgttcagcttccattaactgcaggcatagtggattctttttcaattcctcttgagctgctattagttctgcttttgccaccatatcaactttttgaatctcagaaaaaccctctcgattgatcttcttcaggactagttttagtcttgtgagcttagtaaccattttaaacattttcgagccttgtacatcttcattccagcattgagtcacttgagtatcgaaatcaggagccaacttccacatattgtaatacctgaaaggtttctttcccaagctcctatcttggtatatagatactaagatagggctatgatcaaaagacaattcaggtaaaaacactacctcggaatcagggaaggaattaatccattgaggattcaccttacctctgtcaaacttgaaaaaaatcttgtcatctggcttttgcttattgttccaggtaagaaaagagcctaaaaacttcagatcagtcatctcacattgctccatacagtccctaaacctttgggaaggaatgcagtgatctttccttcccactctctcattggcattcaatattcattgaagtctcctataagtatccaagcctcatgtattcctatagctaatttcttcaaatcacgccatattttttctcttttttgctcatcattaaagccataaatgaatgttacaaaaaacttcccagtttgctgcagtgagtagatgtggcaatgaatcaattgaatagaacaaaacttcatatccataatataagcagaaggttgccaagctacaattattctccctttatctaaccagggattattgttagagaaacaccatccctgaaataaactactataaagcttccccatattcttattttgaaccttagtgtctaggacagtaacaaaaccaacattctttgaaaaaatcaattgcttgatttctttatgcttttattggctgttaatccctctcacattccaacataacaatctatccattggaagtagagggatctcccccctcccatattactcacttcctccaacacattctctaaagaatcaaatctgtgatttactgttgtttcccctgtttcctgttcaagcatcactctcttttccttgaccaccctttgaaatccctcttcatcaacctgatcctccttcttctcctttgttttcttagggatccaaatttgtttcacttgttcttctttagcgtctttcttcctacatgattgagtatcatgcccaatgctcgaacaattataatagacaagttgtatccattcatacttcacttccaattaaactcatcagtaaacgaaatcttattagggaattccagatatagactcaactagattagaattctagggtatggaagacgatctctgttcttaatgatgttgtcaacctgtagaggctctcccaactggctcactatcttgaacagagaattttccccccagtatttgatatctaatcttttcaattggatccatgttggaacattggtgccctcttccttggtgaaatcgtccacagagttccatggcttcatcaccataggcttcctgtcaaagaatatgtacccctgctccagaaccttgtctcacatttctaggttctaaaatttgataatgaaaattcctctagtaaggagccctactttcaccattgcatccttccatattcgacgaacaaagccttctagcatgcttattagagggttagctccaataacataacacaccagtgatggctaccaatagttaacattctcagcaatgtcttcaaactcaatcttgacattcttctttcgatctgatcttttatctgcaacgtcacctcccgatctttcaaaaaacatttccaggttcctttctacattagatctgagtattggaggagaagggttcttccccgtactcacatcctgagtaactctgttagccaccgtgagccaatcggagaagtcttaacagatctcgcttgcaggcgaaagcattccttcagcgtactgttccattgacccctgacactgttccaatgcttccaaatcttcagctatatccaattcctgaattccaatcacagcatccacggatctggttttgataaccctattagttgaagacagccctgttttcttccccttggatttctcttttccggccatttttgccctttttgccatagcactggtgaagcaccgaaagaaagagaagagcgggtttattttatttaattacaatttatacttgtcactttatatgtgtttactgaaattggtagcttttccttaatcttgatcacataataatttcttaataatacctcatcaaatatgagtatgtgaatctttcctttcaaattcaaatacattactaacactaatcttaatttgagtggtgtctctctttatttgagccttcactcattttcttaatacttatcttaaaattagaaatttaagctaattcaaaatattaacgcatacatattatttgttacatgtactttttttttaaaaaaaaactaatcgtaagtgataaataaatataaatatattaatttagttagctatataaatctacgtatataattaacttatttcttaaaaaaattagaaaaatagatttagagagaacaaataattacttatatccttttatttttatattaattttaataaaaaattaaaaaaataacatttcaaatttaaatattcaaaatataatttaaatgaaacaaattttttggggcaacttattttaatagaaatacatatgttttattttgataaacaataaattatttatctaatgattgattaactaatttttaaatcggtaaataaataaatatattgagtggcaggactgaatgtgtaaagtccttttttggcaatttagattctaaaatattttttatttggagtgaaatttatttgtgctttcaattcgattttattatctttattattcagttttattgctcttttctatcttaggaaagattaattttttagctggctttttcttgtatggaaacttcttgtaagagaagaaactctcttatggaaagttggtttttaaaggaaactttgactattattattttccttaataagtttgattgtgtcttgataagatcagatcatatacactatttatggcaagtatcaagatccaatacaagatcgaactcgtttttgacaagtttccgtttctggtcttatttgctgtgtcaaaatctcgttctgatgctgcaaatcaagtttttcttagaaaagttttgtacaactgtagattcgactttgtggttgtctctagggtttctatgttctataaatagaacctagagaacagccattcgaatcaactc

SEQ ID NO: 296098 - DNA, 974 bp, Cannabis indica
atatatatttatattattattatcatgtcagagtatgtcctttgattcctcggatcacaataaagtgtggaaagaatgtggaaatttatcataagttgactacaagtcaattgaaagaaaatatatgtaaaaaagaatcatgccatgtgatgttttttctatttattcctgtaaagaaaacttaattatataattctatacaaattagggctttttatatataaacggttattgttaacaattttttgcaaatatatgattctatgttttgttttgtaaaaatatagtggttaaagaaatagatttatgattgggatttcacactgtgaaaagaaaacaaatggtaatttttttgacaactattatttgagctattggtcttaagaacccatggttgcaatttggattgtgattaaagttgtttgggttgcgatttgtaatgttaggtttattacgatttgggtttcgatttgtgtggtgttttcacatcttttagttttcctttttataaaatgggttaaaaaaagagaagctaaatgcccatattgtagtagtgtttagattttaattgggaaatttacacccactactgatttttcccattttattacatttatactgtgccacgctggaaacaacatttgtactgtttttttttttttttggtcagtttactgccttgaaactttagccgtgtaagggatttatcattgccacttgtcacgatagggttttgccacgtttatttttttttaaaaaaaatatttttaattgtttgatttgacggttatgtgttctgatcaaaaagtattgtatttatgtatttttcttttatttttttttattattttcgaatctaaattttgtaattggtaatctctctcatctcaactgttcatcttcttccccattttcagttttgttatacggttgtagtagtgggtggttttttcattttaaaaaatttcaaatcc

SEQ ID NO: 296099 - DNA, 4053 bp, Cannabis indica
ttttatagttgttaatattttattttttaggtgttctatagttgttttatagttatttttatgttgtttttgtacagttgttatttagtttatgcgtattttttatcgtgtatattttttcattttattcgagataatatttttgttgtatatatgtgtatttattttgttattttttagtctatagttgtttttaactatcactaactcaaaaaaggaaaagagaaacaaaaaattaaaagaatacaattgtaacaacaaattccataaaaaaaataatgtaatggtacaaaaaagataaataaagttatcaaagctacttaaaaaaaaataattcgtaatacaaaaatatattgacaagttgatattattttgctaattgcaattaggtcaatattttgttatttttctgttgttttgtagttatatttttgttattttataattgtttgttaaattattctaggattgtttttgagttgttttttatttattttactgaaacataatatttttctaattttagaacttataacacaatattcttataaaattgatacactaaaaaatgtaaaaaaactgtatcacaatatttttataaacttttttcctgtatttgtaagttctccaattcattaatttttactaaactttatattctttaatttatttaccatattactatatttaaacaataaaaaaaataatattttttttagtaaacatcaaatgactaatcattattttacttattttacgcatttaaacactattataaataatagattaaatatagcacgaactcatttttgtaccaaattaagctcataacttaacagaatgttagtcaacttagttggctcaagatattaataacagaactttctattgtgatttggatgagatacaccatagatacttttataattattttgtattttacatatataaatgagtaatgatagtctactaatctctttttctaaaagacaaaataaaaataaataaactaataaaaattaaagggcaaaacaagttttctagtgtcctgacaaaaaaaaaggtttcctactatcatagttcttgtacaaagataaatacatttattaacagcagctataaacaataccatactttgtattctacaatataatataattcaacacaatacaatacagtataccaaacaagcctaatctaattattttatggagttccctagatatttgcagccttaaaagtctcattaaagcctacgagttcaaatttacaaaagtgagcatataaccaaattacagcaaaagattttaccatcataaaaatgctaactaactagcctgaataaatatttaacagagctaccatggagggtataatttgctcattgctccttcacagtaagaagttgcttcttgaggttaaggacctcagttcctttggaagccaatcgttccttcagcttcattgcagccgtctcatacgtcctgttcatatgatcagtctcatttacaatctccctgaatctatctcgaaatgcatctagctttgcttgcgtccatttaagcctcattttcagttttgacacttgtttgttgttgttaacttgatcctgcttgtgcaacccaaataaataaacaatggttgtattataaaacttgaataaattagtcaaaatttgaacacatgtaacttgtataatgatggtttcatcttaactttctaaaccatgtaacaaactaccattctactttgatttaacaattattctttccctttttaattttttctctatgttgtggccttcaatttcactatgcttcttatttacttcaacagactaagatattaacatagcactatcaaattaagactgttcgaagtctccatttttaataaagtactcttttatagctgagaaaatctaagcaatgtacgtacattgtgcatcttgagttccatgctggaatttctcctagtcagctcgtccacttgaacttttgcctccatcaactgaaagtaaacttatttagatcattttaaaaacagtgtccaataagagtatgacatgacttaccatgctgttacaccttgtattcagaatttccatttcagctgcatgagtttgctgcttttggatctcaattgttaataaatccctttcctccgtcataatatgaagttcgtttttgagacactcacactgtcagcaaaaaacaaaaaatgattgctccaatgaaataccatactttctagactgatgatattgaattgctaatagctgaccgtaataacaaaataaatgtcgaccatactaagcctaagttcggttcaacattaaaaaggttgaaaatataaattagacttgactatgcataccatcccttataaccattcaattgtttgtgagcaaagcacgcaactcacctcttgatcttgtttattcccaatagcactttgatttacatcattccttggttgattagctcccataaaaatcttcatgctgcattccaaaattacagctcaaacataaagattatagtagcaaataaaacaattctaacatttaagatatatataataaatatatatatacttttatttataaagtcctaggatcaatgtactataaacttgtatctcaacataatttggagcagaagagtaatcacacttgcatagaattcaacaagccttgatctccacaggatatgtgaagactgaagaacaactaggggacatcttataggaagttgttatcaatatggtaaggacagtagcagatagagaagaaaaatagagctaagtgatgttaaattgaatattaaaagataaaatgaaggaaacaaggagcaatctggatattcgagagacccagtgctctcctaaagccacgagctactgctaagtacaaattcattcaccattttttccttccctaaatcataaatataataccaataccccattacaatcaatgtttaaaaaggtgtttttgagccgcgcctttaaagagtgcaccaaggcatgtgccttgttgaggagaagagaggcttacaccttaatcttaatattttgtactaatgtcttctggctgtggtcttgattctataactattttcatagagtttatgtatcgtatcaaaagctaagtaaacctgtttttctcccttgccaaatcttccccgaagcatgtcattctttccctcagaatctcactttcttgtctgctagactccagtttgtttcttacctaacattttaagatcataagttataatcagaatagacagaaagctgactaatatatcaagattaagtcatctcacctctgacaattctttcgttaatgacataatctccgtgttatataaccttgttttttcatctatgacttcaacagtagctttctctttagcaaaccatattgccttttcttcctccatttccaacagtgaatgtgaaagttgctgcaaaacagagtatcaaacagatgagcagcttcaaaataatactaaaaatagaagacgcagactcaaatttcaattggtctattgtgattatgcaaccctaaattagactaccattgccaattcttccttctcttctaccagtatttttatggagctctccatttgtcgctgttcaaactggttttcttccaacttttgcttctgaaagagaagtataagtctcgatattgtaaagtgtacaaaccacgaatagtttcattgaaaagaaatagaagatgacagactagaaagaaaaagccttacaagcaccaaaacttcttcctgtaacagattcatttctgtgttggaatcatttaacttctcagccaaagcttctaattcagaagtcagatcttcatttctggataatgtctcttccttctccgcacatataactgataattcctctttcagagaagaaatctttgtttccatttcaaatgcataaacttccatctttttgtactcctcctttgcattgaagtaaacataaataagtatagagagagagagagagagagagagagagagagagagaaca

SEQ ID NO: 296100 - DNA, 3152 bp, Cannabis indica
cgtgatttttggacggaatgatacatatcaaaatagaatgagagtttaggtagttttgcccctaaaaaaatcaatttttgtggttaagtgttaaaaaatctaaaattcaaatagtttaccagcgaatatccataatttccgtactcaaattatgatcctcagcgtatgaagaatcatcagtatcaattttgaacattcttagccgtttattggttttggatttttcacattattcaaaaacatacacatggaaaattagagccgtatatagttataataattgtatatcacatcaagtacagttaagaaaacaacaatacactttcaagacaaagacaacacgtacatagatgatgagatgattatagaaatgtgtgtctttaatgtccttttctaaatgtttatggtggattacctttgtctaaatacaactataaatcacccttacaattgttgatttttattttttaaacaatttgtctgcggctactaaacttatattgattgcattttgtagtgctttttcattgccggtgatggtttagtctcatttcctttacctaataaatttgaatataattttttaaaataaataaataaataaactgattttcaaaaaacaaatacacgttgagctcaacttggcccgattatctcggctagggcctgacccgctagactggataaagtagtcgggtcgggccaagctgggccaaagtgatatcgggctaggccggatctatggcgaaccgggtcgggctcaattgacattcctaccgaaatctctgaggacatgcatactccaccccttgcaggcccgactgtggaggtcgaggtcttggagaagaggctggcatacaaggtgggcagagaggctagaccttttgccgccgaaatcctagaccaggttaccggaagcgcctctgaacttcccatggaaacctgggcgctctatagtagcgcaaacattttcacactagcccattctgcaaagcggcaggcggttggggtatggcctcgagacactgcctccacttctctctttattttggtttatttgctttggcccttgttctgacatttcaacctttttttaacttggcccgttctgataggcggccctattgacggaaagggttgccacggagataggcgtgctggtgacggagttggagtaaatcaaggcggtcaaccgtgacttgcgtgccaccaatgagacccttcagaccaaacttacggatgccaggttccagattgggggtttgcagcaggtgaaccagcagttggaggaggagaatgctcacaaggcccgcttcatacgaagtatgaaggctattcacgatctttacacagagactgtggggcggatgtccggtgcagactcttcctcccaatcaggcagtgtctaaccttgaaccttcgacatgcccttcagattaatgttgtttctttttctcttctttttttatacatcccccctttaactatacttctttagccgtgaagaaaataaaatttttgccttggccacggggggctgtaatagtaaatagagtccttttttgttgttctttacttggagatttgttgtggtagacttttaggggctggttatgttattgaagcacctggttccaacgaccggtatttcaacctttttccattagccttgattatctcctggtaagttcgagaattacttttcgatttgacccttttctttcccagtgttgtgatgtttttctgttcgccacacaggaggttgcttgtttggccagaagatggccttcctccgcgaaaaaaggtccttcataatctttctcatccctttcgaggtctagttccttcataaggtcgagtctcaggagtgatgtctgcaattaccttaaacttagatgttttccttactttggtccatgtcggcctttcattctagccctttgtgcaacttgatgggctaagcctacatgaagcctgtggagatgtgtaagaagggattcgggcatgtcttttcattttcaaaaatgttttggccgaacatgcttcttatctccgagttcactcttgagtttagcttttgagggaagaaccgaagtgtatttctcttggggagactttggttgagaacgtttcccatttttgttgcatgcatactcttgggctgaatgactttagaaaattgacgtaaggtgttgtaggtgtcagcaatcggatatatcatacccccacaaatgagctgggagttttggactcaaattcccgatcatttgctcgtagtctaacttgtatctccatttttgaggaggagagttcagtgtagctttgccttgcttcaggaagcatattgtccttctgggatagtttcttagaagtgcacatccactttcaggcttctgggaagggaaaacatgggattctgggcgagaacccggttgtatatgccaacaatctcttcgaggtgtaaattccgtaagggagattctgggctcctcatggcatgggagaccgttggtttctcagagggaaagctaggtctgcatcctcgtgtaaacaatcttcctttcgtataggtttatgtaagtgatgattacgttgaaccctgtggcaacaaacttttgactttcactgagaaaggctaaagttgcgcaaggagtttgaacattaaatttacttcaaatgcaaaagggtaaagtatcgctgggtttgcgagagtaggatagacctcaagcagtctttctaatccgagaaggagggttgaagacatattgtacccccagtgatctttcttgcacgaaaaacaacgtgcatgcgagagtcatgttgaatttttgtgtaacaagctttggcttccggaaagaaaggctgaagttgtataaaaattcaagcttagacttcgcttgaaaagatcaaagggaaattatcacgaagagtaggatagtcttcaagcagtccttccaatctgggaaagagggttgaagacgtatcatatccccagtgatctttcttgcatgaaaaacaacgtgcatgctgttggaattattttaccaggatctagatttactaccaagtatgtttgattaacatcctaatatgaattctaaaacaatgaaaataaacccatataaagtttaaaaaaccttacagtgggtgca

SEQ ID NO: 296101 - DNA, 1697 bp, Cannabis indica
atacgcctaagttagttagggtgttacattaggtatccaagatagtacctagatcattctaatttagcttacaattattcttcaattataggcctatattactatccttcaagcagcaatcaaattgcattcaacttctaaatcgagcactaatcttgaacatgcaacaagatttaagaaatcaaaaaagaagaaaaattatctggtgatgaactgggtgatattctgaactagagtaaaagtgtggccaaggcgagcacacgctaacgtcgaatgatggagttaaagaaagttcttcaatgaaaggaaatttaaaacgatcaagcctttttgcaatggcatttgtgtgctcgaggagtaaatcaatttaaaaattaatatccagagttattaattcctccaatgatggaatcgtaatcactggggatagagcatttggatattcttgagccctaatctaaggaaagagatggatacaataatcgatgtcgtgctctagaattgctcaatcagtttttggtttcctctttgcttttaactttcaaaggttatgagtttgacgcaataaaatttgaaattttcggtaaaagtggtaaaatgtgtcattatgatgtatttatacctttaaagtatgatttgtgtaaagctttgatcaacgacctgaattttctctctaagaacacaaggtggatccaacggctccaaaacccatcattcaggttattaatgccatgtctagaaccaaggtaaatcaaatgatgatattacctttgagactcgcacaaaagtaaatagctaccattataattactttgttgcacatgcctcatcagtggataaatgatttgtaaaatggtgacacaatgccacgtgtactcttaaatgcaaaaattgacaaattgttttccatccgttgaaactatttggaatatgtaaaggtttcacctttagcctccacttgtccatctgtacactctgaagcaagcaaatccacaacattcctgaagcttccgagtaaatcttatctgtatttttgataagggacacgtgaattttaaatagaagcttagggcccataaacaggcccaaaaaacataaactaggctaagtcctgtatccattctaccttctaggagaacatctaaatgactcggctaggtgaggttctgtcaagtatagtcaacatctgaaaggaaaatatccatgtaattgaaagaggtcctcagcgtgtgtctggtagcccaatgctagtttcttgttttttgccaaatcgcataatattaggaattacatatcgagaatctcggatagagtataatatctcactacataaggaaactaaataattaaaaattaggtaattaatatgtcattaattacccatgaatataggacacgatatcaacaactagcttcatgaaaagacctccatgtcagcatacataagaggtctcacgggttgggtttaacagataagcgcaaagtcaatgtattacttgtaaaactctccattagaagaaaaagaagtaattagtatgacctttataacactataaatactcattgaatcctatatgcaaaaggttgaaaaaatcttggctatactggcttagacaaagaaaaagaagtgctcatacttactgtaatcccttaggcttttctagccaatctaataatagtactaactcgtggattaa

SEQ ID NO: 296102 - DNA, 5380 bp, Cannabis indica
aaaaaaatattctgacatatatgttttacataaaaactatatatcaagttgtaaattgtaataagagattgattgtagttgtcttcaaataattaaaaacaaagattgagctacacctatacataaaagaacatgatagtatggctctattacttgttcaatcatacatgtgcacacgcatataaaagagcccaaagaaaatcaccactcccatttcttcacaatctgattttcgtgaacttttggcaaaacaaagtctattgctctgtccattttgccaaccatttcgagatatgggcattcttcatttaatatcttagtgccaaggtggtggtggtgtcagtccggccatgttaagtttttcacacttaaaaaacaacaatattattatattaacaactttccaaaataatagactcaaatatttgtccacataaaaagaaaaaaaaagactcaaatgtttgttaaaaaaaactcaaatattaataaaaattgaccaaaatgattgcaaggatcgtaaattaaaacggtatcagggtttcaaaaacctacaaaacagagttataatcattcattcattgagtcgaaacaaagaacaggaaaaaaaataataataataacaaaaaaaaaacaatggaaggaagcaaaacgacatcaattccattgctgcaggaggagtcatcaagatgttcggaaggaacagcttcaagggttcaaaccatagctaacattgtcgtttcgattgtgggcactggcgttttgggtttacctttcgcttttctaaccgctggttggttcgccggctccgtcgccaccgtctttgctggaatctccgtctactattgcatgttcctcctagtcagtacatatatatatatatatatatgttcatatctataatctatataatatatatttatgttttcattatttcatataattagtctcatgttaatgttggacaggttaagtgtagtaacaagttatcattaaaagaagaagaagaagatgatgatgatgatttgacaaacataaaaacgtatggagatttgggttacgaatgcatgggaacgacaggtcgtttaatggtggaaacactcattggtatttctcagtgtggaggttgcgtggtaaatcttgtgttcattggacaaaacctttcatcagttttcagagcccacaatctatcattctctacttacatacttctactggtcccaatagaaattgggttgtcatggataaggagtttgtcatctttagcacatttcagtatatttgctaatgtttgtaatgttttggctatggggattgtggttaaggaagatatacaacaagttttaaagagtgaatttttgtttgatgatagaacagccataacatctaagtttgggggtttggcttttgctgttggcatggcagtattttgctttgaggggtttggtatgacattggcattggaggcttcaatgaaggataaaaggtcattcccaaaagtgcttgctcaagcattttttgggatagcccttttgtatgttttgtttggattctttggttacatggcttatggtgatcaaacaaaagacataatcactctcaatcttcctagaaattggtgggcactcaccgttcaggtactctcttctcttcttttctaacccctcttaactcattttatttaagcttggtcattgaaagaccattttgtttaaggtgataaattaattgattcatgagctcaatttcttatgatcactgcctacttgatcaaatacaacataagaattattatatagttattataattacttgagcaagctttagatacatttaaagtagttctttcttcttgaaaagttgaccttttgagtagctatgcttcaccatattgattaaaggaagtgacatatcaatcttttttattggtgcaaagtaatatcttaattttaacccatgacatatagagtgtgaagcattgttatttgacaccttgtttaatatattatattaatagaatccgatattaaaatgcacgaataataatatctgacctcatgtttgacactttaaccttaaagggttccattatcattttccctagtgcattgctatgttaattaattaatacaatacatttcttcttattgattgtttgtatggtcaatggaaacaaacacagattgggatgtgcttgggccttatattcacatttccaatcacagtacatccccttaacgagatcatagagagaaggttgaagaagaataaatggtgttacaatagtaataaggaaaacgacagtgatcatggtcattcaacaacaagaataggagtgttgggaatatatagtagccgtggcatattggtgattggattggcagtgttagcctcttatgtgccagagtttggtgtatttacatcactagttggaagtactgtatgtgctcttattgcattcgttttcccagccatatttcatctcaaattattggcttcttctctgaatttatggcaaaaagcattagatttgtttatcttgtcatgtggcctgctttttgctgtatatggtacctataacactctcattagtgtgtaattattggttctcctaaatcttgatatgtagcatactagatattattaaattatgttcaatcttagaatcatattatgttgtaatttttgaaatggcagtgtgccgagtatcttagctatgtggatctcaaaaattgaaattaaaaaccttagattaatgttgttatagcaagacttgaaaccaacttttatttgtttattttgacattagaggggttggggattagaattgggaactctttttactagtttagttttattagctcataaccgtaatcttcatttattaaagccacaattttcaacttttttttttcaattttttctataatttttttttttttaaaaaaaaagtccatattttaatacaaaaagtataaaaattcatagaatttataatttcctctttattaaaggtgtttagattagttagcccttttagggtcggtaagtactattgcaatatgcaaagaaccaacctcaacactttaaaatatcttatttttagctttctactttttcataaatcatatggagagtttattcataagaattcgatttagtacatgacatacaaaagataatgagaaaaaagataaaggtattcaatgtgtttggtgcgagcgtaagaactagattttctgtgaggaggacagtgctcaagttatcacaccacacaacaggaggcttaggcaatgtaatatgcaactcagtaaatagagagtatagtcaagtaagttcaattttagcttgagcaagacttcaaaattcgactttagtgctgccccgagacaatgtatgttgcttcttacattgccaagcaataagattagagccaaaatattttgcaaaaccagaagtagattgcttatcatcaagatttgtggcccaatctgcatcacaaaatgtagtgagctcatagtcttctggttttctaagatatatctcagaattctcttaacaacttgccagtgagactccatggtattagccatgaattgacagacgttatttacattgaagaatatctcaggtcttgtgattaccaagtattgtaaagctccaactatggatcgatattgttgaggaatgtcaactagaaggctaccataagatgatagcttcaaactacttaccattggtgtgttagatggcttcgctttatccatataagctttatggagaagatctctaacatacttggcttgagacaagtgcgaacctattgatgtagtggtaacctcaatgccaagaaagtaatggagattttctagatccttaagagagaatttggcattcagtgcagctgtgtagtgagaaataagctcgggatcactgaatgtgatgataatatcatcaacatacaccaagatatcttccatggagagaggagtgtggcttatgaaaagactatgataagattttgaagaaacaaatcccaatgacagaagacaatgatgtaatttctcaaaccaatcacgaggagcttgtttatggccatacaaagccttgtgcaacttgcatacaagctctggagaatcaggttgttcaaaattaggaggttgcaccatgtatacctcttcctgcaagtcatcatttaaaaagacattgttgacatcaagttgctttatgtcctagcctttagagagagtaagagtaagaacaactctgatagtgacataattgagaaaagggataaaggtctttttgtaatagaagtcaagttgttgatggaaaccttttgcaactaatctggatttgaacttaagaacacttccattagaattttctttaattctatacacccatttgcatccaattacagtcctactatgtggaagtttgacaagaatgtatgttttgttcctttttaaagcaagaatctcttctaccatggctttgttccattgcagctgctgaagagcttgctttattgatgttggaatttaagtaacaagataagctttaggcaatctaattccactttttcctcgagtttgcatatggtgtgtgttaccagtagtggatatgttaggtacagatgctttagatggtagctgagaatgtgttttaaatgacacatttgatgttgttgtagcagcacttgtgctgctggaactacacttggagatattggctcaagcataggatgagcagatgatacaaggtcagaggcaaaagatgatacatgcatttgattttcctgtggagcattagatatagttggagctaggatccttagagagtcaacagaacttgaaccatgtaatatctgatcttcaccactttcataaacacaatgatcattagaaacagaaacaattgaatgagtagaaaactgttggttttatggtactaaatcaggtacgcagtggaagaattcgtattatttaattatcattataccatagcccaatggatctccagatgtgtatacattaaatcaaaacataaaatacaagaaaagaatatatacctcttgatgactatcaggggtatccttaaaacttctcgtatgttgtatccttttagttgattagaaactctcactatagtcttccaaatcaatccaccacacacaagaaatagtgtgggctattagaataaagtgtataatgtgttctcgtttaattctcaacacatgagcaagaattatttgagagaaaataagagcatgttcggtattattttctgttttttgttttcaaaaaattgtttttagaaatgagaacaaaaaatagtttttgaagtttttaaaacacaagtcatgtttggttagtgtttt

SEQ ID NO: 296103 - DNA, 8148 bp, Cannabis indica
aaaaaaatctgcacaaactaggccaaagttagtatacatattacttactactactactactactaccccctaaagacgaatcaaaatactaacagtctgcatcgtacttgtacttgtcccatcctatatcatttaaaaccttacaatgactttctctctctctctctctctttctcactctctccatatatatttttgtttcctaaaatcagcaactaaatactctacacccaacacaccatcatccaattccaattccaattccgattcagccatggtgcgtcaaggggggtgtccccgcttttcactagagaaaaaaaaattccggaagaagaactaagttctaaccaccaccggaaactaacaagggagaaaaaaaatcgccatttgttggttcttcatatccaaaagatttttgggagaatgaaatatgaatctaaggctcaccaccaccttaccacagcaacaactctgcctcattacacaaattaggctcctccattaaaaactagctaggctaccgaccaactatgagtccaacatctcgtcttggatctcgttgggggcgataaggcctggaatagagagcattctttgccgctctctttctctctgagcggctgcctcctcggcgtaaagatctttgttgtcctgttaagaaggttaagcacaatcagatttacacgagatgtagcaatggcacactttactgtactctgtaatttagtttacctgggcagaaaactctttagattgtacgagaaagtctcgaatatggtccttaaatttggagatatcatttctagattcaaacaattcattcacaaattgtgtgacctgcaataaaaaaaaaaacaaacccagtcataagcaactcatttgtttttttcaattcgagttgggagtggggaatcatacctcagctgtagtcatgttggggaatgaagtactcaagagtttgatggtgtattcacgaatgaagaatccattattaggatatgcaaaggatgcggtagcaacatcccacaaaggctcgcttaacaagccagtttccacctgaaaggatatgaagtttcagtgtaagttgaatttgtaataaaaactcctgcacttgacgaaaaaaaacagggcatataaagatgtagtattagtaccaggcaaaacaactgctgaagcaccaaaacatgcaacttgaaaccaggcttgtgaaatgtgtctgtcaagactgcaaatatttcttgctcgatggtcaagaagtatgtccggaagaattgattgcagaactccgaaacctgtaaatatgtccccccgaaaaaattgcacttaagattccttatgcgacaaaatcatgaagaaaagcaataaatcaatttaaagaaaatgcacctgaaagttctttagcatctctagtaaaaggtttagcccagtttctgcaatattcctttctgtgtgtctaaatgcccatataattgaatccatgacaagctttagttgctgaaaattgcaccataaaaaacaccaacccaaaagaagaaaaaaaaatcactgggtcagatcaaatgattaaaaaacaaaatcaaaattttctactataatctggccaaaaaagtttgtgtgcagacctggctagacaaatgaatcaatgctgcaaaacaatgtgttgcaattgcacgaagtaatgagaagaacttaagacgatgctcaggataatcttcgaaatttttagtaatcatctgcagggagcaacatctcaggcatgttagcagtcagccaattagcaaataatttttgctgcaaattattagcagtcagtcaaaacagccaatccttacctccaaagtgcactggaaaacagcttcaaaaatgcgaggcacatcttctgtcattgcgcttttgtatctagagaacaagacaaacataaaaaaggatccttaagtgcaataaaatcaaacttaaacacataagaagaacaatatattacatcttttttgagtgaaaacagcctatcatgtgcaggatgagtagtaagtttgtaattttagatagacaaagaaagaaatgggggaaggtagcatacttgtttattattgtagcaaacagggacaacacttcagattccctagcatcaggcagatttctggcataatcaccaagaacaggatccatcatcggaggcacaaattgttttcctatttgaggttgatcttctgctttgtccaagaaagtttcaattaacttaagagtctccctcttcacagacctgcttacagtaaaagaatgattaacaagctaacgtagaaacttataactaaaagaaaaaagaaaaaactagaaattaataagaccttaaaagtttcacataggaagttttagaagcataggggcccccttctgcaatgctgttagatatgagctcactgtacatcctgttgagtcgggaaaagtagttacgttttagaaaagaaacaatctgttgctagttaataattaatattaggaaattctatttatgaagatatacctgtagacattaagcatgtccaaaaagatcaaggtaatttgagataagaaatatgttccaagagagctagccacacttgtatttgtctgcaaatttcaacattttcgagtagtcattaaatactaatcattgcaactaggtatcccttatttaaaaatgtgcaaattcattgaaccaagaaaggccaatggttgttctaatttcaagatacacacaaattaacaacaaactacttctctaatagtcatagcagttgctctgtgaacaaacacagcatccagcagaaacatttgacgtactacaataaaaaattctgctattcacttcaaaagagagggaacaaaaaatgatgctccctgaaaattatacaaagagcaacattgaattaaatatatggagaaaagaagattggaggaaaaccatacctgcaatatattcaacaccgtccttatcacatcttgatccttcaggaaatcaacgcttaagcgtgcctgccctataatttcagcccatttctgaataacaaagtaatagcatcaaaaattaagtatctaacaaaaacacaaatggaagtaattcaagtaaataagtcaagagaaatcaataaaatttaaattacctgattagggagctccatcaatctctgtagatactcatcccttttctgaggatcagattcagcatgaatcatatgaccaacctgaaacaaaccacagtaaacttagaatatgtgtctgactgttttatgtaaaataaagaaaatagctcgactgaaaaatcttaccgattcatagaatgaatgaatctgatgaggctcaagatctgcaacagtggttggaaggacagtcaacagttcacttataaatggttcattttctccaacctggaaataaaaagagcaaataagagttaacaaaacaatccactctagtttcccttttagcttttgttcatattacattttagcttagttctgcatatataactgaacccaacataaaagaccgaaaactgcccacagctgaataaaaataaaaaagtcagtatctcaaagtaaatgttacctgaacaataacaaatttacgcttgcatttctgaacaatctttaagaatgtgtcgcaggccatatcctgaaatgtgggaacacaaagttttagcaacacttccatagccaagcaatccaattttaataggcaaaacttcctactagcttttacttataaaagctgaccaagaaaataagagcagaacatgtacctgaacaccaggatgtgtctcatgcatgaactcaaataatttgttgacaacagtttttaggaacttccagtgagctcttagaaaccttgggtactgtccaacaacatacctgcagaaagaggtaagaaagattatgtacatgatttcagaaaaaactactggccgtacatctggcacaaagtttctcatggtattccaagtaaatcaattaacattgtgacgttaaagttcatagtttttacaaatgactaaagaagcaggatgatggaatgatgtggtaaggcctgacaaactaaatgcattccacttcaagacagatactcgaacattcactcttgaacacttacataatgttacttgcaataacagctttgttatccttcccttttgtgatttcacataaattcagcaaatcacgaatgaccataaccaaaaacctgttctcctgcaaaaagtaaaccaacataaaaatatgaaggacatacctggacctctggcaaatacataatcaaggaacaggcaagggcaattatagcattttaaaaataattatataaactcctattcaaacccgcatattttcctacacagaaaacgcgtaaaagtgatatctcagttcttgatgctctacatcaagaccccatgatcacaagacaaacatgcaccttctcaacagaaaaaagagaaaaggacagaatcatgcacatgcgccctcaaagatctataaagatatgtaatgtaactatcattcacagggaaatgaagtacaagcttagccaactatctttgatcggaattaaaatataaactattaccacaaataaggtagggtatagacaatatctagagaagtgaatgatgattttctagctttttccttattctctttcttccttttgtggcatttgagtttctagttgaatcagaagttataaacagtgatcacaaatagaaaatgaatagaaataacatgtataaggcaagttaaggaaaagtacctgttcctccatcatcgaaccagagatagaccctattgcccaacacaatgtgtttaagttgttccaattccaatcctctccagttaattgtttgcttagcttctttagcatctgcatcatacaaaaaaggatagacagcgtaagatagagtttatgagcataatatttaacaaaagcaaatgacactgtttctctggaagtgtctgacaatacgaaaactacatactctgttaaaattatacatgcaaaatataattttaaattgaaccgactataaagacatccctcactcatattgtcccacaaactattcactatcattgacacccatgttccagccacatgaatagaaaaaatccactaaaaataggttgcatttcttcagagaatgtgtgtgtgctagtgcagggggtttagaacatatggaataataaatccataccagcttctcagtgtcctcatgatcaagatgtgacaaatatatcaaagtctccctcatgatctgcaacaataattaaccaaagtcagaacactgtgacagatagttgccataataattagaagctagatgccaaaaacacattaaaatatgcaaaagtggcagaaaaataaatacagaaataaaacataaaaatcaagaaagtaaaaaaaaaatatgaattcaaataccaggaaatttttcttagatgaaccatgacttgcaacaagttatgtaaggcttgcttctaatgaaaattactatcaaagcatagattactgaccttgtactgcacaagaacatcattgtccttcatggtttcacgaacaatattgccattttcgtcttctactatgagaacttcttctggcttagccatacgagaaatcataagcaatcttaactttgacattggctcagcatataattgccgtcgctgcatcagttgtgatccaaggccatcaaccatgccaggtagcaaaggcatctgcttattcaatttaaaataaggtaaaacaagcgtgctccaatacaaatcttctaaaaaaagatatgccatattaatgaaaaagaatcatgcaaacaaagaggagattgaaagttattgtcctagtaaccaaaggtttgacatagtataataatcataaactagaataattaacatagatcagatcacaaaataattggtggtcatataactaaagagtttatatattactatctccaaccatttagtctacaaaagaagagaaaaatacagctaaggcaaacacacacaaaaaaaaagcctactgctccaaaaaggttcgaaacacaattttcatggaaaacacagattgaaaaggaaattgtatcgtggaaaacacaaagaaataaaaaaatcaaataaatttgaatccaacataccaaagaaaaacagtaaactgcaagaatagaaagataatctgtgcggacatatgaagaaaaagaaattcacaccaaaaactatcaaatgtaatctgaatgtgacattcacagtacctgcaaccccatcatgtttgctgtcacggcaggattatccaaattgtggtgtgcctcaaatagttccaacacaaatgaattccaaaagtctaagcaaacctgtttcaatcataagatgattaaaataaattttggcaaatttcactgtatgtttgagtttagactatattggtaccttgaaaacttctgtgtcatccacatatgaaattttggtaaggtattcaacacccatgagcaaagcagctatgttctctccaggagtttccagcacacggatgtgagactgcacacaaggatataatgaagtgaatatagcaatctatttgagcagtaacttcagatctttgaggtttgaaaagaattaatgtgaatgcgtgctatctaattaaatccattaagaattgtcctaatgacacattaagctgtttaaagtaagcctaaaacgtcttaactattaagaccaggaaagtataaaagggaaagagaaacttgccttaaaaaatgaagtgaaaaacaaagccaaattctgaataaaagcctgttgaagaatagtaacagttaaaaaaattgccaataagtaacaattactgtacaaacacatgaaaattaaaaaattgagttttgaagcctcaaaaaaaaaaaaacttacctgttcttcactggaaccaattgcataagcctcaggaatgtttgtattaagaggaataatgttctaagccagaggaggaaaaaaaatattaatagaaacacaagcgaagacatacaattaaataaaagaaaaaattgtagaatggtgtaatgagtaataagccagccaaatagagtactacaataagcattttattttggaccaacctgtaacagtttcatgaatatagtgtacatcttaacgtactgggcattgtagaaatctccaaaattaagtgctgcaacctaaacaccagtacagtgaactgtgagaaccaggcacaattttgaagcaagtcttaaatgaatcagaatacaaacaaacctctgtcaaacactgaagagtgagattccgatacgatgtcatggggaaaaaattcagcagtgtttctagctgttatgtaaacaaacacagtcagaattttgctcaattgtacttactcttgtaaggatgttaagtattaaattcaaaagcagcaaaacagccatgtatcaaacagagcacataccaatggagactcaaatatatatcccaggggaatccatgagagaaatgcatgcaatgtggacagtgttgcacgtataagctcagttctttgagaagctgacagtacatataagcatagctcatgaatgagctgaaattcactgcaacaaccagtcacattgtatgagagattggaaaaatacataaacatatcactaacgtagcatgtgacatgccaattagaaaataaaacccaagcataagatgactatgaacttggcagtacagttatacttatatcagtagtccaacagtcggacattgtgccaaaatgtgtatagtagtgattaaaaataactgaaaaagtcaaaaattgcataataacttctcatcgaaccacaactaaaagaactgttctttttttttagaaatatataaatacgcaaatatgtccactgtaaaaaaatgagcaatcatgaaacaagaacattacagcaaaagacatgaactgcaacacaaaatgaaataaatacataaactatttacctgttcaatgattgtttaagctcctttatcttactttgagtcatctctccccttgagaaatcaaacacctcttcacttagaagctaacaaaagaacatattcaagtatcagtgccaactaattctcaataccatacgagagagagagagagaga

SEQ ID NO: 296104 - DNA, 3398 bp, Cannabis indica
aattaaacttgacatgtccaaagcctatgatagagtgtaatggaaatttcttgagagaatcacgttgaagcttgggtttcatgtggattgggttagaaaagtccttgattgcgtctctttagtggaatactctattctcttgaatggggaggctattggttctattactccccatcgtggtcttagacaagaggaccccatgcctccttacttgttctttcattgtgcagagggtttatctggtttggtgaaacgcgattgtaacgatatttactatttggttttccttataggagaaatggtccgatgatctctcatctcttgtttgccgacgataacgtcttcttttttaatgcttcagaagtgtattgcttgagattcaagcaacttctgagttggtatggtgaagcttcggagtaactggtcaactttgtgaaatcaacagtgtgcttcagtcccaatgtttcgacccttgagagataaagattggtagccttattggaagttgtcagagtaatttgtcatgagacatacctgggtctcccctatttgcgggccataacaaagcaagcttgttcaactctgtccaggacaaaatttggaaaaagcttaatagctagaaattcaaattgtttttcatgatggataaaaaagttttgatcaaggttgtaatttagtccatccctacatatactatgaacttgtttaaacttcctaaacattttatgaagaatgttcataggatgtgtgactgtttttggtggggggatgatgtgaaaaaaaaatccactggtgtacttgagagaaattgtgcctacataaagaagatggtggtatgggtttcagagacttgcatttgtttaaccaagctcttcttgcgaagcaagcaattaggatctacaatgtccctatctctttggttgcctgggttctaaaaggtttatattttaggaaccaaaattttggtgatatagttcggtccaagtaaggctcttttgtgtggaaaaacatttaatggggtaaggtgctttttgactctggagcagtttggagggttggcaatgggcatactattcatatatattctgacttttgggtccactcggcgtctccatctttggtgttggctcctcattttttggtgaaggtagcaaagtttctcggttacatgaggctttaggggactgagatttaggtttggttcatggtatcttcattcctaatgaagcagaagctatcttatctattctttggcccttctcaaaacaggatgacgaactcatttggaattttaaaaagtttggttggtactctatcaagagtggttactggatggctcttcgtacaaagggcttgggtcgtgcttctccctctaagaggtactcaggtaggtggaataaaatttagacccttaatatccctccataagtgaaattatttgtttgggaagcatccttttattggattcctacgaagattgatttggctagtcatggtcttttatttgatggcctttgtcctctttgcgagctccatgaagaggctacttatcattccttttggggatgcccaactttaatggcttgtagaaaactttgcgattttgatctggataactctttttccactcatacatatttttttaactttattcataatattaattatcctttgtcgaaggataaattgaattagttatggtcatttttgtggcgtatctggttcaagagaaataaaatagagcatgatagctttaaatagcctcctgatatggtggtgaattgggcccatgaattttttcgaaacttccaacatagtcgggctcggtctgggctttctctctctttgggacaggcagtctcttttccttcttatgaggttgttttgaaatggtctcctccatttatctggctctatcaaggttaccagtgatgccgctatagataaaacagatgcttgtaatggcattgatatggtggcgcgtgataatttgtactacaagaaatgtcacttttaccagcgcatctcgcaaactaggctggcaaaaagattaaaattttaccattgcacatttgcaggggcaaaaatctaacttttaccagtgcatttacgtgctgggaaaaattatttttggcagcgctttttattttgcaccgaaaaaagttctaataccaacattgatttgtcaacaccttttgctaacacatcaaaactagatttcgttttgccagcacattgttgtgctgacaaaagtgacatttcttatagtgttgggtactattcttgcttctgttgtttggtgcctaaaaagttgtattcatcctgaagtggcataggctttggcgcttcaaaatgcaatggtccaatgtcatttctttgggtatgataatattatctttgaaatggattgcttgaatattgtacaaaagtactggtgaaccaaagtttttctaatttcctctttgggtcttgtattggatgaaatgggtgtaatctttgtaatagttttaaagctatttgttttttatattgttctagagattttaatgttgttgcctacactttagctaagttgctcttacagcgtctagtactatttagtggtcggaatttctaaattgtattcagaacttattagtagttgatgagtaatgcattctccctctttcctttttgagtttcattacttttggtgtaatggttgaaacattttgctaaaaaaaattattaaaaatatattatatatatgtttaatattaatacataagtatatatataataaaatcatatataaattagattttgttaatgtcgtatctccaccatatttgtatatgcatgcgagaaattgtttccaactacggtcatttaaatttaataatcgtgatgagttttatccctaataaagaagattcaaatgtgtgtgtatatatataattaatataagttaattaattgattatacatacacatgattatatgatattgctttcattaattatcgtctaatttaggctgaattagagtatttatatgtgcatgatgctagcatgagaaatggctccggcgccgtttcctccctactctatgcttggaccattttctttctctctctctctattggtcttattaatgtgaccattcctcttttttcttttctttctaaatgtaactaaatttatatcaatatctaattatcctaaagatccattccatttgtaatattaaataatgtatatgtgtgtatgcatatgaaacatatttaattaatgagtgacagcaactattgcctaattcctctgcaatgaaattctaattcatgacatatatataatatataaacagagaaggaaaaaagaaaacaacaaattaaacaaataggtgccgtttggtaacac

SEQ ID NO: 296105 - DNA, 3379 bp, Cannabis indica
gaagttctccaacaattgaaaaaataggaagcaaaaatatggatcatcagttattctttttttcttctgtcatgaaaagcctatagactttataaatagagcaagaatttcagacaagtaatttcatgttaaaagattccgaacaaaatattcagattacaaggccagttatcaagtaaggattcatttaaagggcataccaaaatcagataacaggaggacttgcatttaaagaagacgaacaagtgaaagctttggtacaaaagaaaaccttccttcagctaaactaattgtgattctgcactggaggtgagcatattggctaatcatcaaacctcacttctccagatacatgtgcatatgaacaattaaatgatttttgtaaagtttcaactctaaaattgaagccccaaaaaccacgaccaccagggtttagcaggcccattgaaaataacgtagattcttgaaatgtagattgacttgagatatttgacttctatttccataaagaagatatatctcttcttctattatgtttctaagttgtaattgtcacaaaattcacaaggtggggcattgcaacgtctttatatttgttaccatatagaatgctataaaaaaaaaaggtatgattgaaaaaactggacatttgaatatgatggtagctaaccttagctctcaatgtctcgatatcagcttttaagattctgttgtcaacagcagcattatcatacttgtggttcacatcagaaagacgctttaaaagtgtagagtgctcaacccttagttgaccaacctaaaaccaccaatgtacatacataattaagttactgggaatggaaaatgatcaaagacaaagaccaagacaaatgttgaatcagaatgtgaagctgcacctgtgtttcaagttcactcatttgtgcttgttttcttcttcttgaacgtctagctgactctcgattagacagcatcctgagcaaccatcaatagataaagttgataaaggcttatgatttttcaacgtacttatagtttattatcctttttacggagagaatttgttgatttgctggtatagcagatcacaattttgagacaaacctgttttcaaataaatgtatcaggtaaacacctaaacctgcgaaagttagttcccttcatgaaatccaattgtttaataatgacataagtttccatgtcaggcattacggggtagactgtctctcaatttattttatattaagaaaaacatgatttttttttctcacaccaatgataaattgtcttcaaggcatagattcatagatcccttctcaatttgtgtaactgaatatataatgaatctcaaggcgactgctgcaagaacatagctacccataatttgctgactaagaaatactattaaaattactcactccctgctaatatcacattaacagcttaaatgcaatagatgtgaggggaaaaaatatgaatagaaaacacagaaaaatggcctaatactcggacattattatctttacctcctagcacgttttgtatcagaaggatccaagttgtccaggttatccatatctccatcaagatcatcatcatctgagtcctcctttgatgatccactagttgtttgcctactttgaggtcctaatttcttttgtataggaggtaatgctggaataacgtttggtccatcatcaatatcaacccgtgccgttgagagaccatgacccctacctatgtgagtaataatatatcagggttttcgtaactcactatctacctttaaccaagatcaaataaattgtaaaagatctgattttagactagagctcctttaataaaaaggaaaagaataaataaataaaaagcatcaataataacactatgatctagacctggagtccatgtagactccataaaataaccacagtataatgaacgagcttccctttgagtatttggaaatcaactttgacatggaaaaatcacttacccaaataaccatattccaactatccccatcatcaatttttcaaatatagaaacaagtactcaaaaaccattcatcaactgacaatgcagcttaacaattgaaatacatgattttttgttcaagaaaaaacagcaaaaacaagggtttgagaaaagaaccttcatcgtgagctccagatcccaattgtgaagtccccgacgccggcaagtgactctgagataaattaatagaatccccaggcttcacagccaatgattcctgtcagcatattcatgaagaaaaaaaaaaaaataataatacacaatacaaaaatatatattttgtcaaacagatttcatcatgatccgaaaattacacaaacaaaaaagagagaaagattttatacgcgagtgagagcaacagcagcgcaagccaaatcaagttgatttttcagaaattcacggtacgaatcggaatccccagggagcatagtaactgtggacgaagcatcggaggaaggaagatgatggcgatgattttcaggcttcttaatttcgacgacctcatcatcggcttccggaaacttggaactggacgattgagaaagcaaagaaggcgaagaagtgggagcggtcatcggatgcggtcgatgattcaaagtagcggtggtcggagtagaaaactcctcgagaaagcgctctaaggcccactcagaagcgctccgattcatggccggagacgtagaccaataggaatcggagatatcatcgatggagaacacagaattcatcgtcgtcttcttccttcaccctaattttttttttttttaattatgtttttttttggggttttgaggattttgttcgtgatctcaatttctcagttttgtgtccgcaaagacaattttatatgggggccacctctgctcttttgttggagatatgttccgctgtgcttcctaccaccaaccaaacggtaggtctctctcgggtaccccaaccgggaatatatatttatattttgagtaatttactgtaaaaatctttaaatttaatttttaattataaatagataattaaatttagtttttaagataaaaatatataaattatatttataaataaataatacttatggccctttggggaactttttaaaaagttaaaattatttttgaaaaaaattatgaattagtatgtgtttggtaaaatttaaaaaatagtttttttaaaaatttaagtgaaatttataacttttaggaaaagttagcccaccttaattttggaattttagctacaattttgatttaatgaatttttcacttgattcaattgcccttatctaattttaaaatttctcatttactaattaattttaggatttcttacattctttcaatctcatcct

SEQ ID NO: 296106 - DNA, 5253 bp, Cannabis indica
ccttcaagatttctagaagagagcccaaaaatatatcaacctggaagaggctcaaacaacaactttcagagggtagtatcctcaggaggcccagggtatgcttctggattaaaatttctaggtatcacgcttcctgccgctccctaaacgagtgggacgcctcaagcaacacctgggtactcaccaaattctatcatggcacctgcacattctgagtatgggttgcccgcaagtggtcccactcccaaagcattcacgcagtatccttctcaatctgcttcacttgtagcaagtgtagatgtagctcccgaagtttctcggagtaaacagtcatccaaggaagcacccaaagtgatagcaagaagccaaaaaggtccgggtataatccccaatgtactcagtgtatttatttggtggatacacaagagcgtgtatattcgaccacaaggcaaaatgttcactaccgaaggccacgtcttttatcacaagacagcttgcagaaggactccaataaaatatgtgagtaccacaatgacattgggcatacaaccaatgaatacaagaatctaaaggacgagattgagaacttgatatggacaggccacctgtaagagtggataaggaatcagttgccgcatatgggagaaggccaagtcggaggtcaaataccacctggaggtgtggtacaagccctagatttataggcccttcagggaactcttccttgaaaccaaggggctctaccaggacaaccaaataggagagtgaccatgatcttaggaggctctcaaataggaggttcgactcacaatgagtgaaaacagtatgctaaggccctaaaccatgatgaagaaatatgagaagtatgctagttgccagctcaacgacctcgtcttatggactaaccaatatcgtttactgaggaagatgcctagatagtgcatttatagcgccatgacccattcgtgattgaaactcttatcgccaacaagataacagctcaaattttggtagataatgggagttcaataaacatcctgttcaaggaagccttccttgccattggccttatggactaaaatttattaccaagtggtttctagctcacggggttcaatgggaattccctcatccctatgggaaagattaggctcccaatgaccctgtgccctgacactcattaaagtacatttaagcattgtacctatgtcgtggtagactgtccgacaacatgcaacgccataatgggacgattaacattggtggattcagagctataacctcgattaggcacttgttccttaagttcccctccccactcggtagcagtgggaactgttcaaggaaaccaaggggaagcaagcaaatgctatcatgtagccaccaagaatgatttcttcagggtccaacacacagaagaaggacgcctaatggagatacacgatgaattggatccccgagtgggagtcgagacctctctcgaacctatggaagaagtagaggaaattcaaatttgtcatcaggatccaaccaaggtaattcaagttaggaaaggcctttgatcctgaagaaaggaatgaaattgtggagaccatcatagaatgtaaaaaagttgaaagcaactgctcaagaacccaaagtgattgcccccacctggaaagtatatgtagatggggcctctaacgagaatagatagagagtggcgataatgatggtgtcgcctgaaggatcgaggcttcaaactactttgcgtttaaaaatcccaactctaacaacaagacagagtatgaagccttgttgatagggttgagactgtcaaaggttgtaggagctcacatgatagagattttgagtgactctcagtttgttgttaaccaagttcttgaggaatacaaaacttgcggataaaggatgacttcttatgtcactgctgcaagagaactacttcatgaattcaaaagttacaaaattgagcaaatcccaaaggaaaacaatgcccatgcagactgcttagaaaaattagctttggacaaagaagtagaaagactgtgggtggtgcctattgagtaccttctaaatcctagtattctggccaaggcagaggttgcagtcaccaacaaagagcccaactggatggatcctattatgaattatttaactaaggagaactgccctaaaatagggctgcctctcataaggttcaataccaagctcctcggtacctcaagattgatggcattttatatcaaagaggttttaagaatgccctacctgagctatgtctttaatcccaaagctaagtagataatggaagtagttcatgaaggcaaatgcggggaccatactgggactcccaacctatctaaaaagaccctaagataaggatatttctgacccacaatgaagaaaggttgcattgactaagtccgcaagtgcgacccacgctaaagatttgcaaacatcctgagggcccctccaaataaaaatcacattgatgacaagcccttgctcattttcagtatggggcattgatctaatcgagtccctcccgatgggaggaggcggagtcaaacatgctatagtcgcagtggactatttcacaaaatatatagaagaagagccaatgaattcaatcactgtaaagaaaaccttagactttacggtaaaaaaaacattgtatgtcgatacagaccaccccacaagatagtctcggacaatgacaagcaatttgatagtgatatattcaaagaattctgcgaaaaatatatggagtcgtaaaaagcttctccgcggtttcaagaccacaagcaaatggtcaagcagaagttatgaataagatattacaagtcacactaaaattgaaactcctggcctgcaaaaattactgcatgaagaattgccacgagtactctaggcatacagaactaatgccttgaccaccactgggcactcttcatttttaatggtatacggatgtgaagcaatggtccaagtagagagtaccattccctccctcagaaggactaactatgatccatccaccaattaagcattgttgcaaggatcaccggatgtcgtagaagaactctgagaagagtcacaaatttgtctgactgcataccaaaggaaagtggcaaaacactttaattctaaagtgaaatttttttccataagagacctagtcttaagaaagatctttcatgcctcacaagacctcagagtgggggtgttaggcccaaattaggaaggaccttataacattgaagataaaataaggctctgaaacgtacaaggttaaatagcatggatggatggatccctaatcccgtaaagcatagaatgctgatcatctctgcaaatactatcaattcctggtaaaataacttccaactccaagaacttttgtaatataatatcctttcaagtttatgcaaagtgacaaaaagttatcaaactatttagtcacttgggaggtagtaggacataaagcataaataactcaaaatatattgctcacaaggctaaaatgtcaagaaaagagcatctataagaaaagaatatatacataaaaaaaagagccttggggacaggctaataaagtgtctcccatgatgtaggaaacaaaaaaagaaagcctcggggataggctaataagaagtttccccaacatacaaaaattaaaaagttttcaaaaaatttctagataagtggcaagtttgtgagctctaaaaggaaggcaaggacctaaggtctcggcaagcttggcatctagcttcttgttcttctcccaggaacgggtcagaacagcctcatgattaggtaagaagtgaagtttgggctcaaatttgttggacctccaacagatgaatacaccatgctcaaaacgcttcacacactggtcactagtgaccggggctgcaagagacttttcggtagctttcacagcctcttgtttagtattctccttgaaattacgaagctccttgagctccgcagacatgatggcagccttctagatatctgttttatggagttcttcaagttttctcaccttgtcctaaagctccttgatatcctcctaagcagtatgcaagtccgcctgggctgtctttagtgactccccaaccactcgctggtcctgttccctcaaggccttttccaccaagacctcatccttaagagcctcctcccacttgttcggctccttgagcttctttaaggccttatcgatgccaccatgcttagctgcaacaaatccttgatcaatcaaggtcttcgacaagcgaccaactttagcagcgatctggtcaaattcatacatcaagattagtgaaatgaagaagcaaataaataaaagacaaaatgagtaaggacttactgaggtcatagccatgctcacatcctgaatttggtagattgggttggcggaggcaaaaataacaaaacctcttggttgggagctgaaccaggtcagaagaaaaatggcccaccatttcagaagcaaatggagctaagaaagatcccaggaagttggagaatgaattagtcatcgggtcaaggtcagtactcccctcagagtggaccatcctggttctctatcaatcattttcccaaagcctccgcctcgacgttccctttagtttgttcatcaacaacatagtcatcaggatggacaagattttgtaggatagacaggacacctgggaaggaataagcttcgaaagagactcccaaatctccagtactctgaaaaggcattttggctgtcttagcttcttcgaggatgtagagtcatcaacctcattcttctccttgcgctctaatggacctgcttcatcttcatcgtctacgcatacgatctctgaattagaagccccaaccatgcttggacattcgggagtcattatgaccttcgagaagtcaacatgtggaatgatgtcgccttttgcgggacttagagcatctgaggaggcaaagatgtcgtctgttggctcagctgtagaaagaaatggaagaaacataaggaacacttacaaaaaatcacaaagataaagacatgaaaaaagaactaatcctacccagacggtctaattttgctctagcaaactcatgaataatgttgttggtgtcttcatctccaaaaaaaattatctgaagggagaaaccaactcgaagtaacgtagcaaggacttgactcatttaggcatgaaatgacttagatttgtgcataaagtcaaaatggcataaaacccc

SEQ ID NO: 296107 - DNA, 9591 bp, Cannabis indica
agaaaaacataaaaaaaaaaaaaggccaacaaaagacaataataataataatgtggaatttttttttggaataataataataatgtgaaattattaatatacattacttttttgttgttgctatatttggaaataaatacatttctaaatattaatgaaagatggctttagcattaattagactttattacctttatttagtgctttaaatttgtagtgacatgctaatctgacttatatttattcgtgttttttaaaatataggtcgtatcatcatgtcatatcaatattttaaaagataggtctgacacaactcgtaagtgtaatattttcttactgtgttcaaatttatgtcatattttacttgtgctggctcatttttcttaaacatgtcaacccgtttttatattttttttataattactaaactatatatttattttataacttcacttatatttatataatttttaagataatcatataaaaaattattagtataattagaatttaaatatttcttcataaatatttaaatttttatatcactgtaaataaattaatttataattttaattttacatgttgtagtaattttaattatagaattataatatttaattttaattttaatattattttaagttatttataattgataaatatctatctatctaataataataataaattatagaattgtttatatgtcgtgtcgtattttttggctattctatttgtgtttatgtgtcatgtttttcgtacttctcttgtcgtatcgtgtttacgtacatatttttcttgtagtatcgtgccaatttatagcttcatgtcatatcatgcctaaatgtatactttttgtacttaatcatgctcatgccttctaagttcgtgtcgtgtgaaaaaacactgctcttttttacaacactactttccatgctctattgaaaataattgcattttccatgtgcaaatagaagtgactgtgaaaggaaattagagatgttgatgcacaagcaatttcattaaataaataaaaatacacaaattttacagtactgtaattctatacattgtatgtttgggttggtgaaactaaatgaacactaaaaaatgaaacaataataatctaataatttttactaaagattaattgattatgtgctatgtaagttaaagatttccttaaaaaaataacaatttctttttcttttagtaggaaaaataattccacaaagctcaagccaaaaagacattattttggtatttatgtggccttctattaatgactccattgttatatatatgtaaaaaagaaaggaatcccactaagttagcaatggttctttactaaaaaaattacatgaaatccccatcatctctatttaaaagtctatttcaactaatacatataatattaatactaacctaacattctcactactaaagcaaaacttttaactcttcaacattctttacttgagtactcttcattaaccttttcattagattcttattcatttacttggcaaaggtttagaaatctgatctgtaaagctacctatatacttgtagagaaatcattccttccaaaaccaaatatggaatggttcttcttctgtccaagagacagaaaaaaatacccgaatggcacaagaacaaaccgagctactaaagctggccacgaggaaagacaggaaagttcatgtgtcaatctattgtggacgcgctcctttaggagaccgaacagattggatcatgcacgagtatcgcctctcagtcaaactgttttcacttcatattaacttgtttagctcagaaaactgatggaaataggctgcggggtgcctatgcattgtgtcgagttgtgaaaaagaattaggatggacagaagcttaacgattgccttcgagaactgaaaggcaagaagattggaagtagctcaagttataaactctggtgaggctttatctcatgccagttgctagcacaacatactcaagtccagaacaaagtcaaataaaattacatattctattgcttcttgagaagagtcaaaacctgattgatgagctataatgatcatttctgtcttcccaatttttttcaataagaatttaaactatatagagggagtgatgttaacagggctaaggaaacttagaaagagaagaagcacaaataaagccttattttcttccttgggagaccctataaccaatgcccagtacctcagatatgtagcatcacatgcttcatttcaaacctaacattacacacattaagacagagaatgacatagcttgagatgaaataaataaattatgacagagacattaactctatcaagtcaagcaaagattgctggaattctattgaacttgcttaaaattacaatctcccaaagcttttgagaggcttggtctctccaagattaaccttgacaaaatcaatcaagatttctctcccaataacaaggtttagctattcatacaataatctctaggctaaaactaacagcaactaactaattcctcctcctccaaagataactacaatccattctaacaaaactataatattatgtctaacaagttgttgttctaaccagacacttgtgtaaaaaagcagtgaaggcactacaaaccttaccaacttagggccttctttataatcatatgatagcgccgctgctgccaatgcatccatgctgttataaactggaagatgtcccttgaaagaaacccagagttattttaaacaataagtccatatatatagttccttaccttgacaggcattcttggagggttgtttaaaacaagaataccataatcacttataatgcagataagtttttctcaattacaaattcttaactaggaattcagctaagacatgccttttagtaaacaagtcttgcaagtaagctatctcatcagcatttaggaatagtaacaaatcttctggaaatcctagtctcttcaactgaaataggtacataaactctggtcccttcttccatgacatcattgagctttatctctgtagttcattaagtttttgtagagccaaaataagaatgcatcacaccaaacttttcataataaaataaactaaaccaatgtgatcaattctcttccttcctcattgtgtttgcatttccatccttatcactcaaggagtcaccgaaatatgagcactttaccaggacctaaactgaaaaaaattataaaaataatcataacccaatgattatacatccaaaacctcaacaattatggagaagcctgacctgggacaacaaaattttcagttaaaaaatcaaatattccaaataaaactacaatattttcgataaaaagatatatgtatggataaagatatgaaactcacagaacccttgttgaaatgggattgaacagcattctcaagaagctcatcaaagtaatacttgtcccagctaacagcgacgacatttgggaatcgccccgaaaaggtaactgagtttttccatgacaacttcttctatcttagaaacctaaatgaatcccaccaaatcgcagaagcaaaaaagaaatacaaataaaataatattgtttacaatcttacaaacctaccatcaaatactaccatacatcataattatctacatacatatttatgttaaacaatttttgttcaaggtgtacccacaatgaaaatagtattttcataccaaattgtacattccaaaaattagaaagagtatattaccgtagtatatacatagaaccaaattaaaataatgaagtacagctgtgcacatggcatatagcaatggccagctgaatactaaatggtttatcattacttcaataaagactaacattaattgaaggtaatgaatacaagaagagcttttttaaatgtttctttgattgtaaaacaatcatcccatcaacaatcaccaccacttatcactattattgagtgtttacaaagaatttcctaacatcaatatttttgcacaacacacttcaaaaataagctaataaatgtgtgccatatctggtattctaaattattgtagcttatactgattaaggttaagataaataccaataaaaagctaaaacaaattacacaaaaaattatgaaaatagagtaagacagagagagactcaaggaaacaatatagtttgattagggatttgaatagaaaagatacaaagccaaaataaattggagaaaagaataacattttaaggataacaattccccactattgctactaattacacaaacaaatagcccacacctaataatacaaatgtaaatcccctcaacactaccctttgcttcaaaaaaattatgcctgaaaaaaagaaaaagcactgaaaataaatattacacacaccaactcttcttcatcttcttcttcttctgtttcttcttccgtgtattcctcttcttacttgttcttcttcattctcattaagtataataattaattaagaaataaataataataataaaaaatgaatctttttgttctgttaccagaaatttcctaaatctactaaaatttgcagaacaaggttttagaacatggagataaagtttcaatttttagcgacagcattttgagataagaactaagaaaataatgaggaaaacaattgaagagaggccaatggccacaccaagaacatacttgtttgggccacgatgatggtcttttcgagttgtatcatcagaactactgtcgtcgtcgtaatcactgctatcatcttctgatgaatcttttgccggaggtggagacaaagggaacccgtgtttatcacagggagaaattcccaacttcattttcgatgacagaatcgatttattgtagcagagattatcgtttccaccgactttgaaaacatccaatctacttataaacgatgcattgaacggcattaccccacggaagttgttgttagctagattcaagtgctttaatgtcttcattgctgtgaagtatctgggaatggttccgttgagctgatttgagctcagatcaatgtgaaccaaactaggtattgccgaaaacgaatcaggaactgccccagacaacgagttcgaagccaaggagagatttttaagcgagattaggtcaccaatcgtatcgggtatttctccagtcaatgtattagaagaaagattcaagatcagaagattttccaagcgactaatcgtactaggtattcttcccctaagcttattacctgaaaaatcgatgtgagtaagattcggattcatgtgcctcggaaaaaaaccagtcaaattcgcatttgagacagtcacagacttaatcttcttcatgtttccaagaatcacaaaagggccacttgcgttaacctgagtattcgaaaccgttagatcggtaaggttttgaagtcgagataaccatacgcctgttaatctccggagacttcttatacacgtgaaggaacggagagactcggtcagctcggccgggaagctaatcggggcaatggggcagttaacgaactgtagagactgaagagtggaaagggatttgagagcagtgaaggacaaagcgacgtcgtctgagcagttgaggagtcgaagtgagataaggtggctgaatggcttggatgagtcgcattgagtgatgttgttcttttggagcagtgaagtgggatgtgtgcagggatctttagatgtgggaatgttgagagattggagagctctgagctgttttgggtcgagagctgaagaaggagtagaaggggttgaagatggaggaagaggaggagaggaggaggcgttcttggttgtcggagaagaaacaggcgccggagttggagaaacgacgacgggaactcctcgaggtggagtagctgagaaggttttgatggagagaagaagtaggagaatgagtaacaatggcggtttttgctggtccattgatgaaatgagagaatgagaaaacagagaaagaaaggttttgagtgtacggacttgactttgactaccgttatggattctgatgcagtgagctgtgggaagaagaagaagaagagagttgaaaggaaaaggaagacttggacgacgtcgtatatctcaattacttttataccctttactttttcatttaataaaaaaaactcttatatattagaggcatcatcatctctattggaatggtcaaaaaaaaatattatttcacaaatacacagaaacaataaaaataattacaaaaatatggtttaattgaattttaaataattttatgattttttttattttatttacagaaaatacagtctttttatgttgtactcttgttaaatttttgttatttatttgttaacttttattgttgttttgatgttattttcttattacttttatatagttttcttgttgttttcgttttgtatttataaaaaattataaaaatataaaaaaaaaaatcttaaaatgtagaaatgtaattttttttttttttacaaaaaattgtattttatgtagttatttctttaaaaaatagttgattacatagatatatttttagtatttataataaaggtttattattatggtatttttattaataagtaatagtaatcaagggtgtttcagtctttttttgttaatttagctgtttaaatattatttaatctattgtgaattaaatattaattttcttgtattaattttgtagtttatttttctctaaatgtttgatttcggttttactgtatatagtaaatcaaataaactttatttgacaggttttgaagatcaactcgtgatcttggtctttttttaaaagttttctaatttggagcaacaaaatctgaatttaatgctgcaaatcaaggactttttttaagaaagtcttgtacaactttaaaaatgtgtttatggttgtctctaaggtttttatgttctataaatggaacatagaaagcagtcaaatggtcttgtacaactttaaaaatgtgtttgtggttgtctctaaggtttttatgttctataaataggacttaaagagtagtcaaatgttcctcatatcttctagtctcattatttttatatctatctttgtgagaattagagttttcatatgtaaaaaacctagagtgttcaactaggttttggttttctttgttatgatatcgtattattcatagaatacgttgaaaagaagctttgatcaagtgtgagtcttcaggagaaaacttttccaagtctcatttcgggaagaattgaacatatatcttcgggagaaaatttctttaaactcttacttcgagaaaaagtaagcacacatcaatagctaaagagagttcactacttggtgtggttcagaaatcaaattagcaatgtagattgcaaagagttagcggaaaatctattagagtagagtactaaaaatttatttaagtcaattgcgtttgtaatctttgatactttactaattgatttaattctctgtgtgtggccttgtagattagtagtgtttgaaagaacactgatatcacgtacaattctcttgtgtcaagttttaaattttgtacaatttatttctgtttctgcaagtcattacagtcacattttatttacagtttttaaaaaagtatatcggcatatgcaaaaacatgatatttcaaatgacaaaatagtcattctcttacatttgtctacttactttattaaaattaagaaatggtgaacttgattaaataagggataaaagacaaagaatagttttcccactaatttttttaaggaatgccattaaagttaatgacttttatttatttttattttatttttaaatgttaaatatataatgacaattttatcctttaaaatacatattataaaataaatatcatatattatagtttaattcaaaagattaatttagttaattcaagcattccgattctatttcttgataaaataactaaaataaatcattattattctatttccaaacaatcctaataaacaacatgttacaaatattaattgtgattattctttatttattctaatatatttctctattaaattattctcatttatgaatattgtgtagtaaacatgtcaaagtaaaaaaaaattaccaagaaataatgttattctatcatttatatcttctctttcttattttttttattattattttgtggtaaaataagaaaatctaattatttaatatatatatatatgctaaataattatatagtattattttaataatttttagaggtttttactattggaatattttagagcaaaaagtaccaaaattaatgtggaaaagagataaaatacaatattatatttttaggtgatgtgcaactgtgtcaaccaccacaagagatgacataccacaattggtacaatttaatatcagatctcacatattttaatttaataaaaaatataaaaaatcgctgaccactcacaacgtgtcatattagtatgaagttaggcgccataagggggacaactaaaggggcaatggtgcccattttagaatctttttagtaactctctcttctctcttttgccacgtaatacaatatgacccactattttttggaggtaaataccattttagactctgtgttttgcaaaagttaccaattagactctctgttttgttaatgataaaatggaccatgtattttcaaaatggtaaaaataggacaatgaacttaatttttgacaactctttttttttaatttaaccaacttgaagataattcctaacgcgaacagatacagaaaatgtaaacaattttgtcataacacctttagatcggattattattaagttttattttgataaaaaatcagttcagggtcctaattgtaccattttagaaaatatagggtctattttgtcatttaacaaaaacaaaaggtccaattggtaacttttgcaaaacacagggtctaaaatggtacatccattggagttggtctaatagcaatgctcatattataatgtacgattttgtccccccgacttttttaggacattaaaaatttcttttgaactattgggattattggatttaaagatttttaattttactaatggacgcctaacgtggatgaaaattcaatggcacgatttggtacatcacgtacaagtcaaagtctggggtacaatttggtatatagagattcgtcacgttattaaaattgaacagaattgaatagaagttcttaaatctaatagttcaggagaattttaatgatctgtaaagttttggagaattttaatggtctatgaaatttgagagcatgatttggtaaatgtcaaaattcgaaagacaaaaattctaattagcctattaaaattcaacaagtctatttagaaggaaatttgtcaaattaacactatatgaaattttaaaatttataaaataactacattgaatttatattatcataatgtcgtacattgtaaatatatgatcataaaaataattattatgatctgatcattttataatcgcacaatgaattttttatcgttaatgcactaaacgttatgtttttttttttttg

SEQ ID NO: 296108 - DNA, 1316 bp, Cannabis indica
tgcttcattagaattaatatttttaaacggttgtaatggtgtgtaaatagagttacttttcacataattgtgtgttatgtttgtgtgtgtgttcatatcattactgtgtaaatatatatatatgtgtgtgtgcctatagttatttttgtatagcactaattcgatatatttccttatttcgattttcctaataaacatatgaggtaagatcatcctaaaacagtaccctacaatgtcaaatgtgtctaaattaagtttgcatttctcagcgaagagaatcaacttaatcttgggtaattcctatgcgtgcatgccatgtttagatctaaaataaagtatccacttacagctattaattagtaacaatagaaatcggccagcttctgaaatcggccagcttctgtttttcttctaattatactaaatttaattattattttttacaaaatgttttgaacttttaacttaatcacaggtggtcaattatagctgctcacctgccaggaaggactgataatgatatcaagaactattggaacacaaagctcaaaaagaaactcatgggtttggcacctcaaatttctcagagaaaagttccactagtaccatttcctaattcttctcatgagatccttactacttccatttataatattgaacctctacttcctataccgtcactttataggcctttttcttcaggcttagaagatcaaaagttaaataggatgttgtcttcctcttatccaaaaatcccacctagtgctactacttcatttaattttcaaactcaaatgccagagaagtatttggttgctactgctactaaaactacaaataatgataatgatactgatagtagccctatctcattctcatataactgtatccctgtgaaggataacaatattctttctttcggaagtaatcaaggaagaagctgtagtagttcatctgatgggagctgcaacaagctgattagctatggtggctgtaaactcaagcaagaggaactacaaatggcttttcatcatcaacaaccatataacattaatatgggtaattttaataatgtttttcaagaacagatgataatcaactatgacgataataatctgacctgggctgctcaaaagccaaatgggtattttggagagagctcattagagaaatattcatgcggtcttgatcaagatcatgatgttaagcagctaattagtagtagtattaataataataataataataataataataataattttattaattttgatgaaaaaaagacacaggacaaggtcatgtacttctactaa

SEQ ID NO: 296109 - DNA, 3214 bp, Cannabis indica
acaaatgaaaccctaaactgattttttgtcaaaataaaacttaataataatatgatctagagatgttatggcaaaacaggttacatattatgtatctgttcgcgttataaattatcttaaagttggttaaattagaaaataaaattgttgaaaactgagctcagggtcctatttttaccattttggaaaatttaaggttcattttgtcatttaacaaaatagaatgtccaattagtaacttttgcaaaacacggggtctcaaatagcatttaccattttttctaactcatgtatatatatatttttaatttttttctaagaaaacttcatataattttttattttaatttttttgtcataattaaaatataatatatttttatttgataggtatattttttaaaaatatgaattggaaaaaaaaataaaaaaaacttagtacaattaaagatataaattttatataaaataaaaattattaaaatagggggtctttaagaatttttggggtgtaaataaaatttttctttttaaactgtaatttttttcctaatttcgtcagatattctgttattttcttaaataaggctcatatataaggtctaaaatttaacttattctggatgaaaacatttaatattagttacttttaaatcttcttttaataaatttaaaataaaatttgtactgtcgaactcaaaacttttagtacttatgtgactatttatccttagagcatttctaatagagtgttaaatcggtggtgtattgttagtttttagcacttctcaataagaagcttctccaatagtgtgtcataagttatgccaattttttttttttgattaaacgtgcccaaaatagcaccaaacgatacaaacagagttcggaagaactaaataaagcagaacaagagactaaagagaataactaccacaaactaaaagaaaccagaaaataaaaactacaaacaaccatctttcatcccacccgacaagaaactgtcaaaattgggcaatccaactctaccaaagatgttagttcggactgcccattgcgccacatcatgggccacaccgttaagttttcgaggtatccaattgatctcccataggtcaagcttagatgttagatcttggaattttgtaactagctcctgaacgttatggttcagcgttgatatactttgattgttgcacttcacggcatcaaccgcccctacagaatcactctggaaaatcaccattttgagcccaagttgaaccgcagcttccacaccccaacagagagaggctatttctccagccaaggaatccctataaaagagttttgttgtaaaaacactgtttatagtgccctgttcatctcggattacagcagcaccagctgatcctcggttaccaatagccacatcagtgttgcacatcctccaattgttaggtgggggcaaccattcaggttgaagagaaagttgagcgttctgcttctcatccaactttgctaacctgccattgatgttgtgtacaataatattaattggtgttaaagtgttcttgtgcacaacaaaattccttaaataccatattctttccatgataatagctgccccttccaggatagtgtcaaagttgaggttcaaaggtcttttatccttctgcttgaaccggtttatccattgctcccaatctgtgacttgggtcagagttgttttgatattccagttgcttccaaaccaaacggctctggccacttgacgatcccaaaacaggtgaaaggagtcttctattgccattgagcaaagagggcagtggggatccgagaggccataggctttgagaattttgtttcttgtgaggagacagtcggatagcactctccaccacatcatttttgctctgctatgcatttttgcaccccagattagacgccatttctcattagcgttcgaatttggcccgatattcttggtaatcctataggcagacttgatgctgaattggccattcgcttcaggcagccagagccacgaatctttcccaggaatgtttggcaatgttatgttaagaattctaatggcatcttcctatttaaaccagtggctcaccaattcttcattccatccattatcccgaataaagtttttgaccatactgattccctccgttgcgtctttcagcggttcaggttgtaaatctcctacggggacccaagggtggaaccaaatggatgtatcctccccatttctaatttttctacagattcctttatgaatatattgccttgcattgagaattgctttccacatggttgagtccgaaggttgagcttcaatatcaaggaaatcgttgtttctcatatatttggcattcataatctggacccagagactgttgtcctccaccagtagtttccaagcccacttcattaaaaatgccatattagtgtcttttgtagtcctgaagcccaagcctccatggatctttggcttgtagagcctttcccatgcgattgtatgcataaccctcttctcttctgtatcaccccaccagaaatcccttaaggttttgtctattttatttgcagtagaggcagggatagcatcagatgaagctaagtagtttgccaaagaggatccaacggatttgattaagcatgctctgcccgcattggatagaagttttgttttccatcctttgactcgtcccaagactttctcaacgagttgagtataatcttctgatcgtcttgtggccttgaataaggggatacccaaatagattgcatcggttggcattcttttcatgcctaagaattgtgttatcgcttgaatttttccacggcagacccctttcgagaagtgaatagatgacttctgagcatttatggattggacagaccatagacaatatttagaaagacaatccttaaacgtttttgcccccttgagcgttgcttgcccgaataaaatgatatcatccgcgaacattaaatggttcactgcagttccatttcttcccatcttgaaacctttgattgcacccgacttctccttaatgaaaatgagtcttgagagcgtctccgccgttgtgatgaatagcgttggggataaaggatcgccttgccgtagaccccgctctggtttgactctcccttcaattgagccattgagaagtaacttgatttccttggtggatatacaagcccttatccaact

SEQ ID NO: 296110 - DNA, 2106 bp, Cannabis indica
tgtaaatctttaaaaataaaatacattcaaaatcttaaataaaactagcaatacgtggctcggcacgtacattcacctagtatatataaatatatatatctaatgacttgggcttctcggaaaacagaaaacacctccataacattaattagttctctaaccaaccattatggaacctgaagaaggtagtgttcgacggggaaagccagccctgaaacccatagaaactgaaaccagagaaatgaaaggaagagattacagtactgatcatcaaaaaagcaggaacgacgtcgtttttggagaagaagaagaagaagaggcagtgagtccaggaggtcgtatgttccacgagccaaacttcaacgttcatgttctagcaatcatggggtccaagttcaaaatccaattagatgttgctaaggccaacttgcctattactctcctcaaacaccctcgcttctccagtttgctggtaattcgttaaatattaatttatatattttttaaacttgtttgttttaattactttattatttaataatgatattttcaaggttgtggaagagaaaaatagagtgaagagtatgaaatgggttagaacagaggttgacgtggacaaccacctcatagttgctgaaattgatccaaacatgaaaatatctccagacgagttcgtggaaaattacatttataacctcacgaaaaccagccttgacatgtccaaaccactctgggaggtccacatcatcaacctgaagacctcggacgctgaaggagtagtcattttcaggatccaccactcgctgggggatggcacgtcactcatgtctctcctcttggcctgtacacgtcagacggcggaccccactgcccttccgacccttccgacggcgaagaggaggaaagatgagatcaagggtggtggtggtggtggttttatcagaagctattcgcagtgctgcttctggggtgtttggtggtctcttcagttgctttggaatacttttgttgatgttgtcgtttttatggctacgacgtcgtttttgaaagatacagatactcctgtttcgggtcattcttggagtgttaggaatccacgtcggattgtttataagacggtctctttggacgatatgaagttgataaagaacgcaatgaacatggtaataataataataatgagaataataaattactgaaccgatcttatattttcatttttaagatattaattagttttattatgttatctttcatctctctctgtctgatgtctaatcagaattcttatttcttataattagatttaacactcttttacttataactatttttcctcatctacttaatttgcaattaattaaatatagaataattatgattttacttattgtaataataataataataataataatcataataatatatttaatttttttgtagacttctatatatactgtaatataatataatattgtttcaaaaagaatatatatatatataatatagtattatataatctataaatacgtaggtgactacattaatgtgactctgtatggaatgcattaattttcagaccataaacgatgttgccttgggaatcactcaggctgcgttatcaaagtatctcaacagaaaatacggtacgcgtggctttatcattaattgctatttagtttgttctcgactttttcactgaaattcagagtagagtaggtgtaggtcccatcattgctatttagaactcttcaaacatttgtgattatattctttcatctctcaccttttgatattgaatcgtattatttttaatcatcgcgtttcaacttgtttttttaactcgtgtttaattatctcaaccttaacccgatccataaaaaattgtatcgtgttcgtgttgacctactgtaacccattttactattattgaagctagaattgtagagaaaaataataaatttaaaatatttttaatttcatattaaaataataaatttaaaatatttttaatttcatattaaaaaattaatttaaatttttaatataatattgaatcactaatatatatatttttatataattattattaatattaatttt

SEQ ID NO: 296111 - DNA, 2634 bp, Cannabis indica
taaaattagacaaaagtccttacatttaacaatcttaatagtgcagcggaaatttttaacggtcaaaaaagtttagagagcatgatttagtacatgttaaagttcatggagaaaaattactaattagccaaaaaaaaaaaggagagagcttcacttattgtatatttttggcatacatgtaaaagttctagaaacattcatttgggctgcctaagtctaaagcccaagcccaagcccaagcccagcccaaacctaacatcatcacattctcgaatctcaacctctctccgagtctcagatctctcaaaagccaccaccgcaccaccatagccatactcgcacacgagccaacgcctatagaaagcggaccacaccatcccgccggcgctatcttccgccaccacggtccaccggagaagcttacagtaggtatgttccaagaattttggtctgccctaaatttccccattgattttgtttttggtcatagacattccataatgtagtcgtgaatgtgttcagtgattaaatttatcaaaattgtttgtttagtcttaccgaaataatctggatttgaagtaaatatggcctttaaattttgatatagaacaaaatcaacaaccattgaaacataatgaaacttgaaaagtttaagccaaatcaaatgaagtaatgttgattagctaagtctagaaatcatgaacaaactactgcttatttatgattatattgccctttgaaaagtcttgctcaaagaattttcacctaatagatgggttggctaagtttgttcataaagcttgatattccaattaattagggtttctgattcagattcagatttaattatactctgattgtatttgaatatatttgaagctaattgaaccgatcatatcaaattatatcttattctaagcaaagtgaattctgatggggaagaacgattttctgacgcctaaagcaattgccaaccgaatcaaagccaaaggccttcagaagctgcgatggtactgccagatgtgtcagaagcaatgtcgggatgagaatgggttcaagtgccattgtatgagtgagggccaccaacgccagatgcaggtcttcggccaaaaccctactcgaattatcgatgggtactctgaagagttcgagagtacttttctcgagcacatgaagcgcagccaccggtttagccgtgtggctgccacagtagtttacaatgagtacatcaacgacaggcaccacgttcatatgaattccaccgagtgggctacgctcacggattttgtcaagtacttgggccgaactgggaagtgcaaggtcgaggaaacggccaagggttggtttatgacttatattgatagagattcagagacccttttcaaggagaagttgaagaacaaaaggattaaagcagatttggtggaggaagagaaacaagagagggagataaagaaacagattgaaagggctgagcaattaatgcctatggcaaatgtcttggatcagtctcaggagcttgagccaaaaaaggaactgaaattggagagcggggttaagattggtttcgcgctgggatcatcctcgttgaagattgtaagcaaggagaaggcagagagctcgaaaatggtgtttgatgagttggagagcgaaaagggtaacaagggcgagaagagaaaagctgatgggagcagctcaacgaaatcagcattggaagaactgatgagggaggaggagaagaagaaggagaagattaacagaaaggattattggttatgtgaaggaatcattgttaaggttatgagtaaagccttagctgagaaagggtattataagcaaaaaggggttgtaagaaaagttattgataaatatgttggggaaattgaaatgcttgatagcaaacatgtgttgagaattgatcaggaagagctagagacagtgattccacaaattggaggacttattagggttgtgaatggcgcataccgtggatcgaatgcgaggctgttagctgtggatactgataagttttgtgctaaggtgcagatagagaagggtgtgtacgatggtagagtacttaaagctgttgagtatgaagatatatgtaaaattgttcagtaaggttgaaattaaatttgttataaaattgaaattgtgtcttattttgaagaagatttaattataaagtttgatattccatatcaaatacaatttaaaattagttttaatcaattaaggggctgattttgaatccatctttaagattggaaaacataaaattattgtttagtagattgcttttaaaaataaaattcaaatcagtattctaatttgattggtaattaacacaagcacaagatatattactaacagggtaacaatttaggcatgataacactaaatgaaattgattgtaagttagggtcattaaacatagatgtgagttgaatctgaatgatactacatagcactaatagagtaatttaaaaataatgtacgaaatgattcttctaaaaataaattattgtcataatatttttatttaataaatggtaaaaaaatcacaatttatagttttatttttaaaattaaaaataaaattaattacaaaatatatatttttatttttctaaa

SEQ ID NO: 296112 - DNA, 5244 bp, Cannabis indica
ggccctttactttgttgggccctgagcatttgctcagcttgcacaggcttaggaccgggcctggtgatacgtttgagaaaaaatattttggatacagttgtaaactttaaacggaatcccaaatattatgtaaagttatatatttattatagttaaagtttaattttaaagtttgaatttgtcattgttttttaagaaactctttgattaacagaagcatgcaaagtaattagaaatttctataacgtgcctaagcaaataggcattacaaatatgtttaaaataatttacttgtttttttttatgtgttcatgttaattgtatgtaatttgatggttttatatttatgcatgtttctttgaacaatatttttcttaggcttgttttagtctttaaaatattttagaggctattattggttgagaaaatgactaaaagcacctattagtgcatgccccctaggatagcctttaagtcccgcgcatgcgtctctggtgtctccatctcatggtgcaaatgtagttcatggtccatatggttattggtaaccatatatatttttttttttgttaccaaccaataactaatgctattttttattatttttggctaaaattttatttttaattaaaaaaattagataaaatttttgaaaaactatatgtagaaggtagataccttgagaaacaaaaatggcagaagccagagcaatgaaagtaaaacataacaaacagaggagaattgaacaaggagccttactcaagtgagtagctcaatcctttatttatactgcataaagagatacaagtggataacagaaaatcagaaaaatacaagtagttataactaactaacaatatatctgtcaaataatagtgtcaagaatgtgtttaacatcccccctcaaacgaaaaggtgtttcagccatcttgagtttggacctgagatacaaaaaccgttctgttgacagagacttagttagaacatcagctatttgatccacagctgggacatatcggacagagagctgtttggacataatgtgttctcgaacaaaatgtaaatcgatctcaatgtgcttagatcgagcatgaaaaactgggttagctgtaatagcagccgcactttggttgtcaacccaaagtattggacattgagaggtggagtactgaagttcagaaagaagggacatcaaccatttaatctctgcagcagtgttggcaagtgatctgaactcactctcagtactagaacgagcaacaacatgttgtttttttgcagaccaagagactaaattaccaccaaagaacatagcatagcctccaatactttttctgtcatccaaacatgatgcccaatcggcatccgaatatccttggagattaagagaatcagctggtgtaatgtgtaggccatgagaaattgtgcccttgagatatctcatcagttttttacaagcttccaaatgggaagttgttggtgcgtgaataaattggcttaatttgtttattatgaaagccacatccggccttgtcaaggtcaaatattgaagagcaccgagggtgcttcgatacaaagttgtatcctgaaatggttctccctctttcagtgatagtttgacagaggcactagagggattaggacttggtttagctccttccatgttgagtttaactagtaaatccgtgatatacttagtttgtgagaggtacatcccatttgaattgcgacagatttcaacacctaaaaagtagtgaacattgcccaagtccttcacagagaaggtgtgattgagatcctgaattagttggttgatgagagaggagtttggccctgtaataagaaaatcatccacatataccagcaagattataagagactgaccagacccgtaggtgaataaagagttgtcaaaccttgaaattttaaaccctctctgaaccaaggtatctttcaacttctgattccaagcccgtggtgtttgttttaatccgtaaagtgctttgtgaagctgacaaacatgagtgggtttagaactatcaataaagccctccggtggcatcatatacacagtttcttctaaattcccattcaagaaagtattgctaacatccatttgtttaacaatccaattgaaggagacagcaagagtgaggattgttcgaactgttgctggtttaacaactggagagaatgtttcctcataatcaatgccgggtgtttcaagataaccttttgccacaagttgagatttcaatctgtctaaggtgccatcagcattaagtttaaccttatggacccatttgttaccaataacagtcataccaggtgagaagggcaccaatgtccaagtaccagccttttttaaggcagtaaactcagtgtccatggagtttagccactgtgggtttttaagagcaacagcagtatttttggttcagaaggaatgagggcagagggcaatggatattttgtggctaagtaggattttggtttgacaatgccatttagagatctagtagtcatatggtgtgttctggtgacagggttgggattggtgggaacaatggtagaaggtgagcttgtagattgtgttggaagggcaacaggaggagcatctggggtgggattaatggtggctgctggacattggtgcaagtagcagtggagttgtttgggagagcaatattaattggaatatttggtggtatgacagtatgatgtggctgttgtgctgctggtgtgctgtcatttattgcagcaggatgagtgtcctcgggttgtagtggcattgaagcattgttgacagaaggaacaatatgattagtgtccacataagaattagtggaaaatgtagaagtaggataaggatgagactcatttaccttgagtggagtagcaacagtaggtgaaccaggaaagtgggactcatcaaataccacatgtcgtgttataaacactttgccattaggatgctcacaaatgtatcctttgtgatgtgtagaatatcccaagaataaacattgatcagatctaagctccaatttatgtgagttgtaagcccttaaatgaggatagcagctgcacccaaaaatctttaaaaggctcagaccaggcttctttgaaaaaagacactcatagggactcacattctgcagaacaggtgttggtaaccgattaatagtgaacacagctgtggccatggcatgccaccaatattccattccaagtccagcttgtgctaataaagtcaacccggtttcagttatatgtcgatgtttgcgctcagcccttccattttgttcacttgttctaggacaagggtgctgaaaatgaatgccttggtcagacaaaaatcgagcaaatggtctatactcacctccccaatcagcttgaacactcttaatgggcaactgaaattgtttctcaactagacttttccatttaatgaaagtgtcaaaggcttggctttgttgtgtcaaaggaaatatccaaaaatacctactataatcatctaggaagtgaacatagtatttaaacccttccttggatgttatgtgggatggaccccataaatctgtatgaatgagagccaagggctgagtagctctactgtgagaaataggaaagggtaatttgtgacttttgccttgatgacaagctttgcaaaattgcaaattgttgagtgatccagtgtgtgatatattaggcaaaagttttgctaaggtgctgttggctggatggccaagcttacaatgccaactattaatatcaagagatttagaagcagtgaaaacttgataaggggactgagacaaagtggaattactggtattattatcattcacttcttgaaaattacaagcagtaggtgtgttacattgacacatacaatgagttacagaattattagacccagtggtaagattacactcaatcgatgaactgggatggtcaccaagctggtaaagaccgtctttagctttgcccttgagaagcacagtccctgtgagtttgtccttgacaaaacaacaggatttgtgaaattcaagaaacacatcgttatcagttgttagttgagaaacactaataaggtttttacgcatagaagggacatgaagaatggaatttagatgtaaagattgagtgtccataagagaggggagtttagaatgaccaatgctagaaatgaccaatttcttaccattgccaactgccatggtttcatttcctttgtagggtgcagcaatgtcaagatgggcagaatcattgacaacatgattcgtggctcctgtgtccacgtaccatgattcatcatcaccatgctcagcaatcatggttgtgagatgtgcctgtgggtcataaagaatatcagattcagttaaatgagcttgaggatgaaagttaccatacttgggagtgacccaatttttatcgaagcgatagtgacaaacagcagcggtgtgtcctgtgcggaggcagacttgacataggagcttgctaccattgccacgaccataggggcgaggtcgattgggatcattgggttgactacgatccataccacggccataggaacgagagttcccgtttcttgattgctggaatgcaagattagcttgcatgttgagagaaagatcagcaagagaatgatgatgttcgagtcgagtctcgtgagagagaagaagagcctgaacttcttcaaaggaaagaagatcactgcgagacgtaatccctgaaaccacagggtcaaattcaggacccaagccatttaagagttggaaaaccaagtcttgattggagattggagaaccagcaatcgatagagcatcagccagattttgagccttgtccacatagtcggaaattgaaagattagctttctgcagatgggagaattagcctttgagctgcaataaacgagccttcgtctggctagaaaatctctgctccaaggcacgccaaacagagtacgaagaattgagtgtagcaaccgaagcaagaattggttcagacatcgacgatcgtagccaagaaagcaaaagttggtctctctttttccattgggtatattcaggattaatggcaccagtgatcaatgttggtggaggagaagcatccgagaacaacacatggtcaagatcgtgaccaataactgtgggaacaactttggatttccaagaaaggaaattgtgacgatcgagtttgagggttaatgtaacaccctaactaacttaggcgtat

SEQ ID NO: 296113 - DNA, 2415 bp, Cannabis indica
tagagataaatttaattaattgattaataaaagtggtatttttcaactcacccctatatttttccaataatttaaatagctcctttttgtgaattacataaacttaacttactataatagcccttattatcccaatcataatggtagactcaccacactttttagctaaaataattaattgctggtacttaataaatagatttaccctccattttaattaatatccctttaatttggggattttaaatgcttgtttcgtttggttcggatttattatctctaaactaataattatattttgagaaatcactactaaattttgtttctcattggagcttattaaaaatataataaaaaaaatagtttgtttatgtagtttcaataattaattttttattcttattattttgggtggtcaacaaaattcttcctaatttcctataaaaaaaataaaataaaaatcttccttcgtgtcaactaattatcgtactattatacacgtgtcaccccttaagaaatattaatttaatttcttttccttcacactttaaaaataaaagaaaaatttccccttactctatccccatccccttaaaatctataaatattaaataaaataaatataaatattaataaggaaataaataaataaataaaaaatagaaagtagggtagaaacttcataagcaaggcccttacgagaaaacgaaagccggtcttcttggttcgtgaattcgacattgtttcttctatttctctttctctctcctactacaaatatgagaacgtttctcaacgttgctcctaactttttctctaggatttttcatcctgagtttgttcttctctgattcttaacctcaagacctgagaaaccaggttgagaaagagaaaactaagaaaaaaccacccagaaaagaaaaaagcttcgaaaacaaagaagtggtctttaaatcctcacttggggttttgttaaatatcttcttctcaataaaaaaagctttcttttttgttttttacgtattcaaaggtatatgggtctgtcttattattattctctttgctaattttctgcctttagtttgttgatccatttttttttcttttacattgtgtttggtgttgggttcaaaagggttttgtttgtatgtttctgtgttttttctcattgaggagctgaaatgagcatctgggttttgattcatggaacctattttgacttttctcttgttggaatgttgtgatttatggtctcattctcttgacaatactttttgtcatgttcatctttaaacttgtagatccagaaaatatggattggttcttaccgtttgagatctttatttgaacaggtaactcaacctatatctagattgaaggaatagatttctccatatcaatggtgagttaataacgttcatctttagtgtgatcacttgataaatgaatcaaaagggtttctttgttgtgttctgatctgtattgggtttgttgtggttgtcatagggagaagctccagctttttttcttgatgaggttcagaagggattttcaaacgggttcgatctaaaatccaacggctgtgattcaacaacaaccattgttgttggcaacaaaactgtatgataatcaaacttggtgatatagtatttcaatagaaatgtccttttttgtatggtagtttttacaatgtacggaatcttatatttgttttatgtttttttattttaaaaaaacagtatttgattggtggatcctctaatgagtcaacattagaaattggggttcagatatttgaccaatctagtggtgaatggtgagttttttttttagagatttggacttaaaagagcttctttttaagtactctgaagtttatgatactaattttctgataaatattttgtagggtataccctacagttttggggacagcgccaaaacccagtaaaggcttttcaactgtgcttttgaatgaagacagaattttgggaattaagaaatgttccaccccagatgattttgcatggtttcttgaggttggtattctttgaagatatgatattttagttaaatcaaaccaaaccccttttcttccttaccccttttcttccttttgatacggaatataatttgttattccattttattcaaatggttaggtggataccccatatattaggcaacagaagaaaattttggggactgaggttgttgcttggagtaaaggtgttaagggtaaagctgagaagcctgttgttataagtggtccttctggagttggtaaaggcacacttatctccatgctcatgaaagagttcccatccatgtttggattctctgttagccatacaactcgtgcttcaggaacatggagaaagatgggggttcactaccatttcacagatagaagtg

SEQ ID NO: 296114 - DNA, 1797 bp, Cannabis indica
aaagatacttgtataaggtaacttacaagtaataaattttaaatcataagattgagatgatataaacatattaatatgcactagacaaaagaagagttgtgtaggattaataaatatgaagtatattagtaaatctattcaattgtagatccattaataaattattagaatttaagattataaattttaattaatgcaaagaatatgtattgaagttcgtttgtataatgaaaaattaatattcttattaatttataatcttaaaaaaaaaaatcacatgacctcatcagtgattcaaataagagttgatgaagaataaaatttttgtttgttacatttactataattagttataatatttatctatttgggattatttttcactttagttctatgagtatttaatataataatttttaaaaaatattactaatcatcctaaagttgctacctcaaaattgtgctaaatgccaataaagtttaataacaatactctttgatggtattagttcaaaacaacaaatgacttttatcatcaattaatggtcattactcatttgaaggggtgagtgggataaattgatgaaaagtttaaccaacttgcaagtgtgataagtgaaaatctcaactgcatagttagtttcatatgccataaccacagactataccatacttatgtgcggtgtaaaataatatggttaattacagttaaattactaatttatatattaaagattaaaagatagtaatcgtcatcatcgtcattatcaataaaaaacaataataaataatcatttgcatataaagctatatatatttgtgtaataataatattagataatcacatcaaagattaaaattaaccacacactatatgattaaaatggaccctaaagttatcgctcatatcatatgccacaaaacttactagagacatgttaaaaggaatatctttaatgtgtcataatattgatgcaatttaatattaagttttatattttttaatttaataaataatatcaataaattactcatatttactcataatgtgttacattaacatggtatttggcatcttaacatattaggaacattttaggctaaaagtctgaaaataagatgaaagttgaaagactttgacacgagtaatcaatcaggttacttgtacatgccgtaatatacctaagacatctcttgcttcacacctacccaaatacacaaatatcaacaacttcaattttactagtttgtttgtttgttttttcttcatatatacgaattttattttatttattctatttattgagaagaattaagaaaccacctttatttattttttttataacgaaaccacctttatttattattattttaaaatgagcatttctttacgtcaacaaaaaatgagcatttcttttcttttatgtctttaataaataaaagaaagacaattattaacttttagtttaatttgcggcataacctctttaagtagccagatttttgcatctaatttccaattctaaaattttagtactaaaaccccctaaactcgtattttgttagcagtttaacatttccatccgtttttaggtgttaactgccatggtggaatgtttatatggacacagtgtatacgtggcacattttattactccacgtaaataaatatttaaaaaaataaaaaattaattattttaaaaaataaaaaataaaaaaaaaattactttttctttaaaaattaaaaaatttaaaattaaaaataatttaaaaaataaaattaaaaaaaccctaaat

SEQ ID NO: 296115 - DNA, 4545 bp, Cannabis indica
aaagagttttatttagggcataaaacccaacacattaccctatggccggccacttaatgatgattttctgattaatattttcattattttaatgccaagtaattcctaacctaaacctagtggttacctataaataaatagtgatggctcgcaacaaaaaaaatgtagaatcagatgaatttttctcgtcagataaattgagcctcctatcctattgtctattgccgaacttctctctccctcttttcttcttcaatttttgaaaaccttgagtgatagagtgagtgcccacacacatcaagtgctatctcaatcatagtatggaagattgtgaataatccaaatttaagagaaggacattcgggctcagatcttggtgatactctgcaacaggctggatacaagggttaaagatctgaatggaaggagacatattattccgctgcacccaatgtaaggttttctgaaactttatatgtgtttaatttcattgttttagaaattcatattaggatgttaatgaaacattcttgttagtaaatctagatcctggtaaaacatattccaacacatttaccccccaagtttccagggcttaacatggtccaagagcttgcagtatcttctcttgagtggtttagagcacatgggatttatgatgagctctttattacactacgtcaccagccgccaatttaactgtcattatttagagggcataattacttctattttctcgtcagggttttaagtgttgacttttgagttttacgcgtgtgctgggaacttgttttgagggatgccccaaaacggcagtgattggatttgagacgactttccatttctcaagtgctttttatgatgcatgcaatgatggaagccaactattgggagatgatacaccttctcagcttcccacttatccaattgtcagatgcctctaaggcgaatgagtcgaaccgttcgattcttgtggaaggcgcctcttcctggtacccattaaatacctttagcagccatttcacgcttttcatttcttttgtctgtcacactagaagtcttttaatttcaattcttctcctgtcctgcaagatcttctcgacaccttcataatctgccaccaattttgctagcaaggacgctgcaccaggatcaccagccccatacttctcttaacaaccggtaagttttcttcactgtttacttgttgtagggttttgagggagttgtgaggttgcattttacgtgcgaccgtctgccctaggaacactagtaccgtgtctgtagtctttgagagttctagggtcatgcaatgcattgacccgttttgctattgtattgacttctaataggtatattaggtctgcaatggagagaatctgttcttctgaagagataggtggcattacttttgacaaaaaaaggtagagacttgaggcatccacctttggaacggggggccaccttcagtgtcacgatccacattgaggctgggctagcctcagtcataccacccctcgaccatgccaaaagtaccactcagtggggttcactttccccaggaagaccgttccttttaatcctctcgacatgcagaaggagagggaggttaacagggctataaaggggggcttggatggggagaagcaacaagtccgtagaagggcggtcgtgctctcggcggttcacagggctgaaatgtcagacgacacgcacaccttgccccttgccaactgtggacgttgaggccttagagaagcgactgacattcaaggtggggagagagactgcccccttttccaccaaacttttggaccaagtggatgggaacgcctcagagctgcccatggagaccttggcttcttgcagctagggatgtaaacagggcggggcaggtgcggggattgctcccccacccccataaccgcttcttaaattcaccccgatacccgccccaatacccgtttaaattaaagtgggtgcggggtgggattacccgacgggggaaggactcccatcgggtacctattacatatatatatatttttgaaaaaaaatgatgtttcaaagagaattaaaaaaaaaagcataaaaacttagtaaaacaataaatttgagtggaatagtgtgtaaaggtaaaaaaagagtataatgaacaaaaagcctaaagcatgaagttattttaattgtagtaattatgattttaaaacttaaatgtatatacatatatcatatcggggcgggttcggggtgggtatctattcccccgccccgccctgtttccgactcaggtatgaatctttaaacccatacccgcccctgcccccgaaattcaacccccatatcaaccccattaggggcgagtacctgcgggtacccaaatccgcgggtataattgccatccatacttacaacagcgtcaatgtttttatgctggcccactctgccaagcaccagaaagttggggtaaggccttgagacattcccttcctctctttattttattatttttttttccgttctaccccttgctctgatactttggcctattccaacaggtgtccttgctggcagagagggctgccaaggaggttggtatgctggtgagtaaactggagcaagtcaaggtatataatcgcgacttgcataacaccaacaagacccttctagctgagatcactgaggtcaggcttcaagttaaggttctacagaaagagaattggctactagaggatgagaatgctcatcaggctcttctcatatgaagcatgagagctgtccatcatctatatagggagaccatggagcgaatgttcggagcaagcccttcaacccggtcaggcggcgcccagtcttgaacttcagtaatcctttctttttttttcaattgttatttctttttttatatatatccccctttttctacaattttagagttgggggaacaatatcaatttgccctggctgcggggctgcttgtaatagtgagtagggttttctttgacatttcttgcttgagataaattttggtagacttttaggggctagttgcgtcattggaacatcttgttctaataaccagtgtttcaaccatcctgctagtcttcaccatctctcagtcgatccagggatagtttctcagttttaccctttctttctcggaattgtaatgcttcttccaactacttaacctcttgattgtaaaagaccactcgttaagagttagcttggaggtgatttcctttcacaaaataggagtcttcataatttcatgcatcttttcaggctttagttctttcacgatgttaggttctgggagtaatacccgcgactgcgttagacttaggcatttttcctactttggtccatgtcagcctaacattttagtcaattatgccacctgatggactaaacttataggatgttcatagagatttgtaagaaggaatttgggagtatttttcttttcaagaatgttggttgaatactcattttatccctagattcgtacttaagtttagcctttgaggaaagaattcaagtgtgtttcccttgggttgacataatttaaaagatttcctatttttggttgcatgtgtgcacttgaactaataacttttgcaaacgaacgtaagaagttgcagttgtcagcaatcaggcatagcataccccccaaatgagctgggaagtttggtctcgaattcttggtcattttttgaaatctaactcgtgtcttctttcgattcttgaggaggacgtttgagtgtggttctgctttgctccggaaagtacactattcacctgagccatgtcttccctctccatgacagcttggaggggaattcttgaaagtttagtaatctcttggtctttgtgagaaagttgtggggttacaggtgaaaacccagttgcatggctagccctaaatgatctctccatgacacgaaccttgtaagggaaaatgtaagctcttgtggcacagtagggttttggtttctcagagggaaagctgggcctgcacccttgcgcaaataattctcctatggcgaggtccgtcttactaagcgagagacatgagttttgtgaatggcgaacttttgtctttcactaggaaaggataaaggtgcacaaaacattagacactgactttgcttcttaaacatgaagggtgaaacattatagggcccgcgagagtcatgttgaatttttatggggcaagctttggcttccgtgaaagaaggctaaagttgcatacaaattcaagctttgacttttctggaaagatcaaagggtgaaagcatcacggggagtaagatagacttcaagcagtctttccatttcgagaaggagggttgaagacgtgtcatacccgcggtgatccttcatgcacaaaaaacattatgaatgtgagactgatgttgaattttaaagaagcatgcttcgggttccgcgacggaaggctgaagttgcataagactttgcttgaaaggatcaaagggtgaaagcatcatggggaataagacatgttgggtttagtgccctaaa

SEQ ID NO: 296116 - DNA, 3234 bp, Cannabis indica
aaaaaaaaaaaaaaaacctgtagtaaataattaaaaaaaaaaaaaaaattatgcaatcaatttcatactaagtaaatggtctgtaccagacaaaaacaattaaaaatatgaagaaatttctaaatttgtcacttaaaaaagaaataataataataatttattcagaaaaaaataataaattaaatgacaaaacagaattccctgaaaacaaattggaacaaagatggaaacattatttgttccaaaaaagaaaattgaaactttatccaaaactaaaatctggtgtaacttcttgcttggtgtccaagcttctactttcaagcttcactttttttttttttgaaaaaaaaaaccttctggaaaatatctcaaacttccatttatcactgcctatattttattccgaaaataaccttgccacgtaatcataattactctttgagacctaaaccccactaccctataaaaaccctcctcagtcctctgtttccttcttcccaaaattcttaattttcttctctttctttcttttctgttttttcctcaaattcccatcaactctctccggagatggttggagtaaccggagttttggtcccgatcatattttacgatggtgaaagcgagactgacatgggagacgtcttcgtttatcccgacctcgatttcaagaagcttcaaacaattctatgccggaagatcagaatcccgccacaccaattctcggtgttcatgtcgtcgtcggaatctcgcaagaaaatccctgtgaacggtaaagtcaatttctgggttatttctcgcatcaaggaatgcatcttcgttgtggttccgaagcgatcaaaacgcgagaaggggaaaaaaaagaataagagcaaccaaaatctcaaggattttaggcttctgaagcgtaatgattccattgactactactactactacgacgaagacgaatattttcaagatcaatctatctctggatacacttttccgactgactggaatcggatcaagtacgcgtacaaggccattaattatcagcatgagcaaatgaggtatataatcccctgcgaagactgcttgagagcccaggcattgggtattgaagacgagttccatctgtgcgttaacgatgagatgactttcgggttcagaacttcgtcgggtccgattgcccgacccaatcaaatcaagtcttcaaagacttgggatctttggtcttggactgttaatccttcgcttgtatagattggaggaggaggcaagaaaggctaataaggcagtttgtattttcttgcaacaaacaacacatgaggtaaaatctactgtgtggcctgatataccataagaacggtgtagcactcttttgataatgatagtgtaatttaatcttgttagattagacccctgccaagtgtgtttcattggtcagtagtacgcagttttaggggactgttttagctcttaacttccgaaacaagaaaagggatttttaatattcttttttataattattatgaatatttttctcaccaccacatttttctcctaagaagtttgatggtttgtattatttttttcctggttaactctcaaaagagggttttttgggttttgaattgaatttctcagcgtaataaacatattattagtattagttttttcttcttttttagtggggaccttctaattgctaaagtatgtatttgaatagttaatatgtttttttgtttttaatgtttttgggcccataattgtttctatatttgaaatgaatctgttatttgattacttcatcatttataattaatttaagaagctcgaaaatttgatataagataggataaccataattttctaaaaataattttgataacccgtgattttaatttattttttcaaatcttaattaggaaattaatgtacatgaaagatgaattttctaatttgaagtagaataaaggtggtcattgtagttgggatccctatcatattcagcgtaccatttgtttgtgggtgattagttaaaagaaacttttttttgtttggtttgataatgattatatatgatgaaagagactttcttttttctaaatataatttgacttttataaaagtcgcatgcccaaggagccatatcccctaatggtagtaactcttgagtgaggtacttagaactgtttattaagaaagtgtggaaaagatactagctagctttcatatccttccggatgaaagtgaatgatagtgttttctatttacgatagatacagaagttgaatggactttttacaattaatattaccgatatgagaaaataaaagaataatttgttacataaacatttaaatttaattttaattacaaataaatattttagtttatttttagtctataataatatcaagttagtgtttagattctcggacaatttacttaacatttaatagtcaaattacttaaaataaaaataaaattataaaagttactcaattttatccaaaaaataaaagaaaaaattgcactcaaagctaaatgaggtttatttatacttaggtcccgaaattatataaaatttagcaagttggtccctaaatttatttttttatgtaaattgatcttcaaactatatatgttttgacaagtttatctctaattttttttggtatattgatctcaaaattttattttattagcaacattaattcttcactcttagatattggtatttttattattttttttatatatattttactcacttcaattaattttattttatttttgtgttaaatttgaagaatttgattttttttttaatttttaatactttgataaaataattatattattttattttatatatttactaggaaaaaaattatactgcaattgtattttgtttaatgataattaaattataaatttatactaaattttaaattttgatattttttgtataatctttttaattatttgagtaattattctagtgaaaattacatgaaatatgtagatttactataacaaagtttagaaaaaataataggtcatttttaggttttgtccactttttctatggtcattttttctatatttaagtttttttaattggtattttgtatatgtcactattttttattaaaacttatttaatcctaaatcccatacttttatgtttttgttttttaagtctttaattagtttttatttatttttttaattttaattttttac

SEQ ID NO: 296117 - DNA, 6458 bp, Cannabis indica
gtatgtaattggcatatttagtcccttgactatgtaagttgtgacttcattcgtcattaatttgatcagtttttttaggaagtagaagttcggagatctaatgataatttaataattaagggatcaaacaagccaaaattgaaaattaagtagccaaatcatcagtagttaagttatataattaagggtccctaaaattaatttgatattaggcttacatgatgtatttatgacgttttactgatatggtattttagtgaaattgacttaccttgctaactaagatgtactgcatattggtacggcgtccttgtctttgatacgagccctttcattttggttttctaaagtgatttaagactatagtttttagatacccctttttaaagaaaaatatataatgcatgcatgatgttggttataaacttgatttatgtgcttatgtataaatttgttatggtttgaaataaaaattctgaatcatatttttatatttcaatagattgtgctaaactgccctgaggatttccttgaaacggaaaacttttcttatttggcaatggaactttgcatggcttatctctttaaagtgtctcggaggtacaggcttttattataatactaatttatcatgctcattgaagcgaatacccaggtaacttacaacttctggtctttacagtattgatgcattatccctggataatttaaacttggaagattcagtttctgcattattcgtgacagctgaaacactagtgaagcattttggaccaaaggtgggcttatggctcatgaatgttttccctttccgctgtattttatttgtattactgatgcactcatttaacatttacttgtcaccttcctatcaactttctgcagaaacaattaacctccgcagcagtgtcatttcttttaattggttacaagtggattagtaaagcttcaaccaactcgtgcttttccaaagttaatgattttttcaagtgcactagccttttattgaagaaatttattggtgagaattcatgatggcagtgtcatttcttttaatttactgctagtgtattaaaaaagctttgaccaacttgtcgttttaatgacttttccaagtacacttttattgaagaaatatattggtgagcattcatgatctgaggagtactcggattatttatgctaaatttttactagagagcagtactctcatttttactaaaaaatcagctttctcatggtagcaatattcagctggctaattgtttctttcttccactctcgtgcagatgaatacaaatctgctgatagtgattttcctgatatgagagtgatatttggaatttgtcttaatgcgatagctaatttgtcaaaagattgcattcagaaaattcatctactggaaaataaatctggtttgcgaacactatggcaggcaaagcttgctttttctcttgaacaaactatattagttgcccagttaattgatgaaataggatgtcctggagagcacagtgatggtgaccaagtgtactttcacatgttcaaaatttgcattgagtgtatccaaaatgtactcaatgattcaaatatacaggtaacatgcatacattctcttgcatgaagatatcagcattgagtactagttttaagcaactgttagaatttttctaccgtgcaggttcaggctattgggttgcaggtgctaaaaggtgtgatacaaaggggcacaaatgctgatgacaatgttttcctaatgttctttgctggtgaacttatcgaagatatatttatgataatccagaagagtctgaaggtttttttttttctctttatagctgtttgtttttaaaaatcatatattttctttgttttgcttctaattcaagactgatacgatgttcttggcggttcagcataagcttataactaaagaatcagcagctgttgctggtgagtgcttgaggcttttagtgcttcttcaggcagtatcaaaagacagtgaatgtcagagaggttatgtgaaactcttcttagaagccattgtcatgattattatggcttcagagaatggatattctcaggtgacttatattattagctgaaatagttgcaacttacaacaacaataaggacaattgtattttaggtttattaaggatatttgtggtcgtctcttatttgattttatggtaaaattctttttaccatcattttatggcaggagttcaatgatctaagaagcactgctataaggcttgtttctcagcttgcacaaattccttcatctgccgttcacttcaaagatgccttattgtcaatgcctctagcacatcggcaacaacttcaggtatatcgtggatgtatttattcattttaaaagataaagaaacagtattatataattcaccacatgactatcaggcttcattatgttaatatggagataaagatgactggtggtggtttataataatttgtagggggtattgcatttgaactccaaaaatatataaaaacaccctattattaaaaaataaaatcatgaaattttatcatgttttcctatttaatcctatgttcacaatcattgtaaaaataatgtaaaaaaaaactaaaaaatttactaatatttaaaatatatttgatttatattgtattcttttagaatgtgaaaagaaaacaataaataaagttaaaaatatatagatttattgtaaaaaaatatataatgagtatggtgtttaataaaattttggggtgctaatataatgccacctaatttatattaggtaaagctttttactttaatggtcatcattgtccacaaaagattttaggtctgtggctcataatattgacttgtcttttaaaattggtgaaacttactattcttctagtgttgggcctgctggctccaatttttcttttttagaataactccaggctccaattgtggcattttagtatttcattgttgttttgtatgcatagtcctgtaagaacctcgtgtgtgtgtgtgtgtttttaaaggatgataaaatgttttacatgttttgtctctttttatagtgaagctgttgcgagttagaaacagctcggaatcatgggggaatcaaattaaaaaaactattttttgcaactgataattgcaatttgattaatgaattatatagtcagaagttgcagactccattaattgaattcccattaagttacgataatttctacttctgtcaggaggtcatccgtgcttctgttacacaagatcaaaatgcaacacagtcaaaagccacaccccagtccttagagatacgtttgccagtgccaacaggggaaagtggagagaaaatctcgcaatgttcagcccctgtaattctcgataataaggatagcatggtagagaacaaagaagacgaggaggacgaagaggatgaagatgattgggatgctttccagtccttccctgcctcagaaaatgcagccgggcccgattcaaaagtagaaagcatttcaaaagaatccatcccaactgaaacagagactcaaacaaccgacaccgcaaaagacatcagtgacacagaacaagagggtgttgaagaggacgtaacatccgatacccaaggttacaacttgccacaatatggaagtatattacctgacgaagatgaggtagaagaagcatttgatcttaaaacaaatagcgagcttatggaggcaagtgattctcagcattatgagagagaagaggaagcagtcgccaatcaagagacgggagatgaagcccagttgaatgtagtggccaatcgagagaggagagatgaagccgagtggagtgaagcatccgaacaaattccatcagatcttggtcctaatgaagacaaagaaggatccatagaagtgaatttggtgaaggatgagcagctcaaaaatgagaagttgggtaataaaagtgatgcagttgcagcatcatcagatcctcttccttttgatgaggaagcaaatgaaaagccgcaaacagaagctgatagagataatacaagcgaagcatcgggtgaagctgaactgcagccagagagcaggaacaaattatagtcatcacaggggaaaggtgatgatgcctcaaatatctgtgtcctttataatggcactggtgtgtggaattcggccagtttcaggtttgtactctgtattacaaaccatatacttttgatgcttgagaaatattctttaatttattatgtacttatagtttgcttaatgcatacatttagaggtcttaaggtacaccttttttatttcatcaatatttcggtagttctcttgtagcatgtgctggtgaattagtctcttgtagcttgtgctggtaaattagtcattgcaatggagtattaatatttttatagatgtatttcaaatagatattttaaactttggcatgtttggtttgttgtaaagggtattgtaatagaatcaaattacacattagaatatttagttaaaaggagatgtaatgggattataatgtaatcatgattacattacataatggaattctcagttatgtaatgagaattacatcacaaagaattaaatgcagtacgactctaataccctctcttaatataaataaaataactctaatattaaaataattttaataccctttcttaattgtataagtataaaaattaaagcaacgttattttgttgatttatcatttattttaatattcattccaataataaattaaattaaatattgtaattaatttccattattcttattttattttattacttttacattctactaaactaaaatatcaccttaaaaacaatacatattatacatttaaaacaaaatatatataaaaaaaaaagaaaaaaaaagagagaaaaacttaatttaatccacattttctctttctttccctctagtttcctttttaccaaacatacttttcttcttcctttctcttcatatttctctctaatttatctatatcaattttaatgctactcattttattatgactagcacataaatttaaattagatgagctagagttagagatttcaagtgaatcgtttaaaggaacattcacaagtcctttaatatcaaatacttgttattaaggattaaactctccttaattttggggacattcttcttctaaaattgctaatttcttgttcttggtttactttgaatccgttgttgtgctctgataccattgtaaaaaattagctacgtttctaatcctagatcaagaaattacatttacatgatatcaagcttatttattttattcaaaaattggtattattgcaaatttaaacctcatgcctccatgagccctaaaacaataataacccaaacaataaatcccaatgcttctcgatccaaaccaaccctaacaaaaatacaagttctcggagattaaggttagatcaacctttgagaatcctaagaactctccaaacactttagggttagcgattcacacacaaatcacaaaacaaatccaatccaaacacattatacaaagagattgagttaggaaatacaaatagaataaagaacacactaatttctctcaaagttcacccaaaattttggctatgtccttgctaagctcgccactgagatacttgagttttcactatcaaataggtatgaagttacatcgacttcattgatttctagtcacaatcattgattgataatcaatctttacacattttgagttttctttatgtatttcttttacaacaatttcttctaactttctttctttgttttctttcaacaacacgaatcaagctctttctctagatgttctctctaacgtcgctatattcctctcttctttcatttgagttttatatatgttgtagaagagtcggttgagacttgctcctcaactgatttttggcaaatgatacctaaaggaaattaattcttacattaataatacagtatcaatgataaatagaaaagagtggtaaaagaagtacggaggaagttggaaggttgcaaagttttatggttatattaaaaatatgaaaattatatttaaaaatgttaacagtatcattaatgtctaatattgcttaaggtatcatattgttattagtacaattaaattttaaggtatcatattgatgtctaatactgcctaatactaatgctaggctctattttttattacctgtcataacaaagttgctaacagattattaaaaaaaattatatttttaaattaaattaattataattaactatatacttaaaataaaataatttttttaattaaaataaattttttataaaactaattggtaattgtaattaaaattaatttaaaaataaaattaatcttaattaatattttataaataaacaaaatatattaataaaataaaatattgttaataaaaaataaaataaaata

SEQ ID NO: 296118 - DNA, 5600 bp, Cannabis indica
taaacaactgctaatttccaaattaactaagcgggctttacacattccatttggcctcggtgcctggtccgggtgcatttgaaagagggccgaccgaacctcatcactagaaattggcttcaaaagttcagcattatgagcagaagtaatagagcaattgatgccactcacaacctgatcccaaacaacatccccagtcgcataaatgatgttaaaataatcaataattacctcttcaagaccaccgttccaggatgtccaaacgccagcagcattttggagaaattggatattgttactatgctttcgggcgctggccatagcatgaaagaactttgaatttttatccccactatgttgccaaaattgctttgacctttgtttccaatataattcttgttgagctaaaatttcaaagtaattattcagctcatgaccgaaactactaacagaaagaggatcgaatttacctttaagagatgaaaggcatgctttgctctgacaaatcctttttttaaagtttgtagttaaactctttccccaatcatcaagttgtttgctggagaattttatcttctcctggattgacaaatgtgagtgcaagtcccaacaagattgaataatttgagcacacataggttcccttgtccacgaattctcaaaatggaagtgatgtgcagaaccggttaaaatcgcaggtgctggttcaagaaatatgggggtgtgatcagaagaagaagcatcaccattggtaagagttgcagtcgggaatatatcaagccacagatgggaaactagtggtttgtcaaggcgaatttccacccaattatcagttcctttaccacgttcccaagtataaggatgtctgcggagctccaaatcaaccagatcacaactgcataatacatgttgaaagccatcaataagagacgaagggtaaggtctgccaccctttttctcattttgattgccaatattgttgatatctcctattatacaccaagggacactattttcatcaaaattcattgttggatcttcgatttgtgtctgtaaagagcgcaagttgagattaagtggagagagtagtaataagttgccaagttttgaaccttagacttcgattaggctcgccgtagaagacggttaaacgccaaacagggaggttgagagatgagacttcgatgtcgatatggtggtgtgagaaacccactagacgaactccatcactgtatcgccacagtaaagcaaggcctcccttgtgaccatggacctcaacacagtgggctccctcaaagcccaatttaactcttagcctttcaataattcttttttacacaaagtctcacacaagaaaataaagttgggcttctttgaacattaatgttctcaaggaattgttgggctcgtgggttcccaagcccacgcaattccaactgagtgtactcataacgattggtgggcctggacaccagaacccaccatattcaagttttttgacccagtttcagcttggaccgaagtattagcatgcccaataactctctcagcaacaaatctttttctttttaattctgcttgattcaactcttcatcagccagttcactatcataaagaataactcctttatttttgctatttgtttgagaaatatcaggagatattcccctaaacgtgggattggatgacgtcccaaaattttctcttgcattagtggtgttcacaccagccgaaccgttcactggtgccttaccagaacgcaagaatggtgatgctgcaaaattctgatgctggcgagggagagccttcaatcctaaaccgtaaggtttcacgatcaagtgtgctggtgtgtcaaaaagctgagggcagaatcgctccgaatgtcccatcttaccgcaaataaagcagaaggttggtacattttcttaccgaaaggttgcataaaagatatccccatcccacttgcaaaacttcatcctgtgtttcaatggaagatcaagtgaaagcgtgactcaaattcgaagatattctcgccaaacccctgtaaaattgttcggatccgattcaagaaaggttccaatataagctccagcatccttggcaaaccttcatagtcatgaaaccagagtgcaaatcatggatttgtatccacagatcaagagtgttcaggcttacagttctggggttgtcaccatcttttgaacgagttaagattatctgtttacgatcataagtccaaggactgcccgagatcacacgttgtatatcttactcatgataaaattgaaacacaaaacgattttgatcaagctgctttgcatacaatccttttccaggtctccatagatcagccattatattttgaaaaatacgaaaatcggataccttgcctgtgagcagccgcccaaccagacaccatctagtgtcaataaccagatcttcttctgcttcattttcttcatagaatgtttcctctgcttcctcttcttccaattgaatacctttccattgttcctctatattctccatatcgctgctacttgatgccataagaaccaaaatcatacacgtacaggaaaacgacacccaaaagaacagaacaggacaaaaacaatcaagacacactcagaaacgagagacagacaaaacactcaaaaagagagactgtttatttttattagttaagggattatgacacataatttatatttagtgttggttgttcacgtgtatataatgtttattttttaaattttaaaataaataattgtatatacaaaattacactaaaatatatatttttcttttgacaaagtttcaatttttttatttttccttttccaataataaagactatgttttatattataattgaaaaagaaaataagaaaaaacaacatacaataacttcaattgaaaaaaatgatatagatgagaaaaaaaaaaagcagaattgtaaatatatatatatgctaaataaaaatttaatacgttaaagtgagattatcttaatttggaactcaaataattaataatatcgtaatcacatttctatgcttttaagaaataaaatcaatcatataaaaaagaaagtatataataatgtaagtgaaaaatttaattataaaaaattattttttctcatgtcatttcaactttcaagaatcttcccaaataatgcataaagtatattgaagtatattcaggacgaataataaaattatcatacaatttaaaagtataatcaaacagtggatcacttttttttcaaacttttcaatgtatgactattcccacgaataacattaacatcttcaatagaatcattaagattataaataggtattttctctaatctagaagcccatcaacaaaattactcatattctgtatcatataaagtaaaattaaatcaatacataaagtattaataattgttaaaacagaaattaataaattagaaagtaattagtatcaaaaggaataccatataagcaaatacatattaaaaaagtctaaattgaaattttaaaaccaaataaaaaaatctaattgtataaatacatattatatataaaataaaataataaagaatattacttaaaagtaatcaaataaatatatatatataaacatttataaatctttataaaaaagagaatagtttcttcgacttttcatagtttatttacaaaaataacctttattgattatttatttactgttaatgcagattttcgttaactaaatttgagcctgaatagtgataaacttgcacagaaaaataaaaacagcaaagaaataaaaagataagatgaacacgaaggttttttacgtggttttgcagttaaaattatgcatagtccacgagtcaatcttactaaatttctgatattgttttagggccttttctcttatcaatttttccgtcccttttttagtctaacttgcctctatttataattacatagtcagatagttaattacagagttgactgtaatctttacaacaattattttttgaaatcgtggggtttgattacatatcacgtagaataatgcagttattatttgaatatcacagctgtgattagtctgcttttactgggtcaagataatcgtgtattaaacacgttttaaatcataacgttctaggatgtctcgataagaacccagtaccaatgaccttaatagcgagtagaagcttttcccttatctatctgagattgataatgtaaacctcaccgctcttgtgctgaagacataatgctccatctgacaatcgtagttctcggcgtcaaggtgaactccatcaatctacatcatttgaatgtaagcttctatttaaaagaactgactcgacggaattgtgaatctcattgaaagatgtttggagctaattagtgaaagtaccatgtgcatgtcttcctatggtgagatggacatctcgctatcacttgcttgggtttacccctctgttatacttagtttgtatactgtatattatacgctaagtgtcttcacaatcattatatctcacttacgtctacacatgcttaacgagattgatgcctcgccatgcgcatgcattaacatatggtttctcgctaatgtatgaggtaacagtttgtatacctttatctcgcgtaagaccttatagtcagcaagttgtaaatatactctgtcacttctacatttaatgagttattctatttgcaaatataattaccgtttcatgcattgatccatattctctgtgtcttcctttgaaacgatagtcgaatttcgggtataacatttacttataactaagataacacatgtcaattatccaatgacaaatgtttggacttttcatagtctatttacaaaaataacatatattgaatatttatttatctatagcctttaatgagataatacctttcaactatccaataacaggggtgtggtaagttgtattgcatgtgtgtttttctttgttgaattgaaagaactcaggttgaagatcattttgatatcaggtttgtttagctcattctctctctatcttcccctttcttcgcatcgcctttattcagtttttggttttggttttaattctgtgaagttggttgatttggtcttcaaggaggtaagtatatacaataaggaaaagaggaaagaaaaagtattgatagagatgcctcaaatagtattgctaccattctttttctagaaaaaaccactttgttctaatctatacaaatgtatcactttactttaatctatatacattttgtataataaaattagtttctctttattttttttaatttttaaatacgtatgttacttttagggcctaaagagctgaaggatgttatatgacttgataatgctgtatgcaaatagcatattatgaaaaggtaataaagttatttcttttatttttgttgtattcttaaagatcaatttattattatttttttataatttaaaaaattttcattaccgtttttggtattcttagtaaataagagttcttcatttaatacaatggtgagctaacttccaccttattatactataaacttatattaaatataataataataat

SEQ ID NO: 296119 - DNA, 4089 bp, Cannabis indica
caataccaaacatgctctaaggagtttaaaactacccaaatcctattagaaagaactttagcaactaatttatacatggtatagcataagctaatgggcctatagtccctaacttgggtcgcattctttttcttaggaattaggacaatagtggcttcattaattaaagaaatgttcgagctcctatttaaaacaacaagaataacatgacacaagttaggacctacaacaaactaatttttctggtaaaaataaacattgaggccatcaggcccaagtgtcttatcaccagataatttaaataaagttagcttaatttccttaacatcgaagggtttgtctagacactcatgatgagaagcactaagcttactgctaatcccactaagaatctcaacagtggcattgtcatcagagccttgggaagaaaaaagatctaacataaaaattaacaaaactactactaatatcattatgattactaataataataccatcatctcgagtgatacttctaatgatgttgttcctttttcttgaggaagctttttggtagaaaaacttagtgttcttatcaccaacctttaaccagtccactctagaatattgtttccaataaacttcttcttcagacatcaaggcatcaagagaggtttgaagggttctagctttacaaatctagtccctgggtagaggggaggaagaataaattgtatcaagttccttatggatagccaaaattttatgcttaagactacaattatttttatcccaatttacaatgttgtgaacacaacttgtttgtttggagggaaaatcttgaatattatcacgataagaaccaaaattactagaagaccaagaatccttgactaactggaagaaattcggctcagttaaccaatggctcaaaatggattcttcaagttctagtagttcttactatgtcatctttaaggataaccttaagatctcggtggcccgaaccataaaaagacaactgtaacaaagagacataaggaaaaagattagaccaattactattcacaatgcaccaatcgaaataataaaaaatactaccatgcttctaagtgaatttattaccaacaaaagacaaaggaaacaaattatgtttagataaaaaggattaaaagctagacaaatcatacagggggattagaagaactactcctatcatcaagtgagagatagtcattaaaatcccccataacaagctaaagagaagtaggggcaacatcataaagtctatctaataaagttcaagtatcacactttgaagaaatataaggagatccataaaagcaagaaaaatgccaagttatattatcatcgaaggttacaaatcaatctatgtgattgacagagtaagttaaaatattaacattaattaaattgttccaaacataagtaaacctcccctaaaccacttctaggaacttcaaaaacattatcaaaagaaagcttaatcctaatactagaactagagcctgaagtcaactttgattccacaacaaaaaggagcaagggctggtgttgcttcataagcagagagaggttgttgaatgccctgggactccacaatccatgggcattccaacttatgagactcatttttccaggtagggttccagagcaacacccgccttgtccataagattctcaacagtgggcatcacaacatcatcacttaaggcagcacgagctatttttaaaagacttctaaaagagcccccaacttgagtattttcaaaagacttctaaaacaacactaacaatgagtttaggagaaagattagctctagtcctcttgtctcaacaggaagagcaataggggagaaaataactccttacccttactacgagaaatttgaatattaccaaggttaatagagccttctacaactttcactttttcaacaacagtgataacaacaaaaccatagtaggagtatagggaagcttacaagtcacattttgaaagccaaatggggaagccatagtagagatcatagaactcagagcactaggggtggaatcgctagatatattagctttatcctcaatagaagagccaacattcgggggaacaacaaaagaagtaatgctagtaggagtagtagacacaactttagaagtgtaaaactggttcactgcttcttgaagcccttagttataagagtttccatgaaatcccatctctttcaaaggggtatagttagaaagctcaaaaggattttttaaaaaatagacctagtaggaacacagaggtagtctctagaacccaaaatatgaggcacaactggttcatcataaattttagggaacatgggacatttgttataggtgtgatccataagacaaaaaagtagcaaaagttctaaagaccctcatatctaaaaagccaaccatttggtcctactaattttcctaaaatgaacattcattcttctacgaagaggcttggtaacatcaagaaaacccttaatatgaaggtaaggcccaaacgattcaaaaaagagagagtataaatctcaataaggtcaccaacttccttagccacaaaatgagcaagttgaggggactgtttccaaataggatatggtggacttgcatccataaaagggatatatctaagctggtcaaaactaaaggtgtccaatccttcaagattagcaaaaagcttaaggcacttatcgaaatggtagggttaatcttcaagaacacgacacctatctccctcatagccaaagttggccaagaacgtcctaaaatagtaatcaaagaatttaacgggaaaacagagagtccaagcctccatcatagctttttcaacccagcttagcttaagagacttagtggtaagaattttaacaacaaggagatatgactcagaggaagatcatgaacctaggaagaccttatcaaagtcgtgaataagactctcttcatcagtgagggttagattttgagtaatattgatactaaggctatctaattttgctaagtagaaaaagacacagaagaaagtgtagaaatggatataatttaagattatgtagaaactatgaaaaagaaggccccttaaatagaaaagccatggaggaagatacctaaaatggaagagccattttggagagaaaaaaagatgccaaatcaatccaactattgatcttccgtaggtaatatcttcgcatgccaggcttcatcatcaccaaaacacctctgggaacgaaaacgatggcagagagagggagggaaaatattgagcaagagacgagcaccaaagaaagcctatagagtaataaatggaaggggaaatagtaaaatcaaaacaataaatgcaagcttagaatgaaattaaagcgaggattgtgggtacagagaaagagttgggatgattagcttaagggtgagagggatctggaacagcaaataggaaaatgtaacaaagacctagaggaactacagaaaaatctaaagagttcttaaaaattatttattttaatatattttattcattttaataaataaatacataaatataataatatgacacacatatatatattaaaaaaatatatttaaaatattaatatactatttatatctcaataaataatagttcttggcatgtagctaagcactatttatcagctaaatctcttagttataatagctaagatggggaaatatttttaattagtttttatctcttaactaattttagttacgtaggtgctctaatacttatcctcatcacacttaggggcgttgatataagaagtaaaaaaatttgattgattagaatattaaagcagagaatatgattacccgtaaacttataattgtgtttagttagggatattggcggcaaaattacctaaactttatagtttgtagcacttaatcacataaactcattttttaactgtaaaacctactaaatcgccattccgttttggtttttatacttccatccaaaagcttttgttaagtgtcacggtggactacccatgtgtacacaagtgtacacgctgcaatattttagtggtccacgtattattaatc

SEQ ID NO: 296120 - DNA, 12848 bp, Cannabis indica
atctttcaaaggctctggagcagacaagccacctttggaagattctggagcagccaaaccatcattggaggtttcaggaacagccaccaaatcccttgaagcttccacgacagaaaaatcatccttgggagcttccacgacaaacaaaccatccttgggagcttccaccacggacaaaccatccttgggagcttccacaacggacaaaccatccttgggagcttccacaacggacaaaccatcattgggagcttccacaacagacaaaccatccttggaagactcctgtacagaaaaatcctctttgaaggcttctgaaacatagagaacaccatccttgaaagcatcccgaccagaaaaatcttccttgaaagcttctgaaacagatgaaacatccttgtgagcttctgaaacagctaagccatcaccaggatcttgtagaacagccaaaccattcttagaagcttctgggacagaaaacattgcatcagaagcttctgacaagacaaaagtgttgtgtggaaggttctgaggttcagatggtagtttgatttctggaagaaaagagctgaacatgtttttctgctcgtgccaggcttctacatcacccatatgaaatggcctatgatcccttggaaccccataaagtgtcggtggcctaataattatcaagtaaaaatgggcacaggttaagatttaaattatatatacttggtaaatacacacacagagaaaggttattacttctcaacataagaatgctacactgcgacaatgcaggagaaattatccatatcaataagggtagaaaaggaaaaggatagcaccttcccccaaggatttgtaagatacagaacaggtggtgacgaagaaagatattgttgaatgaaatccgtccctcaagtagatggagcatattcacaagagtatggcttcttatgtcatcattagaattagatccaactcttatctgacacaatctcatagcatgcacgcccaatttctcctgccctgaaattgtgaatgcatattaagtgtgcatgccgcatagaaattaaagaacaaaaacggaaaaagaaaatattcgtataagactaggtagatcctatagaatcgtgactatttcactaatgttagtgatgccaacctctcaaagacggctcttcctctatatatttgatgaacaaagacaaagctgcatcaatgcctccacagtgaaactctagatcaagtaaagccctactagcttcaatgcgaactggccagattgcctttaaatccctatacggtttcaagagatcaacaatgcggtcctgcccaaaaacaccatataattaataccccaaataattgaaatgcagtctacagtaggttaagaaaaactcacgagagggacgaaaccagaaagcttcagcgcaatctgagttaaagtcctaatgcagctaactgtcaatatcccgttataacttggcatcagcctggtaatatatggcatttccaaatacacgataaaagttagatttacaattatctaaaataataactggtcatccatatgaagcaagtcacgcacctgtcaaattgcagaagctggtcaatgcgcttgagaagggacgatagaagaagaatactctgccgtacataaaatttgtaacaaatcaagctcagggtataatggtgaggtaacgattttatttttatttttttacaacaatagcagcaacagaaaagcatcttttattctttacttggaagaacaagagtggaaaattcagaggaaaactggaattgaaaaactcacaggccaacattctaggaaaccactaccacaaatcgggaagaataaactggtttagtgctcaaaaaattgaatggatgaagcaagagtcaaaatagaaattatatcaaacctgttgtccaaattcaagttcgccaactgactgaatcaatgcagcgagccaataaacatcagagtaaggatttccattattgtcattatactgtttggtatgcaggcaaggcaacaggaaacatgaaatcagactttttataaggctaagaatgcacaaacaaggagaaaataaagtctatcccccattttttttatgtatcacagatctcaagtaaaaaattttaatggtagagttaaaaaaagatttatatacactctcatgatgaaggagaagcagtcttcctgctcttgctgcttataacgttagaataataattaccttcaacagctgtaaaacaaattcaactgcctctcttgggcttttcctatctgctgttctaaccatagctactgcatgtggaatggcctacaagatagaaaggctaatttgatatttggctagagtgagacaacttcaatccttatgatgatatattaaagtactccaaaaatctaattagatattaagaaatattaaattttcatgagtaaaacgaaattagagaaatcaatttcagagtcccagaaagctgcagaagaatatagagagaaacttcagacccatcaaataagacagggatattaatacatctataagatgtacaacaaattcttcaaattatggacaagctaataacaaaccacttctttgaacttataaatgaaaaattatgaaccaaaccgattacagcattgataacgtattacatatcctacctcattgcattacctcaagaacaaagtattcagcaaagtcatggaagtcatttggcctgcaacaatataaagaatcacaaaataattacaaaaatggggttgtaacatgtataaattttgtaagcatataaaatgtcaaaatgtttctgttaaagcatctcacttgggaagtccaatatctgcatcaaaccgccgacccttgtagaatttcaccaagtgaagtaaacctgcccaatcagtttcctgaaacaaaaccgccatataattttcaagttatatcagagcactaaagaaacagtacaagtccaacaactagcacttgaaatttataaaaggaaggcatatctcccagtaagttaacaggggagaaattcttttattatgttccccatttattatataactacaacaccacatcaactggctcaggcatcaagctttacttaaaaaattaaaggttctacaacttattagcactagaagcagcttctgtggaccaaaatattagtttttaagggtccgtgagttatagaaacaaaaacaaataataataaaaaaaaaaaaaaaaaaaaccaatcaacacttctatatgatgtcattctccagaaggaaaccaaaaaacaaaaaaaaaaaagtaaaaactaccagaaggaacaagcattgaaaggttatcatctaaatagaaagtacagaatgaagactaacagtgattccaatctagtttgaagtttttactacctcttacacgtaattttaccaagatttgatacagaaatcaactttcagaatactcacatatctctgaaggagaaatttcacaatgaagtggaaatatttttttttttatctaaatgaagtggaaagtttatggcaagtaataatataaatagtacctcagatgctgtattagctaatgcaaatgctgcctcaattcgaactctccaaaaggccttcaaaaaaataaaaaaaaagaaaaagaaaaaaaaaatagaaatctaaaattaccagactccaaacacattcttcatataaaaattcaactctgctagtggcaaaaccttcgagtcagtgagaaaattattgagagcagtaacaatgttaaatgatagctgtggtgatgtctctagcattgctattgcttgcgcctgagcaataacatctctgtccttctctaactgattaatctgtggaacaatcaaataatttaatttaagtaataaagtaataaaaaaactcatggcaaatagcaaggtgtaagtgtgactggcatgaacaaaggcaagctcaaactaaaggcaacgtggttctaaccagaggaaaaaaatggcatggaagttgttatcaacacttgtgaaacaaataagcagacacaaacaattttctagcatagcattattaaaacatgctatcaaatagttaaatgtttaaatcaaaaggattacttataaagttattaaattaaaacatgtaaaccaataaatgtttaatcccaaggtttacatattacgcattttataattaaatgctttcttacatgacttattcaaattcaaagacaacttatgggtcataatgaaagtggtcaagactttgaattgctaggcttgggtgacaggttgcaatgtagaaacggagtgggcagacaacttcatgaactggtattctttatagatcacaagaataaccatttggttccctcaactgacactactacttaaatctcaacaagagaaacaaaatgagagatagtaaagcagatcctacattcaatgagagctatgctgtaaatcacaaaactcaaaactcaagaacccattaaacaatatctacaacaagaacttttcaaggttttatgcgcttttcaaaagttaagatgagcttttccctctaccatttcctccaccatatcctgccttgtgaccattttcatgcagtcggccatataggaaactcagtgctcatgtaccaatttgatacactcaagtattatgaaaatctgaatggatcttttactgattaagagagcaaaaattacaaagtgtttccaagttttcgagacacttgactatctcaacaagagaataactcaacttttacaaaaaaaaattgatgaacatttccatctaggctaggttctatttacaatgaatagtcaggctgacaaaaatgactaacataaaagtacagccactagaattaatagagcttaatgactacgataactaacaatcgtattagactaagtccggatcagtttttcgttattagtttttgtgcctaggatatgttagacacattgctggtataacaggcatgtacctcacacacctttgaaaataatggtttcataatttttagcctatgttgtaagaaaatacaatagaaataaaattcgtattagactaagtccggaatcagccactacaattaatagagcttaatgactacgataactaacattcatattagactaagtccggatcagtttttggttattagtttttgtgcctaggatattagacacattgctggtataacaggcatgtacctcacacacctttgaaaataatggttttataatttatagcctatgttgtaagaaaagacaatagaaataagacaatgtcaccctgacaatgacacatgtggacatgaacatattgtgagactttatgtacgattatatatttaaattatacactacatacaatctgcaaatctatttcaaccatgctgaaaataattctagcaagttatccataaacatgacaccaatttacacactaagggacaccaaaaataataaatttccccttcattattttcagatacaatggggatttagtcccccctcccacacacatatacccaatcacttgagggcatgcagtgccccgtcaatgataattgttcagaagactaatggaataataactgccattcttacccacatctgtataggttgattaaaatgaatttcagcaaggtactccatttctggatctgctcgcatccataacaagggcgagtccatactgtgaaaagaaaagtttgacacacgcatgcaaagacacaagaaaataataattagatcctcctatccaaataaactttaacagagcttaaagaaatgaacctacctggagcgcatatctagaggaagagtaccatctccattgtcatcagatccatcaagttttgtaccctttttaggtttctgaaagcgtctagtggcaagctttgaatggcactgtatttccactaactgccatgtttctccagccattggcagaactgggtggtcaaatgtcccatcaagttcgtgagccctaatactcatcatcccaggccatccaacctcactatctcggttttcagattcaggcctaccattaacaacagatgcacttgaatctggaacagcagtacatccacgtaatacggctaattcaatcatgttctttcgcttgttataggagaaccccatccttaacaaagaaaaacggaataacaattgacataagtaaacatggttgaaaagaaagctacatgaagctctaatattttataccttagcagtggtgagccacatgattccacccaacgaggaaaaaattccttaagaaatggacgttcaagatttccaaccttgttagcgaaatgccgaaactgcatacaacagcttatagtatgagtacttccaagttcaaaaataaaagtagacataacaacatattatccgtcacctacagcaaaagaagagaaaaaacttgcccaaataaataaaagagctgaaaaagaaacttaaaagaaaatgaaaagaaagagttaaacaccgcaagtgccatcaatatagtgagccttttgttaggccttaccagtatggtattgtgaactttcataaataaagagggtaaatgagtaattgtaatgagtggtggggctgtgtaggtagtgtataggagatgggattgaatgggagggatcatggaaattgtatgggattgagctttggcccttgggagggcggaggtttctcgaataactcaggttctattgttctctttaacattttcttcacctattatccaataacagatttgcctattattttctagctactttctcttctccgtttactctattttctagtatctttcagttctagctagttgtgcagcaaattcctatcatctttctctaagtaaagacgaaaagcaatatccagagtgacaagagtatttcaaaatgatcccaccagaaaatatccttacctcctttgtactgagagacctcattgaacgagtcttatcctgcgcccgagaaactatagtctgcagaatctgtaacaaaaataataattgaaatggaagaagataaggcaatcttcttatcaacaaaattaattcatagcatgtgttcaaaacgtccttgcacacttaaataagcaaattataatttaataatccaatgagctggctgtctgattatgggctgggctattgctttttttttctactaaaaatataataatgatcaaagaaaagaattgataagatcttagctaaatacagcataaataaaacctgcaattaaaattttacaatagtattagactttaaaaatataaaacaaaaaccgttgcaacaaagtattctccttgtctaaaacaatttctcaatccaaaaatgtagtttaattataacataatcccacatgaaatcacacaaaagcttcgcggaatgaaggatatatttacatgtataattcttgtaataaaagtttgtagcataatcaataaaataatagacacacacacaaggaaaaaaaacttgagataaaaaaatctgcaagaatctgtacttttcggaaggactcaggtcccatttgcttttccaacatttgaaggattgccaccttcaaatacaaaattgcaaagaagaggacaattagcaaataagaaataataacaaataaatgaaacaaaaatgatgttattccaaacaaaagaaacaaaatttcaactaactcacagatttccatgatcttatttttttgtatagaccaatggattgagtgccatacaaatccttagaagaagcagaggagctcaaagatgtagcaccgttatcatctgctttgcatacggcacaatttgcctgcacaaatacttttcttctgaatttgacaatataagagatgacatgatgcatttttctttctttcttgaattctaacatcaaacacaaactaagagactatgaagagaggttttaagtgtggaaagattactggaacacttaaaatggcagggcactaagcagttacaaagacactgcaaagaaatttgttctttttttcctttgttttgcctataaaaccattcagactgaaatatcttctaggcaacaaaaaggcaaacatatcctcaatggtagaaaagaaaactaccagcataattagccccacatcacaaatatatatcttttattctaaggtttatcaaatttagaaatccaaatgtggaagcaaaccttgtatctcctgtagcgtgcctcattatttcctaaacaccttttgataaaaaaatccgccataaaaccagcaagaccgtcgagaagccattctgaatataataatactctaatcataagtacaaattatcaaaccatataaaaatcagtacatcttgagcacccataagtagtaacaaccatgttcaaaccagcataccatcatttggtgtctcgggagtgatataaacaccaaaccactgttgagcaagggcacaggcaagtttaatcctagtgtctattgtctgtcacagaacaattcatatgtcaaaataactaaaggcagcaagagcacgcacagtaataacaatatcgcataaggaacagaaaatttaacttgttaattataccaaaattgtcattatttgaaactataaaaggattcgtgaaatcagaaaatcatgggaattcatgtaaggattggtgcaaaagataccaacaaactgtgttggtcataggaagtagcttttcggctgtcataagcccataaatatacagttcatgctgaacgcccagtcactttcaaagagacctaggtagtgtttggttggtggaaagtaacaggatggaataaaagggcccagtctttgtctggtgaagatttgcatgtaagaagttcatgcatgccaggatgaattcccataccattcaatagttaattacttaattttctcatatctgcccttctcaaattttatttaccaattttagattaaccctttctccagtttcgatctttcaatcttgtcacttatcagagtttcagagtggaaagctcgggaaaatgttgaaacaaaagtcactggctactctctgtctgtcgtgccaagttattacactagaggaaaaagccacgtagagatgactaataaattaatcccatcacatcaccaatccacatctctttgccgctcaataaatgaagatccaaataatcaattaatactctcttttttttcaaaataaaaataaaaatagactgttgtcggcttttaaaataaatgaataattacccccttctagatttaagagcagtgcaatgtggaacaagataaagctaatcctaaaacctagctgctattgtagtatttgtcaccttccaacttcaaaccaacgaagggaacagtttccttttccgttccattacactgctccaacacttcaaccacacattatcttaagagttggaccacacacagtcctatggatcaaagttaaaaaaatggtcaaaaggaagccagactgtaaatttcataaataccctactctcttttgctttgttgggatattgttaaagtgcctcgtaatgtgattttcacgactcataatgtagctaagcatactcaaaacctcaggcttagaagtgaagtgagctggagggagttcgatttgcagctgttcaacaactacatgaaaacttaccctccttggctagtcgaattgttttagcttttctctttgtgatgttctgtagtgtaagctaatcagttttgctctttattagtttatgtttgctgggtaccatctatctttcgctagagtgttatcttgcaagtctgtttatgtccaccgagagcagtatacatgattaaagaggccatcaacaaaacaagagtgtaatcttaacacaagacattgataatgaaaaacaggcaaaataagtataaagccaagcatatccataagaataccacccacaatcttttaatcttcaattcaagtgaaaaaaaataaaaaattagtactcatatttctatacttcactacagtgtatgcacaaccccaaaggtgcagtaaaaccacttaagaagaattgaaaccaatcatgccataccatgcaatcaggtatatcattagctagaaatcttttttttttttctttgtgctagaaatcttaattttgaggttttgatttcccagcaaagccagacatattccattgataattcaaccacaaccaaattccatgttgtacgtgcatcattcatgtttgagtagtttcaacatataaaaataattatgcagatgaagcaattttgtatggtattgatttagatactcaagatcacagatgaatgcagaacttcaaagccactgagaacacaaaagaggagtctgaaaaagtaatcaaacctgatcaatgatcttctcatcgaataatatttgagagctaaaaatgctcatggaggctcccaagcctagtgagcacactgccatctctggttctataaaaacttgtttgtatgacccaaatgggaagtttactgataaatagtccttataacaactgttgaagggaaaataagattaaaaagtcaatagcagttactgaatgttgaaccaatcatgcaagcaacgaggacaaacctgaacgcactatgaaaaaattccacagtacttcgaagctttgataaatgaacaggtaagcacatatgtgatattacacaagattggtgatcaggaaaaacttcaaaaggtccaactactagagatatccactgagcactaactgcaacatctagtttatagacatatgttttgcgaggaggatcatccttgctcaaaacctgcagcgagtagtaacaaggacacatataaaacatatatataaagtgccacaacaagttacaccattcatgagctctttaatcctacagtgtaacctgaaatagaattcttcaattgaatatagatataactgcctcatgttgaaagaataggacagattactaaccaagaacaaacatgatagagatttagcaccctcaaatatcacaattcacaagctttataatgaaatggaacaaagtagacatttacaaaaggtgccaaaaaaatggaggaacaaccttaataaatggtgccaaatggtaaatgaaatgccacatcacaaggacaatcatactggagatgaatcaatacccattgtgagtccttaataactattacattggaaaaaataaagaaaaattacccaaagtaccatttttggcaaattttaacatttatatggtcaaataatttcttttactaacagaatctttgttttcaattatacggttttttctttttttaatttacaattttacggtgtcttgtaaaaagagcaacaacacaacataaaaacaaaatacaaataactagaaaacaacatgaaaacacagtccatatttaatatatatatatatgtatctaaaattccgtacaaccatatctttgtaatatttttgactttttttttggttagcggcttcaattttgaggagggggaggaatatatcgcccctaattacatgcataataaagaaatataccacaatcattctatcaataacattcatgacaagtcttaactgccaagagtcatccagatggggacacttaggggtgttcagctaattcaatccaatctacacttagtgcatccaatttaaactaagtacggatttcatattttgaatctaatctaatccgcttaataactcaaattcaatcacaaaagtgcgaattagattggtcattttggatttgttactttttaatattttgacttatttaatatttatcaaaaatatttttatttcacataataaacaacaaaataaaacaaagtattattgttttatgtctacaacaacaaattaaaataaataaaataaaaaagtaacaatttaaaagaagaaaaaattgtatacataaagaaatatttaattttgttttagactctattttctttataaaaaagaatggaatatatgtttgatctattaaggtttgaaatatatttgtttcatgatttgtattgcattttaaattagtattttttacattcaaatattaattatatctataattttttttaaatatataaatatgtgtagattggcttggatcagattagttacttttacatgtcaatcaacatctaatcagcacaagtacagattttagattttccactcctataaattggattgagtatttatgaacaccagtagggacaatgttattatttactaagcaggttgcataaacaatacctatgcatgcaaaggcatcaagcaacactataagaaaggaacaatcggtagaaaaagagacacttaaactatgaggggaagtggttcacaaattatcccttttaaattcaattggttgtttctactttgccaaaggtaaatgcaattgttgttttttgttgagaaattaacactaaaaaagttaaataaccatcaaactcaatactctcactgaaatggatcaaaaggatgcgtgcggtgagcgtgaatcgaacacgcgcctttcagatcaactctgacgctctcccaactgagctatccccgcaaattatgcacaaccagcaatcataccctggtatgtgtcataaagggaaaaacaaaacttcaaacttatagtggaattgctttaaaaataaggctttactaggtcacaatgtaagtaaattagttgaggccagagatatgatatctcaagggaaatatgccacatcaaataaaataacaatgtccagataagactaggtacttgcttttccattgaattcttatggttgatgcttgactaagccacgagcaactacagtaatg

SEQ ID NO: 296121 - DNA, 1484 bp, Cannabis indica
tttttgaaacaaagattgcaactttcattaaagcaaatcagctaataaaatagcttccaaacgagcagggacagacctcctactggaaatacgatcaggacatgaaccagaagaacgagctaaccagttagccgcttggttcccagatcgtttaacaaactgaactgaaacatgaaaattagacaaggatcgtataagatgaatacaatccgaaataataagaccaagaggagaaagaatatggctcttactattgatagcattcaccaacacaagacaattcgactccaaaatcaccgcggtaggacaaaagtcctcaacagtcctgccgtcttcccaggaggatttaacccaactcaaagcctccttcatggataacgcctcagcaacaacagggtcaatctcacctcggagcttgattgcagcagcagcaaagcacaacccagcatgatctctagcaatccatcccaacccatgactcctttctccaaaaaaaataagcagcatcacaatctcccaaaaacagtttaatccagtgctcaacacttaattttcttttaataacaaataacaaaaataatgtcatacataactaataattcatacaaagaatagctattaaaaaaacccacataataatattattcgacaatattattccgaataaattaaatataaaaatattaaatcatttataaaagaaaaacgttaaaaagcacccataatatcacgtaatattactattagtgtaatttaatatcaaatcccatttattttagtattataaaaaaattagtaactaattataaaataataatactttatcgtgctactaaacactatatatgtctcatagcaattcacttttaaaaaatataaatcactctattcaaatacaaaagcaaagatgttagtgattatgagggaaccaaatgtaaaactaatattttaaggggagccaataattacaaaaaataataactaaaaaagttgggaaaaaatgggttccgaaaataccctttatcataatttttttttgttctctctctatctcttccctttcttgatctccctctctattattagtactagaacccactcgacatcgtctctgcccccaaacctaccccgtttcccttactctttattctcatagaaatgcgatcgaagccccatccgcgacgtctctgtgttccttattgtcaacaatttttcacgagcatatgtaatttttctcttttttaggtaatttacagttaaactcgctacacttttaaattttgtacgatttaactcttatattggaaaaattatggctaaagtctctaatctctaccatcgtcttggtcagtactccttctgtcaactttggtctattaagtgtcaaagtggtctgtcacagtgtacaaaaattatacatggtaaatttttattggtccacttaatattaataattaaaaaataaattaaaatatttaaaaatt

SEQ ID NO: 296122 - DNA, 4866 bp, Cannabis indica
aagatatcgaggattaggaagaatggaatgaaaccaattgtaagaaatattttgcaaagaaattacctgacgaataaagccttcaagggtgcctagtttacccatggccatagccatttgacccatgtaattcgctacattcccagatgaaccggaggaaccaagagatccgcttgacaatgtttcagccagggactgttgtaatgcctccatcccttgagataatgcatcttctgcttgttgggaggactgttgtaaattcgtaatccccaccaactgctgttctgttagaggctccaactgatttacaagaagctgcacaatacattaattattcttttcattttctcaggtggaataatagatcaaacaagttatccaagttggttgagaaatttatgtataactagaacatattggcctattacaagtgacaaaaatcatgggttcataagtgatgcagtcgaattcactctcctcaaaagacgagcacaaatgtcaatgaacgtgaataaagttcttcctacataacatacagaattgttggaaatagaaaaagaaaatcacataaccaccaaaagattggagaatatgatgttccttagaaactgtaagtacatacttaaacaccagaatacataacaagttggtcaaaattacatattcattaacgcctttttcgttcttttccaagaaagctttttcctttcaaagaatgaaaagaatgatatcaagtggcacccagcactacagtcatttagatcaatggaggaacaaatgcaaaaaaatctaatccatagaacatttatatcacaagaatactatttaaaaagacaagagaaaccttctatggaagtatatgaagacataatgcattcgagtttggggaatgaaccaatgtgctggtttgggaaaatattaagaaccaatgtgcgagtttggggaaacttcaccttgaggagctctgacgagcgaaaaccaccgagccataagaaacacctttcagcaggagttttccacataccagacaacaaatgaaaaacatcagtctttgctgcaacgcccttgagcctaaaaatctcatcatagtgtgccaagataccgtcgttaataatacggagctctgtatcacctgcatgagaattaactgctgatctcagttcattaatctgtcgattctgctcttccaaccaacgaccatattctacgtcaaaggccatcgcgcctgcagaaaaaacgtggtcctcagattaataagcgatagacaaactaacccatataaaatttacagtaaacttaagtcttgcaccttcccaacttaacagttggacttggacagtatgtatttccattttgattacttataacagttatttttttggaggaaaacagttagtgatttaatatcaagcaaatcttatgcaataaaaatcagatacatacatgatttttttatttacttatcaaaatattttcccatgcacgtttatgggcgagtcttattacgataaacacatttcaaacttcaaacctcagaaaggatataccatttccactcatagaatgggcctggtctccagagcttgatataaagattccctgtagatagtagaattaattagaaattaagttgcatatcctatattagagagctcatttgtgaccgatagagaattttaacctgctgtcgggcacgttggagctcttgttctaattgcgtgagtttcaaacgactactctccagctgttggacatatgcctacaagacgagaaattgatgcaacttagtcaagacttactaagcagtagagcatgtaaatgaaaaatgttacacataagtattgcaagttggcaaattgcatggcaagcaaatctgcacagctatttaaaaatgtattacttactataactgcttacgattacgaaaggcattagtgtagattaaaaaatgaaacgagtagtgaataggggatgaatttaagaaaacccggttcataatgagaaacattgacaacacaagccttggaaaggcacacaagtcgcgaacccagaaattgatttaaggagggggaggaatattgatatgaattcacttgaagctaaatgttatacatctagggacaagggtaattataattgtgtgtatacatattaacttttggttatataatatgaattaaaagaaaaaatcagcatagtcaatagcccacccttgtcattcattaggtccgacactgaaccacacatatattatcaacaatcaaggtgtcagatggagctcaacaataacaaacctatcgctgaaggtgaaaaaaccccaaactatccatatccttaagccaaagctatctggacagtgtagacaattaactcgggatcgatatggctctcctggacagaagtaaataatattatagcttgagcactaaaaggtgtaccattttcaggacaatgatcaaccaatagaaagtaatggtgttgcaaactacttttatgtctcatactcctaattttctaatttataagcctaccatttccagaacaaaatggagccattatatcatgcaattaattttcaaaaaaaatagataactatactctctgcctaaccctataatatttagggaccaagaaactatatcacttacaatgtaagtacccaggaggaattcaaagcaatatcaacaactgatgtcagagaatacttgtcctatacttgtttcaatctccctttgttttaacaagtgtcaatatcattaaatgaggaaccaaccttgtcctatactttcttaattgatagatagctaacttccttcctatttctcgaggaactagatatccttgacactatttagtattttccatggacgcttccaataagtttatcagactcaaacggggagtaaatcataggcctaaccctcttgggttgcattgcatgaggatgatttattagttaatgaagttagcctaaagacaagatcaatgatcatttcagtatgttccaatgaaatctaattaaaaggattggttttggctgttactagtttgttactcagttggatttgttattattagttggccattcttgttgttattcttttattagttttcatttgtatatatattactgttttgtactattctgttagttaatatgagaattcgctcttttcattctctcaaacactttccttttcctaagatggtcattatcattttcccaaccatcttcaactttcaaatcatcccataacaacaaagttcagaatcacataaaaccaagataacaacttctagctactcggtccaaactgctcaatataaagtaaaaacaaagaataaagcaagtcactaaaaactcagaagcttggtttattatgaacttctaaaatgattgttacaattagctaatacttattagctaactcttaaaccatgattacaacaaggagaccatccagggattgaagaatctagtgctataactttatcaaatttcgatggtaaaagaatctagtgctataactttatcaacagttaagattcatcatatcagtctgagttatagtgagacatggaagaagccaacttgtcataaataattcaagcttttcccagatattgttgaagttttgaatgttgagaaaatattgagagaaatgtttagccacactaaacataaactttagtaaacaaaaggcacatttagaagacaattgagtataagcattttgaatattagcaaacaagaaacataagtaaaaggggttcatacttctttcgcaatcggcttttccttgcagcctcgcgattctgagcaagcctacgtagagtctgtaaacagaattaaacaaatgatcattacagtttcatcaaatttatacataaatatatcataaagtttcaacattatcaccttctgatctgatttatcctttgatctgtcacttgaatcagaagccgccataagaccatattgacctctatcaaactgcatacaaggtggggtatcacattcacaactttgataaattagtaaaaatgatcaatctatttttattcctaaaacagaaaaatcaagctttgtgttctcaatggtatcaaattttcgcatacatactcactcagttgaaagaaagaacatggaaaagggaaaaagaaagctttaccatttgattcttctcatctgtatccacatctgtagatatatcagtcctaggactggcatcagccatgggagttgactctttaccagtggttctatggcctaaaaccagatttgacggttgacccttttgagactacaacccctgaaactcaaccggaaccaaaaaaaaaaattgaaattcaagtttgtgggtataccttaaaccattcaaaggcacaacctttatcactttcgtatttttttaatgaaaaaaaaaaaaaagaacatacctttctaagaagtggcaaggatccaaagcaagtagttgaccagtaaatcttattgaattaagacaaagtttgactgagaggagaggtcttgtttctttggctccctacttagttatgaaatagggaaaagaaacaataacaacaacagagatatgcagctgcactaccattgtttgtaaaatattcaaaacatatataattatgtttacaggaaagggaagataatgggtttcttttaagaaagaaaagttggcatttttttgggggtactaattaacactgtgcatctccacaaatactgatatgggttttctccctcaatgctaatttattcatttttttgaccccaaataaaaatatatatatatatttatacatgtagtctcatctgaatactcctctgtctctcactcactctctctctct

SEQ ID NO: 296123 - DNA, 3758 bp, Cannabis indica
gacctcacctgtgtgagatttactacttgattgcgtatacttgcgtagtgtttaaaaatatagcaacatgaacttgttatatatatggaatatgaatgaatatatgactcaaaccaaaaccaatgcatatataagataatccattgcacttgtacaccttctttttcactattcatacaaccaacaatataattacaaacacatacacttcaattttaacacgcaagtaaaattaataatatttttttttaaaaaaagaagaataagtcaaaagaaagaattgtatatatattgtttgtaagggtattttggggaatatggtattaccgtaccagaagagaagagaaataggtaaccgtagaagagagagctttgtaccttattctctccgataacgacacatgtttttttttatttttattttttttaataaaaaaaaaagaaattcttgtgtttgaactttgaaaattggaattgaatttaataaaaataaataaataaaaaaaatgtggtggtcattgctgactttggaggttgtggtccccacgttgatgatcctagctggccccacctccttctccgtctccttctccaaaaatatcggccttgctttctttctttctttctttctttatttattgtttcattcctaaatatatactttttttttttctttctcttttgttaccttagtaacagaagagatcccagattttctttctcttgttttgtaacagggatgatgagatgaaggtcatctaatcttttcttattcttttcttgggtaagttttgtcaaagtttagtttttatttatgtatatatattttggggttggtgttattattataatggattattattattaatgataatggaagatgtaatgatgggtgtttctttatttcattacttgagttgagtttgagttgagttgagttgagtgcactgtttttgtttgttagtttagcctttatatttaattaattaatattaattttgtttaagtttggggttattatttatctttgtggggatttttccaggctattacggaaggtggtggtattttgactttgaagccacaactttgtctttctgttttgagagaggaaggtgttgttgttgttggtggtggtggtggtggtgattgtaaagggtccaccataagaggaagagtgattagaagaacaagttgttgtcttcttgttgatggactatggttatggtagatatggatttaagaggattttccttttaatggaggtcactcttcccttttctttaacctcatctttaatgggtcttcttggtttcgaatggtttgctgactttttcgattgaaacaaaaacaaaatcccatttttctcagatttcctcatctttgatttcatttcatttttgttgttgatgggttttcacaactgcatgtcttcataaaacccattctgttgttccaaagccttctcttctcatcttcatcaacaacaagattcaattgaatctgcaaaagggtttttacaaaagaaaagtctttgttgttgttgttgttgttgttttcaattatggatgaagagactacttcttggatcagaagagccaagttttctcacactgtttgtcatcgtttagattcttcaaaattggcttcaattccttttaccattcaccaagataggttctctggtttgaaatctagaccagccccagctcagcctcagcctcagcctcagcctcaacctcaagctcaggctcaggttcaggctcaggctccttctaatgagaaatcaattgcaagtagctctatatttcataccaaaaggctttcctataggaacaagcagagatctttatctcctaaccctgtgattaagctctcagagacatttagagaagctcaatcagaaaggaagagattctcaactccaactcctaggagatccgaatccgaaaggggaaggtttagagggaagttcttccatcacaacaaggattctcaatcgagatcttcgagtgcgaatgccagtcctcttaggcaattggcttcaatgatcaatgacaaatccaagaaccgaaaggattcgcattggtctaagtattttgatcccaatagtgggagagttactgctgtggaggctgttgatgaatggtgtgttgacttgtctaagttgtttctaggcaataagtttgctcatggagctcatagcagactctaccatggtatgtacaatggtgattctgtagcagtaaagatcatcagggtgcctgatgaagatgaaggtggagttttggcaactcgtttggagaagcagtttgttagtgaagtcactctcttatctcgactccaacatcgaaatgttatcaaggtacaaactttacattgaagttggctgtttctttatataaattgagtacccttttggtttgtattgctgaatttgttatctttttattgaaatttcgatgatgggacataaacagttcttagcagcatgtagaaagcctccggtttattgtgtcataactgagtacttatcagaaggttcactgagggcatatctacacaaactcgagtgcaaatctcttcccatggggagactcattcaaattgcattggatatagctcggggactcgaatacattcactcgcagggtatcatacatagagatctcaagcccgaaaatatccttattgatgaagagtctcacatgaaaatagctgatttcggtatagcctgcgaggaagcatactgtgatgctttaattgatgatcccgggacttatagatggatggcgccggagatgataaagcacaaatcttatgggcggaaagtggatgtttacagctttggtctcatcttatgggaattggtggcagggaccataccttatgaagaaatgaaccccattcaagcagcttttgctgtggtgaacaaggtaagtacaataaaacaatattaattggtgtcttttccatgttttaaaatgtttgtttgataatgacaatgtgtgttgtgttgtgtttcagaatttgaggcctgtgatccctggaaactgtccacctgcaatgaaagccttaattgagcaatgttggtgtttgcaatcagaaaagaggccagagttttggcaaatagtgaaagtacttgagcaatttgaggcttcatttgcccgtgatggaacattgaaacttgtcccaaaccagaatttccatgaccacaaaaagggtctcattcactggattcagaaacttggtcctgctcaatctcctaattctacatctactgcatcttcttcttctagttatactactgctactactactacattacctgtgcctaaaccaaaattcagttgaatatatcatttaattgtgaaaatgttatatgacttgggcttttgtagtttgaccaggtcaattgtatgtaattaaagaaaaaagaaaaaagaggccttgttttctttcactgtgtgacattcaagtgagatttgtgaatgaagaatagattggcattggcattggttttgaattgtgttttattggtttagactttagaacattctgataatatgatggggtggggaagaaatggaagatattttgttgggaatgatcacatgcacaagtggacctacatgttgtcttgttctcttcttttcttctctttcccttaaaattaaaattcttttctggtatttgttggtgtagaattaggggtagcaaaatcccgtgatcttttttgttgtatatacattgtattg

SEQ ID NO: 296124 - DNA, 4507 bp, Cannabis indica
tgaaaggggtttggatgaatttataaatcaaatagacaaacaattgattaattgaaccaaaacatacacaaatgaatgaaagatacttctgttactttattgatattgaataatctggattacattgaaatagagttttatttagggcataaaactcaacactatattcatgggttcagcttccacccacttggtgaagtagtcaacaatgataatggtgaatatgactcctcccttaccggttggaagtgatcccactaagtctattccccagacagcaaaaaggctatggagtgttcatgagggttatctccattagtggggcccttggaacttttgaataacgctgacattacatacaattacagacatattcggtaaaatccttcttcatagtaggccaaaaatagctttcacaaatgattttctttgaatgattgggtccagatgtgtgatctccacaaaacccttttatgtatttcatgcatgaatctcttatctctgttctagctatgcaccacagatacgtcactgataatcttctcttgtatagttttccgtccaagatcacgtattaaggggcttgatactgaaccttccacgaagcagctctatcctcaaggagtgtacttctctccaagtatttgagtattagagccatccaagaagttaaatggtcgatgacaaataaccctagtgtttctgtgctcgaagtgatcaaatgtatgattgggactagtctatatttttctatttttggatccattgctagttttgccaaattatctacaaaagcattcttatccttggggattcgctttacagaataatgcttaaactattgcaacagcccctaagttttagctacgtaactagtcattttttctccttttgtttagtactccacagacacttggttgactacaagctgtgaatcactgtagagttcaatgtttttagtgccaacctcttttgccaattgtaaactagcgatcatagcctcgtgttcaacttcattgttggaagcttcaaactcaaattgaagtgcactttgaagctggaggttctatggagattttaaaatgattttgactccaaaacctttctcatttgatgctccatctacgtatatcttccagacgtctctctctgggaccaacatttcaagatcttcatttatccctgtgcactccataatgaagttagctaaggcttaatctttaatcaaaattttgggctgagattgtatgtcaaattgactcaattctgttgcccactttaagagccttcctgacgactccgacttctatagcacttgacagagagggtggttggttagtacccttatggcgtgagcctgaaagtatggtcttaacttttgtgaagcaatcagtaagtaaaaggaaagcttctcgatcataggatatctagactctatggccagtagtttcttgcttacataatatactagaattagtacagttccttcttcttgcactaaaatgacacttatggcatgatctgacactactaagtacagaaacaacaactctttatcaactagcttggacaatattggagccttcgctagatgttctttagtttttagaaagtggattcacattctgttgtccattcaaatttgttatttcctcaaagtatgttaaagaacagtatgcacttatctatggatttggagacaaatctactaagtgctgctactcttcctatcaacttctagacgtctttgtgcttcctgggtgaaggcatgtctataagagctttaattgtctctaggtttgcctcgatcccttgtgaacttactataaaacccaagtgaagaaactttaaaagtgtatttcattgagtttagcttcattttgtactcccagattatggcaaaggcctcttctagatctttgtagtggttcttggagatttcaactttaccagcatgtcatcaacataaacctccatatttttccctagaacattcttgaatattttgttcaccattctttggtaagtggctctagcattttttaatccaaatgacatgaccttgtagcagtagattcctttgtcagtttggaaactggtgcgctcctgatcagccacgtgcattttattttagttatagccggagtatgcttccatgaatgttaagagttgaaatcttgaggtagcatcaaccatttgatcaatgtatgaaagtggaaagcaatctctatgataagctttgtttagatgtgaaatctatacacattcttcatgtcctactaggctttggatcagaaccggattggcaagccatatgggatatagagcttccctgaggaagtgaatatttgtcaacttgtctacctctatttttactgcttctaacctcgctagatctaaagttcttcacttttaccagactagttcaatgttgggatctatatttaatgcatggtaaataacagggggactaatgccagttagatcagaatgactctaagctaacgcctcactgtttggcttgatcatggaaataatcttttgcttcattgccagaggtaagttcatccccactcgaataaccttggtgggatttccatcatctatgcatacttcttctacttcctccattggttttatgacatgttccacgccaattcgtggatcaagctcatcttcctagatcaccctatgtgatttctaggaagatgttctggtttaagagtaataaccttctcggaccataactacagttctggttgaaacattatagcaactttgtgcacttctttgatctcctctgataagccctatacttccggtattgctggggaattttaagcatagatgccgaattgatgtcactacaccaaaatccattaaaaatggtcttcccaggataacatcataagcagtagggtaatcaactatcataaacgggttgcacttgatggatgatattgtgttgtttccaggaacttctccacttagagtcatcagaagttgtatttttctcatggggattaacatatctccattaaaaccttgcagttgaattggacatggtagcagattagcttccaccagaacaatggcttggaaggctcctttaaaaatgatgtttagagagcttccattatctactaggattctggaaactctttcgtttcctatttgagcttttattaccaaagggtcattatgaaggaagtgcacgtgcctggcgttgtcttctataaaagtcattagaaaatttatcatccttggacgctgggtaggtgattgtaccgagtggcaagctcactttgattcaactcattcaagtattgcttctatgcattctgagtgcttctagcaatatgaggtccacctgagatagttgctacataccatctaaggctggtaatgcagctcctagaggatacaaatttttgggaccaggggctacaactactactgctgctagagcattttgtaccccttaaagggcttgtacatttggagcttatattctagaaacttgtggatgacctactccctgaggaggatttatggctccctactgtcctagaatgaaaagctgtccgtgtgcaacagcctgtcctagatagaagactgggattcttacccaattggttaagtgtctgtttcgtactaacccctcaatttcatcttttaagtagtcacgttcattgatggcgtgaccaatatcaccatgatatttgtactttttcttcagatctcttctttgttttctacctttatacattggcagaggtttcctatagtgtaccatgaaacaggttgccttgtatacattttgttgagtatctatgagacttgtgttctcagtgtatcttgactcttgggtttttcctttcttcgtagactcactccgatttggaccattcgtcctccttttactccgtgagtgggttatattggactctggaacttcaactttttggtttgtttttctaggagcagcactgtatccgatttgtgcggttccgaatcaagaaaaactagcctgtgcagctagctgcacgaaagtagtttgtccatataccgtaggagtagtaaaagcagttggcagagggtaaatggatggagtgatcataggttggacctttattactttagtggaaggcgctgggagtactccatatgcttgagcgtaagcatcttctgatttatgaatccttgagctcttattaagaactcactcaatgtatgtacccttttgcgctgaagatctccacacagtaaagatccagttgtaagtcctaatgttagagccaccattttcatgtcgtcagtgactttgttttagcagtcacatccatcatgcgtagaataaacttcttcaagatttctccttttttttgcttgacgctggtcaaggatctagcttccaaatcatagtcctttgctgctataaacttctttctaaacattacttgcaagtctctccaattgtggattgatcccggagataacctcttcc

SEQ ID NO: 296125 - DNA, 3193 bp, Cannabis indica
  modified_base (251)..(251): a, c, t, g, unknown or other
ttcttcttgtttttctattgtttcaacaacagtagggatatttcagatctaaacatatacaggactacatttattttatgcagaaatattataaaaatcttttcttttcctccaaaattcggtaatggaccattatctatttgtaagaatttaaggttccgaaggtggattgggataaataatatatttgtagcttctggggttctttcaaaaccgtttttttttttgtttttttttttttttttttttangttcccccatttttcagaaattttcgtttatagatttctggatttgtcgttagaatggttacagttaatctgggattgctccattatgtggtggaccatgtttatggtgcattgatgcacagatcaaagataagcccaccatttttctctggagggtggggtggttcaaagcttgagctgctggagaggatgattacgcagttgtttccagacatggctggccagaattggcctcccacttccattcaacccatatggaaaacagtctgggaaagcaggacggcttgtttaagagaaggggtctttaggacttcatgcgatgagcaacttcttagtgcattgcctcctgagtgtcacaatgcaagagttgcttttctcaccccaaaaggagttccatctcacaggatggcctgtgtcgttcaccttgcaggtatcaacatggtattttttttttcactcccttccataactccaaactgtttaagaattgaggggacttttcttcttttcttgattcacttagtcatcatgctgaagatagttttatttttttaatggagttaaactgagacgtgtaagtttgttatagttatgataatacgtgaatgatagattgggtttttttttttagaacctgttaggaaatacttgacattatcattgccttgtggggaaaatcactgaatttgtgttcttctcattgtgttgttcatttgcttcttatgtcaaaatgtatccacttatgggttttgattactgggtataaacaagaatttgaagaaagattgttaattggtagatatttgcacacatgagattggttttcaagttcatttttccagaggagattgctttctgattatttacagctaaaggttttaaccaaataataattttgttattagtgccttcttttgttttgtgacttgtcctgttcagttggtttgatagggaatatgttcatttatattgatcagtattttagtatcactcttttctttttaattgaaacagcaattcttttttttttttttaagtttcgttcttcaacacagataatataaatgtaaagcaatcacgcttaagtatgacatttgataattggttagaataagattatttggtgctgctgtcttgttaattatttttggctcacgtgttaatgatagtatcttattttcagtttatagttgtgaaaacttggagaattttaactgagattagtgctttggttcctcgttccaactattttgttagtcaattcttgtatacagaaaatatgaaaatcaaacctttggcaatatctttgtgattacattattgcttggggaatggtcttcaatttgttacggtttagttggttactgactacttactgggctccagtgaaaactaaaccattttcaaagtgatttttagtgaaaggtctatgttttactctttgcgaagtagtctttcttgcctaagctcaatgctgtgccatacttgactttgcaaattgcaaagaacttttaaatttgcttcataatagcggaaccctttggaaactactgtacttgtaggaactggagatcatacatttgaaaggaggttacgtcttggagggccattgttgaaggaaaatattgcaactatggtacttgagaggtacaacttacttgagtcacttctgcataacctctttagaactgaaaaaaatatacatttatttactttgtttaactgaaggtaaaaaatgtactgcagccccttttatggacaaaggcgtccttcactacagcgaggtgcaagactcttgtgtgttagtgacttgcttttattaggaagtgcaaccattggagaagcacgcagtctcttacactggttagactcagaagaaggaataggcaagatgggtgtttgtggactcagtatgggtaagagttttttgtttttgtcatttttaatggttatatcttatagttaaaataacttcatgctttttactatcaaatttgtggccttaaaacttaacctccattaaaagtaaagcttatcaagttggtgtaaatggatactatttcgaacttgtgaaactattcttgtgatggtcaccccggagagggacatttttcccttgcgttaaatttaatatttataaacactaggaggagttcatgctgcaatggttggatcactgcaccctacacctgttgcaacccttccttttctctctccacactctgctgttgtggcattctgtgagggaatactaaagcatgcaactgcatgggaagcactgagagaggaacttgcagcacagcatgctgcaatgactctcgaggaggtcaaagaacgaatgcgaaatgttttgtctcacacagatgtcacccgctttccaataccaaaaaatcccaatgctgtaatatttgttgctgcgactgtaagtatctagaaattcacattggtacatttccatagcttgtggcattggcttaattggggttttcctacatgtgacaataattcgaataatacattcttttattgaatcttagaagcaaagaatcttcttagaacaattgctgaaagtaaatactagttccaactttactcttttgttgcaatcatgtttcaggatgatgggtacattccaaaacactctgttctggagcttcaaaaggcttggcccggttcggaagtgagatgggtcacaggtggccatgtctcatctttccttctccacaataatgagtttcgaagagccattgttgacgggctgaatagattacaatggaaggatgagtcttcattgtgacagtcattgcatgatatagctgactgcatatgcataattattcgttgttgtcatggtaatcttcttacctataatttcttctccaaaccttgtataatggtcttctaacatctgagagcacctattagagaataacaaagaaaag

SEQ ID NO: 296126 - DNA, 1769 bp, Cannabis indica
caatatacaccttatttacagctcacacacggtctgagaaagaccacaacccactagaaatttcgcaaaaaagatcttcaattagcctaagaatttctatttctgtacctacagaattgtgagcagtaagtgcgactttccttttatacaaaaggaaaaatttgctccagttttctcctcaagaaatctgatcaaacaaaatagaaaacttacacaagattagaatatcacatttggatagatagaaaataattgagtaaccaaacttaccctttttaccttattttttataaatagaaaagctacacaactttccttccaaaaataaattgattaatataaaagtcaaatacaaaatatgaaaaccaatgtaattactctagccgaatttaaacaataataacaaaatatttttgtcacattaactttggttttcagataaaatcaataccaaagttaatatctgtgaatttctgatgtagtctacagatgaaccaatatgatggacaatgcacctctcctgcaacaaaatagatttccaaattattgaatgaatgataaaagcatggtataagagatgcatacacaagcatagtgtagccgaactatcaataatcggccctccatcccctcctaagtaagaaacttgtgaagaacccaatcttgagatttcgccgaactataaaattcggacctagcgtttgtgacgattcagcctcctcctccaaggacagaaatggcgaagccctcctcctcttagtcaattaaggtgttactttctccccaactcgttaaagaagttctgattttccctccaataattgccacggaaaatctgtttttctatttatactttatttgggatattgagttgggaagaaaaatcctcggatgcttattagtctgttgataatttttagaacttctattcaatatttcatggaggagctcttgcagctgtagccgagtgtagccgatgagagtctttgggaagtaaaatggagcttctctcagggtaaaatataaagtaaaggttgaccgggcttgtaaaccgcccaaatggaataacccgcctaaaccaaactcaaaaaacccataaaaattacaaaccgaaataatccgaaaaaattacaaaccacccaatctattaattgggcgggttgaaattaggtcccacccgcccaattaagccaaccaacccgaccaacccaattttggattttaattttttcttttaactttttagtttttattatataacataaatgattaaatatatagtaatataaagttatatacttaattgttagttttaaagtaatatatattgtattgtactttggtggaatgtgatatttttaatttatctttttaattttattgattttgactttgaaactaaaaaaataaaaaaaaagtttggccagtttcgccggtttgggcgggttaacccgaccaaactgcccaaaccgttggtcggttgatagattttttttttttgtaaattgggcgggttgcacttcaattttagcaatctgaattttagattgacttagaaaatatataggataaaccgcccaaactgaccaatgtacagcccgttgacagaaggttaatgtcttttgtttattttcattaaaaaataatgaaaatgttaaaaataaatcattaaaccaataaacaacgttagacagctacattttatatataaagatatattaattcatttttttttaggctaattatgatttttgcccctaaactttgac

SEQ ID NO: 296127 - DNA, 1730 bp, Cannabis indica
ggatgtcacttaaattatttggtgctttcctttatatatatatatatatttatatatatatatatatattgatgattatataagtattgtaatatttatttaatcaatttcttagattcttctttgtataagtgttttgtgattttcttccttgtatatattattaatgacaaaaaaaaaaaaaggtaaatttgttagttaacttccattgatatgtatactatgtccgacaaattctacacacttgaaaacagtttaatcacttagataatgtataatagaaataaaagagagataaaatttcatcgtgggaagctagctatgctaataattgcatgatcacttgtctgttgtaagaaaaaaaaaatcatcataaaatacccaaaatagaatatttatgcaagaacaacctcaattcgatctatttaatcgtcataccacaaacaaatagacaaaggagagaaacaaacgggcacaagcaaccccaacaaaacccataattagcattaaaataattaaagaaaaaacagaaacacaaccacaaaaggcctcaaattccaaaaactctctctccaccctctttttttatcccaaattttaatcctatatccttctcgatcttccacccctccttcaataggaagggcgtagagaccgattgagctatatggaggtgaagctgtgtctggttttccttctcttggcagctgccatagcagccgaggcctactcattctccgagcccagctggggcctgaaccatttagatcatgccgtgtcaagcgcaagccgagttggggattacattggtgatgacaatgagaatttgttggactccgaggcaagccggcgagcgttggccaggggacgctcgtacattggctacggggctctcaaggccaactcggtgccttgtggccgccgtggccagtcctactatgattgccagaagaggcagagggctaacccttataagcgtggttgcagtgccattactcattgcgctagatacactggttgagatacgtacgtgcatgaatgatcataatgatgaagaagaccagagtaaaaatcagtaataccgtattttattaataaagactaattagtttatttaatgccatgaagaggtgttgatgaatatatacagcgatatattacatatattgttctccaatatattcgtcatgcttatttggaagattgtttttatttcctagcctccttttattgtttttatttttcaaaatgttttataaaatttgttgtgtcctttttcctaacttttattgattttgtgaaagtacattaattacagtgagcggaaagcggatcattttctgattatatgtatttgataacttttaattatgttcttatatatatttttccctttcgtattcttatgtcatgtttgtaatttgaatatgcatattttgattttgcacacgatcgagaatatataattcagccaatattgtgtatattcttccatttggtttccaattttgtaggcttttaatttaaatttattgtggagcttttagtagcacttattttgtttttaatttctaatcataaaaataaaaataaaatttgtgtttttgaaattttatttttaaaaaacaaatgtattttataattatttttatttttgaacttaaaaaatagaaaataaaaatgtattcaataactttcattttattttttatttgtttattttattttaa

SEQ ID NO: 296128 - DNA, 5388 bp, Cannabis indica
ttatcactactatgattatggtggtgattgttagctaattaaatagaaatagtaacgttgtagtagttaaaaaaaaaaaaaagaagaagatataaacagacttttttttttttaatttgcctaaaagggtatttttatttgtagctgattgttcatctgcctgagtttgtgacgacatcatactattgttgttacttttagagtccactttgatgttttttatttttgaaaataagattttgtatttcttgttatgtaaatttatggtgccttgaaagttacattattattttgggtagcatagcagttatagttcgatcttaacttcttagagtgtgaatatgtctaagatggtaagtttggtttctcttcacataccaagtgcaggacttagtgtgttggatgtatatgaatttatataatatgtgctcaaaaccatattacaagtatcatccttggtgtcccattacttttgtattgctctttcttttctttatttggctaaatgcagctctatgactctatgcttctctccttccagtgcttcagacaggagctccaaagttttgaaaggtggatcctcaagtacctcgaatgacaacaatgaaacagatgtgagacacatatctcaatcaataaattcaataatctcatgttagtttctatgttgcaagattgtggtgcaaaaccataaaatgtaaactttatatgcttgaacgaatttaacaggtctcatttccttcaacaagtgcttctaatggacgtgaatcactacacgaaaactctacttacatcaacaagaatatgtcatcaaagcaccgagcctccttagaaaaagatgtaagcaagaaaatcttctttttcttctacaatatgtttataacatttgagcaaattctcagggattgtttctatgtcagtgttggcataaagtttcactttgtcaaccttgacaatagtttaaacagagagtagtgatctaaaatacgacaaagttcattagattgttttttattgtttattcattttcctcctttctaaaacttatggtttctcacatacacatactaattttcagattgagcagttgcagtcgcgtttgcaacaagagaaatcaatgcgcattgttcttgagagagccatgggtcgagcttcaagtactttatctcctggacataggcattttgcttctcaggtaatttttttgttttctatcaatcaaagagctattgctaaacactccaaatatttcttatttcatatgtactttttgtcatagcttatacttattagagtaatggcttggagattaagacctgtgcttgaatcttcacatatcagaatttttatggggttcaaaaataaaaatttgacttaatttgtcaaccacatttgtaaatagttattgttggtagtttactttatgaacaagcttgatcaggactttaggaaatggatttgaattttatgttctatttcccctttctaagcaacagacaaaggaattgattgctgaaattgagtcgcttgaagaagaagttgcaaaccgagagcagcaggttctctcgctatatagaagtgtatttgagcatagtgtgagcagaccaccttctgagcagaactcagttgtggtttctcctgcacatccaaagcacgaatccaggaaacatccaagtatcatttcgagtgcattctgttcctctaaaaacttccctttccgaccattgcaagctcttgtttctatagatgatcctgggaaaagacactccaaaattgattctgcaaagagtgttccaggcttacccaaggtaggccataaactgtttgttatctatagtaaaatgtaagttgatgcattgtgattacattccattttcaaagagtatagacttttaattgtcttacttttattctgtcattaggaatgaatttcttctagttccatctttgaggatttttgacctccgcattttacggaaacaataaatgaacagatttaaggaaatttatgggcattttagaacatcttttcctttgattgcttcatgtttcatgttaatgccataaggtcagtgattctcatttgaattttcaatcatgtacatgaaaaggttcggccaatggagaaaacttctatactaagaaccctcagagatcatctccaccagtgcccaagcaagttgtctgaggaaatggtcaggtgtatggctgttgtatactgttggcttcgcagtgcagcatctgtcaaaactgaaaaaaacagatcacctatgttgtcaaggtcctccaccaatgttgtacagcctcggcgtggggttgaggaggaccaagatttgtctggaaagtccacagttgaaatattatggatatcaactgataagggccaattttctcatgcttcttatgccatcaacaactacaggttggtattaaataagtaatcaaactatagtatttgaagcaaaaaaaaagaaggaaatgtgtactttttattagttattttgagaaaatgaataaagacctgaggttctcttttccatattatatcacttgacactgacagtacttcatgctctcaatttcagagtcttagttgaacagttggagagagtgaatgtcaggcaaatggaacccaatgcccagatttcattttggatcaatgtctacaatgctcttgttatgcatgtaaaatttttacagcttgttattgtgtcaatgccacaaaattgaaaatctttttataactatctgctttatcactttccaggcatatttagcatatggcattcccagcagctctttgagaaggctggccttgtttcacaaggtaccttacttcttatttagcctaaattagcagggtggattagttgttttactgtgaaaaatgtgatagtgttaccacataaagttcggggtccccttttcttaacctttttctttttctcttcctttctaggggtcctgaattggagtctttaataaacaataaaagtatcttatttatgtagaggggttggaattagaaaaagttatggagaaaaatgtcaaattaaattggcttaatgtattttcagtagtttccattggaagctatccgtgttcttatacatttttcagttaatgtgttttctctgtgtaatatataattagttatgtgcatcttggtgtagtgcaggctgcttacaacattggaggtcgtgtcatcagtgcaaacaccatagagcaatcgatattttgctttcgaacgccccgggttggatgggtactcactttactctttttatgaaattgaaatcttcatttctagataaactggtagtctgctgtgtgttggtttggctttacctgtattttcaaaagcccttaaaaatatgagatactgtctaaattctttcatacataaatatgtatgtaatatgtacataagcaccaagaaaaactcattttcaagttttctttagatttggcataatctcacttcaccacaatatacatggaagatgaaaagagaacttttgtgcaactttactggcattttcagctatttctcttaatgcatgtttaacattattttcaatgtgtgaaatctcgttatcctgtaaaggagtttcctttcattgctcaaaaataatcattctctcacacacataaaaaggaaaatgaatcattacttggtttgaatgagtatgaagtaccatgtttcttactctcacctatgtttttatctgatttttaacttacagtggcttgaaaccatcctttcagctgccttaaggaaaaaatctggcgaagacagacgactcagttcaacgttgggtcttccgaattctcaactcctagtctgttttgccctctgtactggagctttttcagatcctgtggtaacttgttaattcttacccctcttacctttgcatacattagtatcgatctctttcatgagtgatttttattcatttcataatcatgagcctgctaaaacactccattgctctatgatgcaacttgaaaaacagatagagagatacatggactacaagtaatattggggaattaaaaagaaaaagggatacatttgtggcataattacataaaatttgtaagctgcataaacacaataattatttttagtggcataagtactaatattagtaaaagtgtaatttttgttcagtttcatccgtacagattccgttagtgttttaaacaagttacgctcggattctaaattattgggtcacagaaacgttattttcaaattttctttaaaaaattcaaaaactttaagacactgacggaatcgacaaactggacaaaaattatagttttactgacattagataattaggccgattaaatttataaatatcacaaataaaaatatgcctctttgcaagattttagaaacgtgacatcaagaatagtgcttttagaaacgtaacataacgattcatgcagggccggctctaggcataggtgggctaggcctgcgcctagggcccactcatattagggatccaaatattttttttaataatttttaaaatactatttatctttatagtaattaaaggtcaaaaaaaaaaaaatttgtctatcgcccatttcaactcaaggtcggccctggattcatgtaccctgcatttatcccaagaaatgcttccttttaaaccaaaagttttgaacaaaaagagtattcattttctgattatgacttatgagggtgcttcttaattgtttgtagttaagagtctacacagcctcaaatgttagagaagaattggatgaagctaggagacagtttcttcaatcaaacgtattggtaaagaaatcaaagaaagtatttgtaccaaagatgcttgaaagatatgcaagagaatcatcgttcagctcagatgatcttctgaaatggatcactgaaaatgtggacaagaagctccatgactcgatacagaaatgtctcgaatgtaagcccatcaagaaggcatctcagatcatagaatggttgccttacagttcaaggttccgatatgttttctcgaaggacttgaccgagaagccatggtggctctgacttttttctaaaatacttgtagaaccatagaagcattctaaactatcagagccattgacaacttcttggtagtaggaactagttatacattaccttcctcttctttatatgcttcattcatctgatctttgattttctcagctgccactatgtaacctatatagattccaaagttgatcctggtgtggttcattgtaattaactaaaatagtttcaatattgatttgggctttttttcattttttacacttctaaacattttgttttgtatttttacagaattctatataaaaacctttattgcaactagc

SEQ ID NO: 296129 - DNA, 3361 bp, Cannabis indica
atttttctctaaccaaaattttgttccaactttcccacatacttccgtctccaaattaaataacgcaatctattatgtttgaaattgtgtcttaattatgtgagagtatgaaggtaattttggtataatactcataaaaagaggaatatttgaattaaattttatttggatgtaaatttgattaatctttaaaagaaggtattcttcaacttctcccattttttatttatacagtagaacctctatctaaaaatactctattcaagaataatctctaatttgttataaaaaaatcaagtcccaatttgggccacttataaataaaaaataacatctaaattgtaattagttatatattttttaagtcacatattaataaagtatacctctatataagaataattacatcttctttttttttttagaaaagttctgttattacaaatcaatcgtttacaacaacacaaaaaatagccgagggtaattcctcaagccaaatacaatcattatcctgcactaaagcatgtttcgataatccatgagcagcatgattagcatctcgtctaacatgacgaacacaagctaaggggagattggataaatgataatgaacatccgcaaccaaatcgtgaaaataagacttaatgggtattggattgttaatagcattagcaagaagtagagaatctatttcaataaaatccaatattgtagattcagctcctagcaaaaagtagaccatggaacatggccttagcttccatttcttgaggctgatagcaaccatgcactaactttgacattgcagccttgacacacccagaggaattccgaataattacatcttaataatatatatacatatattttgtaaatttatttacgtaaaattaataattttattccaaattgtaatacatgtataaatattatatttactcaaaaataatcctattatgatatagtactattaatgattgtttatttttattattgttacattaatattttttggtattttaattttctttttttagtgtaactctatttagttttaatctttctcaattagaatataatttgtttggtcctaagagtatttttagataaaaattcaactgtataaaaaattaatttgtaaaatatgaagaaaagaaaactatagatctatacttttgtaatttgttttgttatttttggatttttaggaaaatatccattttaatttcaaaacagggaggggattgtatctttccataggagtcgtgtgaaatactccaactagtaatatttctattttaattacctatcatattgaacataattaaaaagttaattgtataggatttgaaaattatattttctaaaaaagtgaattgaaacaaaaaattgaattagtttgtgaaaacttatgaatttatttttaaaaaatgtgattggcatgtaatgttctttttgtttttgttgaatggtgtaatgttatttattgtttttgaatttaataataaaataaatttgtaattttaaaatgaaaaaataagagaatatttagagagtttttgaaataatgatttgaaaacaaatagaggatacataaaaattatgttttttttttagcttaaaatttagaatttgatttggatatagtttttgaaaatagtttaagtggccccaactcttttaaattttgaaaatgataaaacagttttcaaatcctatgccaacaaataagctaaatatattggtgcaaggcaatctcaaaactactgataattgtggagtaaatgatgcatcttactaaagtttccacacataacactttctcatagagaaaaatatatagcataaaaaaaaatcatatttttatgagcattactattagtcaatactattaggcactacaaccaagtgatagcttctaaatgtttaacgatattttatgatatttattgttgtcaaaggaaaataagtaataccaaaaattgcaagtattcgagattaacaagaacactaatttacagaactgtaagtatttacctagagcgacaaatactcaaaacaaaataacgagtactatgaaaacaacgtatatgtaaagagacacaaaattatagtggtttagttagagtatggtgatctgcttagtctacttttgtaagagtttgtaattactcttattctgactgaatcactcctttatatagaaagcaagtgattcattggattatataattagtcagacaagaccgttacaatattaattatacttaatttataaaaaaaaagttttaaataataaatgagagaacaatttcgattgttcttagttaatatttgaatgcatgcgactttggaggctatacattggcttgcgagctctctggtgttactcgcatataaggtccgtctttggaccacttaatacctctcagggtgacttataagctaaaaacgcctgcgactacatatgggtcatgtattgagcatgtattgagcgttcatgtattgacaatataaaattcgcaggttcaagatgaattgtcgcacacattaattattcggatcaaacacttgtaaagatgtgacctttacgtgggacgtaaggaagaaacatttagttcttgtatgtaattgatatatatgcgatttatggtaatttctcttagtcctgcttttattttattatattgggcatagtgtatgattagactttgtttcagtcacactctctcgcaaattttaattatgtgataatagctctattgaaactgttattgacacattattattttttaactggaaactaagtccacatgctaaatatatacgagactatacttatatttttgagtaaaaaattcctactataatatttatatatatatgatctgatatttaattattgtttaataagtgttgttgatacatagtaattagacaacattggtttttcttttttttagcatttttatatttgcattggtgtttcacaatatccaccggcatttgtagataatagaaggaatctgacattctctggcccgtctctcccaattttttcagttctagaagcacaacaaaatatatggttggaacttccaactgcccataaatgcattattttgatgttattggtgtctagcaactcttcgatgttattttgttatttgtgtagttaattattgtattttatataacttaaagaaaataaaaaatgtatatatagggcacttacggtacctagcacctttgtaaggggtaatgttggattaaaattctaagtggacacatatgtataatgtatatgctattataaagtgtgatataaaattaagtgaccaattatgttatgggtatcaaa

SEQ ID NO: 296130 - DNA, 4465 bp, Cannabis indica
aaaataaaaataaaaaatcatcactaccttaaacaactacaaaattaaattatttatttatataaataataaaaaaaaaaaaaaacttccactttaacaatgaaaaacacagctagtaaaccacaatccctctagccaaatgaagttaacagaattttaatgagtttattttttgaggggtttaaaggaagagatgatcaaaaaaagaaagaggtaatcagaaatcggaccaatggtgatgcgtagatgatgtgacaagagaagaatacctaggcctaagacgtagcctatctttactctgatcccacctgctgatgtgacacactatacactaacaaccagttaaactacgaatttaaaaacaataaaaatacacacagttccaatgacagaattcaaaaacgacgactaatcctacaaaccatcggtttttgcccaattttattttcccccttttctttttctcaattattcattaataacaattttccaatttataaacccatttctcttttctctttttcaatttcccaaatataaattctgtctaacaataataaaaaaaatcaatcaaatcggaattgataactgaaaaacggcatcgtttttaatttgacccatttaccttgagatgaacgattgcgacggtcttgtggtgcttacgcctcccagaggcggaggattccatcctcgaaagacgattggtagagatttcacctatgaatcgaacgtcgtcgttttgtggtgtcaataggcttagactctccggacgacgaatcttagcataagatagtactccatttctcaacatgaaccatctagatctccatcctttaccgtaattagtccatttgtaaagaactccggctactgtggcttcagatcccggcgtcctcatccccgcattgttaccggatcgaccaggaagcgctgctaaactcgccggcaagctacgagtcctggaaagcgtcgaaacctccggcgactggtctccgatcccgggtgtagtactttcgagggagatacaacacaatggatgcatctccttcactcgcatttcttccgatcccaaatattaattctacacaaattaaaaaaattaaaattatgaacagttcctgaatcaaccacccatggcaacaactgcccaacccccaaaaaaacacaatagtttctcaatcaaaatgccggaaaacaataataataatacctgaaaattaacaaacccagagagagtctcggggttgaagacgaaccagagagaacgctctgaaacttagagagattcggaaaaagagagagagagttaagaaaatcaaaacttatttactattataagctcgacgtctttttttatatattattatttatttattaataataataataattaaataatttgcttcaattgatggcaaagtatatatagggatcatgatacgtgatagagagagaaattggaggtggtttttgttatggcaatttggtaatttaacacaatgtggttgaaatgaaacataaggactcagactttgtttgaatattagttttcttcatcttcttccttctcctcctcctctttctccactctatacatatatatatagatataataaatctatatatatatatatattttgtagagagcaaaggtagtgagtcagaatcggtgagtgagcgagtgaaccattgattgttctgctgaggtgttaaagagaggggcccaaagttaaattcatcattatcatcaataatctaatcatcatcagaagattatattattttaattaataattaagaaaaagtaaaaatataatataaagtatgggtagtttttttttttttttttgacaaagtataggtagttttgtggaaattattagaagagaaagctttttgtagagttttggagcttcttgtaattatgtcaattttgttagatattatttaggtaaccaaatctaaatgtaactttctttaccaatttcttttttctgtgagaaagaaaatcttacttttttgactactaaaaatagttaattagtttttttttttcctgaaaagttaattagtttaatcattaaaaatgatttttactttttcttattttacctttttatataatattatatttttttaaaagaaaaaaagtttacaatactgttatattggcagtatttatttatatttttttaaattgataaatattattttagattctgtattttgtaaaagttagtaattagacatactgttttgttaaatgataaaattgactttttgttttttaataccgtacaaatagttttttgtcaaaataaaaattaataataaccttatctagagatgttatgataaaattggttacattttgtatttgtgttaaaattgtcttaaaattagttataataaaaaataaaagtgttaaaaattaaactcaagtcttagttttaccatttttaaaaatataaggtccattttatcattgcaattaataatttttagaaaatatatgttctatttacctttttttaaataatattatattaattttcacaacaatatttttgccataattagtgagaatgaaatgacaattcatttttcatggacgtatattttttaggttcaattaatgatataagttgtgggaacctataaagtagtgtaatagttaaatgaataattaaacattattaataattacataattttacttaataaaagagttgtggtacaactagatcgaagtagcagtggcctcacatctacaatctcaaaatattaactccaaaaataaaaaataaagtttagaaagctgagccattgattcatgacagatcttcttaaatggaaacttaactcgtagtcccttccctccttaaaattcctcaaattaccttagttctaggtacctatctattatttatttatctatatatttttattttaagaatggatacactttatttatttaattttttttataacttaacaaagtaatagcaacatgctaaaataataaattgcaacataattaagacattttccctgttaaaaacacaataagaattagaatcagaaaaacgggtcaaccaatcgaacatctaattcttggatcgtttaacaaaataaactaaaataaattaaatagaaaaaactgcagtatcacagttaaccttaaaatatttatattcagtttcttctaccattctaaagattcgaccccttagcttaagcacttaactattcgcaagatacgtaactgcaccactaacaacccctttaatcgcagaaaacttgttattcccaactattaacagcgatttgatggtgagctatcgaagaacaaagaagatgaactaacaacgaaacaaaacaaaacaaaacaaaatcatgtcacagggacaagactaatcgtagtaacttaaataaaagacactcaaaatcatgtcacatggacaatactaattgaagttgcaataacctaatcgcagtagcaaaaccacaatccgagaccatgccacgcctaacccgggagggtcgttgggcttggctagagaaaaagacaacctcagacaactaagcatttagaaatgagaaaccttggcagacgatagaaaatatctcaaatttattttgtaaatgaccatgtattatctaattatttaaaatattcttcacatcactactacaagattggtttttcctgaaggtgttaaacagtcgggcaaagtattcatatcaatttatataaccgtcttctatttgaccatcgcaaaacgggcgaaacaatcgccaagctaaacttcttaaaattgtcacctatgcttaggtataggcaacggtttataaccatgccctgtactataggcgacaattttaatttgttatttatagtatagaacacagttataaactgtcgcctatacccaagcataggcgacggttttaaactgtgccacagtgaggatttatgtcctaaataaaacacatttcaatataatcaaaattattaattaataaagactgaaaatcattttatattgcatggttcacaagttttttatgattatatgtttaatgtataaattttattaaatcaagaacatatagttaatcataattataatgttgtcaacatagtggaatataatcatgattatacgtttcaaagtttatgtcccatgatttgtcaatacactggaatcacacttacatgataaatcagcgataaagtttagttacaccttggataagtgttatgtcatttctagggcattgacaaagtatgctagtatcaaatgtatggagtatacatcggaccggaccgatattgacattggataagatatcataaacttaccgttatatttatctaagttaatatcacctagttgatcttaggtcaatagatcttaatcctgagatggttaggttcaatctcaactgtattatttatgtt

SEQ ID NO: 296131 - DNA, 1107 bp, Cannabis indica
tcaaacgatttgggagttagatggttgattattttgctcatttttctaattctaattccggtcgtatctccaataaaaaagagatctctcgatttgattgcaatctgttattttaacattgttattattaaatataatgatttattcccaaaaaaacaatatattaaatgttgttggtgttagtaatgataattttattgtaaaattcctacaatgtcatcggttcgtatcctatacatcttgaagaaaataataaaataaatgttacctatgtatccatttgaatagagaaatgttaatacttagcaattttgtaatgtgtaacattattattagtgtaatttaatatcatgtctcacttattttaatttaataaaaattataaaagaactactaactaatcaaaggatggcactccaaagtgatgttaggtactttagtgccctatagcaatactaatttgaatggcatgtgcacatagtacaataagactatgtttagctggaaggaaggagagtaagaatgatagtgaatctatagagggtggagaggataatgactctctcttgtgttgtttagtattgggagtaaatgtgtgaagatggagaggaagttatttattgaaattattatagtatcctaattagtatagatatttgtaacttttgaaaggataattttggtatttggtgtgtatattttgtctttttctcaaaatctttctaaaatgaagggattgaatttttaaaatttgaagggagaaagtctctctccacctttcctctcccttcctttctacttcttaccaaataagggatttgttctctcctttcaacccttctttccggccctcaccatccacctatccatccttccttccttccaaacatacatagtgtgaaagttgtaaagttggagctcagaattggacgaaaaaggatttgattagattagactggactgggcaaaattggattatgcagaaagtaatcatgtgtttggtttaagaatagactagactattttgtttatttcatttttttttttaaaaaaaacttaaattaaaattaaaatatataataataaataaataaaaataaataactc

SEQ ID NO: 296132 - DNA, 2331 bp, Cannabis indica
taaaataatttccaacagtccctattttcaaacggtcggaatcgaagatctcgaggaagttgaatgcgactaaaggtcctcgggcagtcaaaagaaaaggtaatcagcagatttggatccccaaagcttcggatactgggcgtgaattgagtttacctgaaaagggtaagggggtcgtgtctggcttgactgaaggaggaaaagcttctgtggctttttcttgtttgagggatgctgacgtggacttttccaacaaaaagaaaatggctttagttagtttgagtggtgctgttgggaaggatgttgggtcggccctagggaaatgtgggcctgactttgctgaggctggtggtgaaggggtcctaagtgttattgaagctattgggccagcaggttacaagtctaattctaggtgcaagaaggtggttgggcctgggttagttcactttggagatgcgtgcgtggggaatggattggctattgggcctgggagttcttccattaatggtcaagagacgaatgtcatatgatgagggggccttgtctaatttttttcaagcccaagacacttttcttcaagaactaaaaatgtttggtaaccttgatctctttgagatgaaaaatttgggtggtgatataggagttaagacttcctcggagcaaaacgaaagaactacaccaatcaagtagaggaaattgcttgagtcctctactcctcttcactatggaccgtggaaaattcaacgtcctcacccgaaggttgtttgtgatttcccttgggatagagaggccaggattgatattggtcgttgtgtgtctctgtctgaggaacacagtggccaggagagctctgttaatctgattattagcctgaatgaggaccttgggcttgggaagggtgtgtcggaagtggaggattctggttcccgtgtttcctttggtacccctgtggaggagcatgagtcatcttcttcataggagccatgagaggagttgcctggaactatagagggttagggcagacctctacagttcgcgaattgaagtccctagtgcgatcgtgctcccctgacttcgtcttcctttcagagctcaaggtggacgcgtctccgttggtacgtatcttttactctttaattttttattctaatattgtggttccttatgttggtactgctggggatattattcttgcctggagagtggggtttgattttgaaactatctctatctcttgtaatcatatcacaggtttggtttattcgaatcctatttcccaaccgtggctgctatcttatgtgtatggccccccatatttttatgctaaaaagaaattctggtttgagattatggttttgggagattagtttgggggcccttggctaattttgggcgacacaaactttgttctgcatgatacggaaagagaaggctcaaaggggagagatcagtttattcctatcatttccgggctgtttaattcctgggggcttatcaatctcccgatccagggggacaaactcacttgggacaaccatcgctctgggagtaatcatgttaaattggccttggacaagactttagctaaccaggactggatcaatgtgttcccaaatgcaactatctgctcgttccaaacgtgcaactctgatcatcgtcccctgtgtttatactcttgtgggttgggtgacaaattcaaaaggagtttcaaaattgaggaaggttggacaagagatgatagaagtaagatggttgttgaccatgcttggatgtcgattgttcactcgtgggcccctgctagaattttcaagaaaattggcgcaacacaggttgccctatctacttggaacagaggtcaatttgggaatattgacagtaccataaaggaccttgaaagaaagcttaataatttgcaaaggctcccagcgggttctagaaactggagggaggaacaggacgtccgacgctctctgaatgtctactgggagaaaaaagagttgttctggaagcagagagcccgggtgtcgtggctcacggaaggagacaaatgctcaaaattctttttcctctctgccgctataagaggaaggaagaatgcgattgaaagtatcttgagcaaggattatatctggcttactaggagagacttgattgggcaagagttcttgagtttctttggtgagaatttttctaggtcaaggattagacgagatcttaatcgtagaaatcttattcatgaaagattatcgtcccttgagcaagaggatctgctgaggatcccgcagcatgattgtaacaccctaactagcataggcatattatgtgattttt

SEQ ID NO: 296133 - DNA, 1281 bp, Cannabis indica
gacactgcaaagaagacataataaaaactgcctggtatgagctgtacaagggaacgagaataaatgaagttttccgaaaaaacctgctagtagtattttctcagatgtttaccgttccaataccgagtaactagaaccaactctatgttttcatcatacgacccaatttgtatgcttctgattttgtaacttcagttactttgtatgtcccttccccatttggtccgagcacacctttcgcactatctttagtgttaaggaacactcttccaagtatcatatctctcacaaaaaaattcctttctctcacatgcttgctgaattacctaactactttttgttgataagcttgtagctttaagtttgctagatctcttcattcttcaatttcatctaatgactctattaagagattgtggttggcctcctaatcataggttaatcttctgtgggatgaaggctgcagttctacgggcaacattgcttcatagccatagactaatgcgaaaggagtttgcccggttgccatccatttatacgaccagagtatctcaggtagttctttaagccaattacccttagcttcttcaagtcattttctcacagtgtccttgagcgtttctttacacctttgacttgaacatttttttgggggtgtgtgactgtcgagaagcttttcacaattccatgtcttgtgcagaaatcagtgaacatttggctgtcaaatttttttcccttgtctgacataattttttgaagaaatctgtaccaacgtatgatgtttttcaccacgaagtctaaaactttattggaagttatagtggctagtagtagggcttctatccattttgttatataatcaacagctacaactgcatactgcacaccgcctttttcctttgggagttgtccgatcaagtctattccccatacaataaatggccatggactttgtatttggatcaattcattgggcggagctctgggcaccctagaaatctttggcacttgtcatatgtcttcacatatacttttgaatcctcaatcatagtcggccaaaaacaaactctgcccccagctaggttgctatagaacccttcatgaacttaagtaagaagtcgtgcaactttaatatgattgttatgcgaatcatgcaatttgttttcattttacaattatttgttggtcatctataattggtatctatgaattcaaatcaaaattttgaaaagtgagattttgaatatgctttgttttttttttttttttttttttttttta

SEQ ID NO: 296134 - DNA, 2982 bp, Cannabis indica
attatattaatttttaatttaattatatttaaaaaaaatcgtgtcaaacgtgtcacatttgtgttaagcgggtcgtgtcgtgtttgacccgtttttatttcgtgtcaagtcgtgtcgacccattttcgaccgcttctaattttctcgatcctaacccgtaaaattcgtgtcgtgttcgtgtactgtgttgaaacccgttttgccacccctaaatgccattatgatttagaaaaaatatgtgatgcacttcaataaattagtaagaaactcccaaagctgcattccgaacaccccctcccattacatcacttctaaagcaaataaaaaaagaaaaaattagaagcatacctataataatttttttttaaatgaaatttcgaaataaatattaataacaaaacacaatagagtgttaaaaagacacaaaatggttaaatcttaaaaataagagcataaatgtttttgcaaaaaggattaaattcttcttaaaataaaaaataaaaaatttcaggttggacaaaaacttggggatctcaattctgaagttctatttacttgttaagtcacgaagttgttacccaactatagatttcacgcagagaaatgcagaaaaaaacaaaaagagtgagtggaagaaagataatggaataaaccgaagaagtattggaaaaagaaaatgtcttttatttgaggggagcacaataattgacttgataagcttggacagattccttgattcttcttcttagattaatcaaatttaagaaaatagatagttataattttctttggtaagttaaccactacggttatgtatgagtctaaaagggtagtttagtttgtgtgttagggagtaaacataattacataaagactgtttttagctttctactttatttgtcctaacttagtgtatgaccacatatgtctatctctctgggttgatcttgactctactgttatacaattatattcacctcacaagttaccattatcacatgttaccactaaaataatcatattttctatataatgatattccacagatcagtccaaaaagataaaaggctgtaatcgagacattataataattatatactattaactttgtcatatatctcagaattcgaaaaaaaagtcacacccaacccaaactctattctcaaggactcaaaaatcaacttttgaagctctcaactttcatttttcttatctctttcattcacattatgcagctccagccattacttgctgttctgaaaagcattgcactaataattattatacaagaaattttgttgaatggagactccatatcagaggctgctaaaatcactagctttccagggcagccaccagtcaatttccagcaatattcaggctatatagcagtgagcaaaaacccaaaaagacaactgttttactactttgttgaagctgaagccaaccctgattcaaagccactggttttatggttaaatggaggtaaatattttgctcttaaacttttctacttttggctctgtcattagtgctattcttaacagatgatacttttctggttttcttaatcttaagggcctggttgttcctctattggagctggtgcattttgtgaacatggacccttcaaaccaagtggaaatacactgcttaagaatgattatagctggaataaaggttctaataaatgacattttcttcttcttcttctttttcttcttctctcactggttgttgattttgacaagttttcttctatagaggcaaacatgatatacttggactctcctgctggagttggtttctcctactcagctaacaaatctttctacacagaagttaatgatgagaagactggtacaaacattggctttaaacgaaactacattaaatccaggattatctaagaaatttgatgatgggttctgtttcctttcagctcaagataatcttatgttcctcaaaagatggttcattcaattccccaactacaaaaacagggcatttttcattacaggagagagttatggaggtaattttctaactgaaccaaataaaataataaaaaaagttcaaagagtatccaaattgaaactgtttttgtcatcaggacactatgttccacagcttgctcaactcattgtccaatcaaaagccagtattaatctaaaaggaatagcagtaagaaaactatatcattaactttattctgatactggtaagactattatttttgtttaattataaataggattgggaaatatatgttgattttttcagataggcaatccacttctggaattcaatacagattttaactcaagggctgagttcatttggtctcatggattgatttcagattcaagttatgaaatggccaattcagtgtgtaactattcaacatataggagacaagttcaagttgatggaaacctcagccctgtttgttctcaagtatggagaaaagtgtcaaacgaaatgagtagactcgttgactcatatgatgttactcttgatgtctgtttgcccccagtttttgctcaatctgccatgcttaataaactggtcagtttttctctttttaagttgtaggaaaatcttcgataattataagattatggaccctttggcttagagccaaataggacatttgtatgttttgttatatttataatgggttatttacaggatgaagcagcaaaaattgatgtatgtgttgaagataaaacaatcaaatacttgaacagaaaagacgtgcagaaagctttccatgctgagcttgttggagtaacagaatggagtgtttgcagcgagtaatgtattttcttacttttaaagttaataaattaatttgaaagaagaaacagttgagtaattcctttttcatgataagaaaaaacaaccattagacgtgacgtgagagtttaacacacttaatttttttttttattttactatttttttttattttaaaataaa

SEQ ID NO: 296135 - DNA, 6029 bp, Cannabis indica
ttattaatttttatttattattatttttatatatttttattttaatttatatttttttaaaaaggaaattaataaaatagtctagtctattcttaaaccaaacacagaattactttcagcataatccaatcttgtccagtccaatccaatcctgcgtaccaaacggaccggtaaacatcattttgtaataatatttttttggagaattattccatatactatttttttaatttttttttttcaaatttacagtttgaatttctaaagtggttgcagtgctagttgcaataggggtttctatacgattttttgttgcaatttaagtcacagcactagttgcaataagagtttctatgtagaatttcgtaacaatgcaaataaaaaaatattttaaagtgtaaaaaaaaaaaaaaaaaaaaccctatttttttctaagatttttacacttgggatccttttttaattatatacacccaagaacccgtattcaagtgaaacagctgtgtctccgaaaaatggaaaatgaggatggacaaagggtcgtagttaatggggaaacattctataaaccaaaactctcctttactttgttccaacttcaaacttttaagcctcatcgtctgagtcctgcacaattctgtctctccttaccctcttcactggtacacctcgatcgtcatcatctccatcattagggtcagaatctggttcgggagataaaaccttctgattagatccattgtcatcagaatcttcacatgtctcgttttgtgctgcatttgagttgttatttacagcttcatcatgattaggaggagcaacttcttcatctgtagtgctgttgtcaataattttgaagtcccgagcagtgctccgctttgcgtgtctcaataagttgattttgcttgccttgctaagttggattaaaaacttctcataatcttctatctggaatatcaaatctggaatacatctattctctcttttaatcttgttgatgattcctttactgttagcattctcttgttgaacctgcaaattaaataggaagaaaatcaagcaattagttataatttgattttgtatacacttatacatgtttgtgaatgtatgcacatatatatattatatgaagacaaaagaatggatgtcaataccctctgcatctcagctacaaagttatacagaggaatagtcagctgtttgcatgatatatccacaagcttctggaactcaagggagggcaaaacctgcttgcaaccttttggagcaattctaagctttgatatttgagctaagtgcttgtaaaaccttgcagccaatcggagcagagtctcagcttgagcatctgcgttttaaaattcataatactacggttatgcactaaatattatattggttacggataccaatctctatttaaaggttgcagactcaagattttaaattgttcaaagaaaacttctttcataccctttaggctcattaaaacaaaagaagctagtacttttgcaactgcttctgccctagagtaaagatgctcctcaaacgcctggccaggaatttgttccccatttggattaacatgaatgtttttgtaggagagtaaactgaaagtcttcaactttctcatggcccaatccatatcaataacaaacatttccattaagtgcagcatacaagaactcatggcattataattatttgcagagctatttaaaagaggatatacttcagactctgtcactggttcatgtgcctctgacgccataacttttaacagctccgtagcaatttcttgtgctatgcttaaatcgtttggaggaatgcttaaagaaatagcaagtgtgataacacttcttgcaaccttggaatctgttatttccttggttttacagacacgaatagcccaggctccatgagagtccctcaagtcacgtggtatagtctccccaatcatcaatatcatgccacaaataacctgaatttagcaaagatctcaatgtgtgtgtatttacaaatattatacaaattaatatacttacaaatgaggaaaaaagtacaaagtccctacttgtgtatatttgaaatgaataataacatgtacctccactgcatcagaataggaacgttgaagaagttgaaagaaaagtggcttcaaagttttcataataaacaattctttgtttcttgtgggttgatcaacaatcccagaagccatttgacattccccatccaaactggcatcctcgagagtggaaactgacaacaaatcttccaacaaagcagtgatgtctagactgtctggactctttaggccaatcgttatcaattccttcaaacatactaaggctagacaaatatattcgctttgttctccaacatctttctttcccttcacctcttttttcttttgacttgcctcagacttgcccactggtttaaggatatgtattaatctcaagagtgggggtcccagattcctgatatccccatacatcaaaagtctcaagggatcatcttttccaaaaacaggaagtaattttatatgatgaaggcaggcattcagaataaaagaaataatcatagagcagccttttgatttcttgctcacagatggctggtcatggttttggggagttccaatcttactgaagctttcaggattaaatagtttcggaatcatttccataatctggcagatactcgaggtccccaagaaagaatttcgtctttgaatcacttttgagctgcctagttcaaagttgtacgtatcatgagcaaaaggtcgtgtattcccttttctagtacccgtgccctgctttaacatggttacatccttttccaatgattgatgaagttcaacaaattcaacaagctccctttcaagatccaacctatttgcatctgttgctttctccaaatcattagcaattacattcaataccacttcaattattccagataaaatcaaagcacgacatttggttttttccaaatcaatagatgccgactctccatcctgactttgacccaagttgcctgatccaacataacatgtcagttgtatgaattttgcaagatgtggtaagcaaaaaaatttcagaaagactacaaatgtctgtattggtgggaatgcgcagaaaactattggacaaaaagtctcacaacaaacctcccaggttaagatttcttagaaacttctgaatcttatggaaagcattggagaatgattcaccagatgaacaccttcctgtctgcagcacatataaatttgtgacattcaattgaactctacttacttctcaaatcaaaaagaagaaaccatatatgaaaacaacttgctctattttgtttatgaggaactagaatacctcgttctctggtgtgagggaaaatccaaaacatgcccgtgaagaatccaaaacatgatcatttttaccatgttttaggagtaaaatccaagagacacaatgtaataaactatccaagggctcatcaatataaactttgccattctctgatttaatacaactgcaaattccaagctctacctctgcaccctgctaccataagttgcatatcatttaaaagttaagcacaaaaattcatgcataaagtaccatacttatataatactaagaagcagcatttagaattctttcattcaatggatataaaaatgtaggaagaagcgaatagacatttgttgtgcccagaaccataactaatacgtatgtggatggatttcacaggaaaatttaagtatgtgagacctaactgtattagtgtgtggagctcaacatctcaagtgcctcaacaatactcaaaaaacatgagagacaaggaggagacaaaatttggcttaaaggattgagcaaacttaacatttttatcaatacctcatggaaataccgacagaagtgaggcaacaaaagatcaaggactgctcctccacttgacgggtcaaccaagacaagctttatcagtccatgatacatagttcctttgatttttgcctatgaacaacgatgtagctgtaattggagatatggttttaaacaaaagaacaaacatgactttaaacaaataaatagggggaacacctgctgatagagacacctctgcagcaaaccactcagctgctgaaatagacctcctccactgaccgatatgtcagcttgttggctgcaactggcttggctggacgattcttgagcagaaaatggaccatctctcttagattgcttttcagctaatataaggttaataatagcactagttgctgcatgacgaactgcttcttcctgtctaaacatggccttgcgcatgaccaaaatggtgtaatcctgcatcaatgaacagtgtgtggtcttggaaatagagaaataggtgattcagcacaattagaaaatcagttatgcattcaacaaacaaattgtaacggtttggactttgacagctcacattgagctgcatcatttttctgttgtaaaagtctgcttataaataaagtttctctagctcaaagtttagttaagcagtttcatttcagtcattcttccccatttcatttctctgtttttactttcttctcaaatcaagaaattcagttcttgatttctgttatggtatcagagcaatggcgtctaacgaccaacacaatttacctccacgcaatgaacaagttcgtccacatgctcaagctgaagaaattcctcaagctgctttaccaaacaacaatctgctcccactaaatctaagactagatcaatccaattgcaacttttgaagatctctccctattcttcatataggatctagcactttttagtcaaattccaattctaagtctcttgttcttcaagatatccttcatgtgcccaatgttacaacaaatttaattagtatctctcagtttactaaggataataatgtaacccttgaatttgataatgtttgttgtcttataaaggacaagagcaccaagcaagtacttcttcgcggtgaagtctatgatggcctctacaaactcaaagttcctcagtcaaagtctaacagctcttccaagtctatttctaagcatcaaagtcctactgcttttaatttcacaactactagtaatccaatgtataataaatctttgttcacctctgtatggcagtgtaggttaggccatccttctcatgttgttttagctaaagtgttgtctaagaattcccccagcaccaactgtaataaatcagacttctgtgatgcttgtcagattggcaagctacatcagtttagtttcaaaagttccagttataaaagttctgctccttttgatttgagtttatcaaatgtttggggttcttctttctattcctctactgatggttatagatattatttgagctttgttgatgatttcactcggtttgtgtggatttctccaatgagagctaaatttgaagcaacaaatatttttgttcactttaactcatatgttgaaaggcaatttcagctcaaaatcaaaagtatttgaaccaatgtttaaaattgcagatttaagtctcatggcgtttttttttttccgtgaggcgaggcgtaagcctcaaggcgcattgaggcatacgcctcaattatttaattaaaataatatttttagagtaactaaaaatactaaggataagtaatgtcttataaaaaccaaacatatcataaaatgtctaataaaacaaaaacataacatcaaatgtctcataaaactcaaacgtaagtaaatataattttgtttctagaattagaatcatattctattatcctagaacaaatttcagcaataatgacatgatgatttaggaatcactaaattcatcattgcttgagaaattgttgccctcatcatcatcatcaccatcatcatcatcactactaccacccccattgtgatcataaatatcctcccattcatcttcatcaacctcttccaagctctttcgttttcctaagaaaaataattacaaactaataatcaataattgatt

SEQ ID NO: 296136 - DNA, 2834 bp, Cannabis indica
tttcgaagttggggactaatctgtatcaagctgaactttttgaggactttggccgcaaatttccctaattatattagatattcttactcatttttacgataccgaaaataaatagagttcgaaaaagttatttacacacgtactaaaagaaatactagtacaactaaatgtttgaattttatttccgacataataaattattttaaattttttgaaaagaggtgaaataatgtttgctataagcataatgtacataattatataaaaaataatttaaatttaagttataatttctctaagtgctataaataaagatattcatataactactgatatggacaaaagtaatatcctcacaataaaaattttctatctttatattaggaaattaatatgtgtttcgcgcagtgttgcacaataattataatctttttaggtagataatgtttttgtattaaatgagtgttgtaatttaaaattgatattgtgttgaacacagtattagtgcacaactgacactaatgcttagtgttggtgttatggccaacgttgttgatcacccaacaagtaggttaatcaccaatgctacattttaagtttattcaataactttgattaacaacgttgaccattacattaatcggtgttgaaagcacgtttttgtatagtgtattgatcacaaaatacaattaaatgaaagttgtttaccaagaaactaaccttggtgatgtggacattatttttgacacgtgacaagaaggaaaatattccttgagtctagtatccctagtgatcatagcattcaacttgaggaagggtccttagcctaggttgacataggggatcccaaataggtatttggatctcgcgaagtcatttacgaatcaacatccttcaatgttctgagctaacaattaataaatattttgattatcatttaatattctgaatattaaataattttttattcaaaatccattattttaaaattgattaatctagaatctttcattagtcacatctaagtgattaatctattatttatgacaattaataataaactcattagattctatgactaatcaagtcagatattgcaatgaataatttcagttcacatcctatcttattttagatcacggacaatctcaagtgactctaatatttaagataacttaattaataagaatatttatttctcatttcataaacgatactctaatatatatttattaattagctccttaatcttaaattttaataacatgttacaaatagattcgccacttgaatggttttttaatatactccaagtgtatttaatactcacactcaattagacagttttatgtttgtccgctgcctttaatcatgtcatttaaacttcttctcaattgatgattttgttgagctaataccaattcgatcacaccagctggtgttactttcatctaccagaacagacacaggttcaacaactgaacctactcttaggaactcgaatactcttagacagaattgagaaagaattatatctttattgatacttagtgtttattacaagtgatgatagaaactagatggccaataggctatttatacacacaagtaacagaatgacacataactaacataattatcaaaaacagttatgttagttggtgtcctagatacaaggaagggtaacatgggtattagtaggcacaccaaaattaacagatttgaaatttattacttgttcaatctcattgtacaagttccctaaatttcaataattaaacaattattatattcaatacatgtatctcatactatgaatatcttatcaattatttattcaacactctattaacatccctaatccctaatttcatgatgcattattaaatctatatttaataacattatagacgagtaattattcattattgatatactttctttttttttaagaatatttgataacaaataattactattcttgagtatattatattgtttgaatttaatcatatcataattcaaagtcttcatataataattcaaatatctaactcctaaactaaatgattcaatcattcattgcattcttaatagatactatatttgaactatctcatatacctttgttgattatcgtaatcaattttattttaataaagtcaaagtttctcacttattaaacttctatattcattatcatttgaatctattaaataatgactgagactattaatatataattattgaataatcatatttcaactccaatgttcaaaattagaaagtattaactttctcattaatttcttttttattgtggtttgattcactaatttaaattagttagatattcaaaccactcttggtatatctagtatttcaataaatctcatttatccaaatctatttagttctttgaactcaagattttcgttaaggaatactaattaatacatttaagaacaatctatttttctttcattaatatcatctattttaacgagtagtaaactctcactaaaatacttcttaccattgtatatatttgatcgttctgactattaaaatttaatttttaacttttcaaaattaattccttttaattgtcatcaacactactacaatatgggcctttagcttcccttttttaacccattttataaaaagggaagctaaaaggtgtgaaaacacccaccagatttgaaattgacatttagagacggttttttagtaaaaatcgtaagtatatatattagtaaaccttatctcgtcggttggaaattggaattttttaagggtttctgggagaccttatgtcgtcggttcctagc

SEQ ID NO: 296137 - DNA, 6729 bp, Cannabis indica
ctttttcatcttcatcaaaaatggggaaataggtccctttggaggaaaaataatacttcttgggtacaaaaaataagccccagtgcctaggttgaaacttgaggccggcgttgtgcccaagtttaggttttgttaacctgggccatttcaaatggagtatttttaggaattctttcaagaatcttctacattttcaaaaaatattaagattcaactatttctggaaactaaatagaattttttagagggccacaactgggacccagtgctcaggttacacgtagggctgggcccagcgcccaggtggacacaggttgacatattatcaacctaggctgtttccgatcaagttcaacaaaaagtgttccaagaatttttctcctcataaaaataaaaaaaattcaagtaaactcagggagaacactaaaatattgagtccctagaaacggggcctaccacctaagttgacttggtgctgggcctagcacctaggtcgataatcaacttgggaagttgcctttaattgctcaaatgccaaatttgatacaacaatttgatctagaatggctaagactggggtaggagaagttttccttaatttcataagccttgtaagtatcaaaaaggaaatcccaggagttcaggagtaattacccaacgccgaggttgataagtagcctagtgcgctaggttctacttatttgaatctgatgtcgttttgaccatccgtcttgttttttacaatgaaaaagatctatgaagtcagagaagtcaaattcacaactttttatttctcatttccagctcacccaaaaatgaagagtttcgagtctctcatttctacaaaatagcaacatctccgaaaaccggtgaccagctttaccaaaacacataaatagattaagtgatgtcaaaatatcacttaaacacaataaggtacatcccttggacgtttttacacttacctagcgtccaggttgacgtcatatgtcaacctgggcactggatgtcaatcttgacgctgggtcatgaactaccttcagtaaaatagatataactcactcaattttgatttgatttatgcgattcaacttacatttggaagctaattcaatgctctatttagcaatgtctcacactccaaacgtaattttgaagctatcgtcgtcgaaattcacccccaagagacttacaaaaataagctctgagttacccacagtgggacccactaggctctgaaaaatagccaccaccaccaggagctaattttcaccattagatatcatcaatggtcaaaaacatattattgtattttctccctattttgtgggcctccttcacctataaaaggagagctcccttaacttttttttcacattcaaaaaactacccacaaggtcagagcttttctctctctagaatttggaacttttgacacttagtctattgttgtaaccatcatcgcgtgagaaaaaaaactcgatgtaagtgtcgttccattactatcgcgatatagggagtgaaatactataaattggttgtgtttctcttataattacttaaatacttattcattcttgccaatctagcgagcgggtgtggcttagaagtctagtccaaatttctgagtcaaaatttttggtgctttcattgagagccatagctcaagaaagttactaaacaagatggttgcaacacattctaaaagtgttgacagacaaagttcataaactggcctagcaattgggggtatgacaattggtgggttggaacggagactacttttgcgcctcaggcgccaggagcagacctcagaattggctacttaacttttcctccaaggccaccaccaactgctctcgggactggaaccaacgacaagatcccacctaggcagccttgcgtggagatagatgaccctgaggaggccaatcctcaggtcgctcagctcagccaactatggctgaccttcaacaatagttacgagactccctcgataagcaacatggatagtttcaacactggtttatggaaaactagaagaacattgaaagccaatacattgagcaggaacaatagagagctgacatgcctcaacggattagagaagcttataattctaatcccagaactacctcccgtagaggtatttctgagctggtgagagagactccatatcgaccaactaatcacatgggaactagtgcccaaggtgctaaacctttaatgctcacaacaccagtgctacacccaataattgaacagacattaggtaaacactaggcatggagacctctacgagggaaggtgccttcaggcaagagcccgagaggactcaagctcgagggcaccaaccaatgggccctccacctacctcaagagacctcgcaaaaatgagagaacaaataagactcctccaccaaatccatctcaacgttcacaggagactaggcctcgagaccctgaagggggagagggtcatgctacttaagctgaaggaagtagtaggaggcactactttgaaaccataggctacgagattcagtgggtaaggaccaatgagccacttcatactcaaaagtatttttgggatgaaaggggtgaattgtgccatcacattgctcgtggcctcgatggccaacagtacgagtatttccctcgagtaaatggagaggagttgaacatgagcaaaaaatttaattctcttcacacttgtgatcctattgaagactactttgaggggtgtagccattacaatcctctaaatgaaaactcccacatctggtcattgtgagacaatccaaagttcattttggaggcttcaccagagttgccttcacgaccccatggtcagaagacaactacaagacccaggtcgattggggtacaagaattacctagaagaccaagagatctggatgacctcttaaccaagaagagaatgatggatgtggtaaattctcaagaagatactatctgggtaacaaaagttccatatgggacgcagaccactactcacggggtcaacaggtagaatttgacaccttaactgcttcagtgaaggtgatcacgatacctaagttgttcaaatttaagctcgatagagaatggcgctcaccactctctgaatgaattaaagctcttcccattcgtccaaagttcaagagcctttcctagcatcaatacacctagaaggaatatgaagtgtctcacatccactacttcgaagtacaaaccaatttgcaaggtgtgagagacgaggtcatgtgtaggatcctccctgctacgctgatgggccttgctcaacgatggtaccttaagctctcccctatattaatcgacagatggaatgatctagtggatgcttttggcaactagttcgctccttctcgacaaggctagatcaagcccaatgatttggtggatgttaagaaataggaagacaagcccctcaaggactacatccaacggttcctagaggtagccactaagaccaaaagtcttagcgaggacgcaagggttatggcactcccagccgagctcaaggagataagtccgttgtggtgcaacctttgtcacaaagcagtatataccatgaataacttcttagatagagcatatctctttatcaaacttgaagaagccatcacccgagctaagggctcaaagggtggcaagaagaagtcaccagacactgaagcccctgccactgaggcacagggcagtaggaagaagggaggttcgaatggaggaaagagagccaacaatgatgataagaaaggaaactctctcggagcaaagaagcctaagactaggggcaagcccttgcaagattatgaaccttgcctcaccacctactccattctcttagctccaagtaaggagatttatacgaccacacagtcagtagtgccatattgcaaacctctttctctcaaggagtcagggaagagggacatgaaatttttttttcgctaccacaacaaatatggttatgatactaatgagtgtaatagttacgggacagatagaatttctcattaggcagaaaatgctactctttagcggtatgtatgacttgatgctctaactggggacaatgtaccactctagcctatgctagttgcaagcaggctagagatcatgattggaggccctcacatagttgaaaactcaaggaaggtcgtagaaaggtatgcaagatcactttgacatgaaccaagagctaaagtcttagaggtagcagaatttcctacaaagtctcaatgctatggatgtgaacctatcaccttcagagaattggactcataccatgtcacctaccctcacaacgatcctttacttattgatgtgcaaatagctaatatgatggtggctagggtaatgattgacaacaaagcattgtcaaatatcctgttcaagcaagccctgagcagaatgggtttgactttagaaccatgtgaacaactcatgtacagttttagcggagctgacattgctccatgtggaaagatcaagcttccacttactgttggcactgcccaaaatagaccaccaccatggccatgttcatagtggtggacgagaagtctccgtacaacatgatgcttagaaggcatgctctctacgacatttgagccatctcttcaatatactatttatctattatgttcccagctatggctgatattaattgtttccttggcaataataaatggcccactcgccaagaagacctgctctattattatggcttcaaaggggatgaataattcctccctgctgttatggcactagggggacgtgcaaggctgttatcaaacttggagagatgacaaagacctctgaagatcaaactatggagaaggtaaagataacacctaaagccacttgaaggtgcacccaagattgggacgacattgatcatgttttgtggaaatcgagtcgggagttggtctgaccaaggaactcagagaatttccccacaacacctcgaacttgaccaagtttgtcaagattggaacaaacttgacggaggtcttgggtgagatgctaatggcttgccttaggagaaattaagacatttttgcatggtcgcatgaggacatgatcaggatcgactcgtaggtcatctatcatgccctccacatagataaagttaacttcaagcctgtacaatagaaacgtaggctccttgaaaaagaatgctccaaagctctcaaggaagaagttgaaggattataggagaacaacttcattagggaagatttctacttggtttgggtatctaaccctattctagtacttaagccaaatggaaagtggagaacttgcatcaaattcaccgagcttaacaaagcatgccctaaagattatttcccactatatcaattggtggacatgacagatgaactccccacattcatggatgcctattccggctacaacaagatcaacttgcacgcaccaaacaaagagcataatagtttttgaactgacattgagctttattgctacaaagtaattcccttcagagtcaaagaatgcaggtgcaacctataaaagactagtcaacagtatgttccacaataaaattggaaataatatggaagtcaacattgatgatatgctagttaagtcaaaaagatctgaagagcacatcaaagatctagaggaatgcttcaacatcctgcaggaatatcatatgaagcttaaccctctaaaatgtgccttcaacatctagtcaggaaatttctcaatttcattgtcaacttaagagatattatagtgaatttgaaaaagatcaaggccttgcaagacatgaagtcaccatcgtggataaaagacatgcagagcctaataggacaagttgctgcacttagtaggtttgtctctaagtcgtcagacaagtgtgtttccttatttaattaacttaaagaaagcaacaatgggtttgaatggactaatgaatgcaagcaagccttccaagctctcaaacatcatctagccatgctatccatcctattcaagccaatagatggcaaggaactataaatctacttggaaatcactaagcatgcgaccagtgcggctctggtgcatgaggaggaagggatacaacaccatctctaccacattagtaagcatctcattgggatcgagttaaggtatccccctattgagaagctagcccactgcttggtcctgtcctcaaaaagctaaggccatacttccaagctttcacagtcatggaatgatggtgttaactggccaactacatagcaagttttgatgaaaccagaagcatcagggtgccaactcaagtaggcagttaaactaggtcagtttgagaccacctatcagcctcaaacgaaaattaaaggacaaggattagcaaacttcattgctaaatgcactggcctcaaaaaatacgatcccatgatttgtgaagactaggtccacacacttgaaactgcagcttaagaggacattggaccttcctaaaaactgcatctagatggctcctacaacgagcacaattttggtggtagactaatcttagttactctagaggaatttcaaactcacagtgctttgcggtttgagttcaccgcaactaacaacaaagcagagtatgcatgaggcactcctagcaggactacgattagcactagaaatcaaagccaaatcacttgagttctataatgattcatgttgggttttatgccc

SEQ ID NO: 296138 - DNA, 2025 bp, Cannabis indica
ctccgaactacaacaactactgttactactactgcttccaccaccattactcatggcagccatagcaaaagccaaagtgcttttactcaaactgatcggtctcttcgatatccttcctccgccgtaactccgattcttctcccaaatctgattgaatactaaaagattccttcgtcttctcgaataagcgttttcaggtttagcaatgtctgaaattgacgatgttgttgtgattgcgtctcttaaactcgtatacgatttcgattttccattgtagaaactcgagattcctttcctgtaaaacaaaatcggatcagatctgttcgtttttaggtcaaaaaacaagaatcgaagataataataataataataccttgaaggtaatgaatcttctaacgactccatcatttccagtggttctttgtacgaactctgagcctccgaatcatcatcatcttcttcttccgtacacacatcgctattcttcccgatcgaagacgaagacgaagaagaagaataagaacaagtcgcgtcttccgctccgtcttcggctccgtcttctcccgtttccgattcaatcctcctccgattactttccatgctgatcagatcaatgaatcgatcgatctttaagagagtcttcaaattgttattcagataaaagtgaaaaccgccatggataaaccttatcagagcttaaagagagagaaaggtaaagttggagtgagtaacaaccttttatattaattttttaattaattataattagtggataaagtgagtaattattattattaagataagataatatttaataagagtgttttaaattttaattaaaggttttaatttgatgggatgggatcttatccttacaggtcagcaattgtacttttgggtaatcgaaacgtttcgttttgtataaatacgttgctttcaaattcttttttatttaatttaataaattaatgaaattgtggtgtgttattctgcttcacgtcacattcttcttaaagtgtaaccccacattgccctttttccaatcacatcaccaaattaatatatttttttaaataaattttgtttttttttttttttatttcatatcataataataattagggaaattatgacttagtattttagtgaaatagttcttctaaataaaaatatctctaaaagttattaacatttttgaaaacttgtttgcgcaagcatgtcttggaagactttcttgtccttttgagaaaatttcgaaaaggaatttcagatggctagttattcttcttagaaaggaattttagataatcgactccagcttactcttttcttttggcaagtaccttggtctgtgattctagaaatcctcataaacgcttttagaagcactcatacatatgttgacatggagatctcgctctaaggataattagttaagtttgttattgcataactaacttaacaacctcgcttcttgttgccaccaattttaaacaaatttgttttttttttcatataataataataattaggaaattatgactttacgttatgtccctcatttagttgtctttcagaatttgagtccccgtgatagtacttatcctgggctttaaaagtggtgatcatttgagagtaacgagtttctttgtactttattgggtaaggtgttcatccaatgcaatttaaaattttacattttggatcggcacagaaattttcaaaaatattatttcaaatttatctctcttaaaagtataatttcaccacattttgagtttttttgcagttaaactctctcatttatggttttactttcacttaactctttaagtttaaattttagcggtaaaattttcaaaactattgaaatgttagtaaatataagacgtcatatggttaattgctactatggattgcttatagaagaaattgcgtggggtacccactttaagttaaccattttaatttttatcctctttttaatatttcattttttttttacccacttttatagttaatgtt

SEQ ID NO: 296139 - DNA, 4071 bp, Cannabis indica
attacacgttagaccttacaattttgattttagcaataaagtctttgaacttctaaattttatttagcaattatatcatttttaaactttggttatagttattaccaaagtttactaaccaatctacttttttttgttctagccaataaaatttggataagtactagcaaaactccattattttttttttaaaaaaaaaaaaagtgacagcaataatttttccataacaatactattgcatccgctaaattttaaacattaagtgacatgtaagatatcacaaactcacacaattggttcaagtggcatgctcgcatgtattattgtaagaagatgatctgccataaaatgataaatcatttgttcttttgcaaaaatgctcaataccaataaaaattatcaaaaggaaattttttttttttggttagaaaattagaactttaatcacccatttatttttttctattctaccaaatttggataaactgtcacaaaatcctaattaaaagaaaaaaaattgacggtaataatttttccgtaatgattttgttacaccagttaatttttagatattaaatgacatgtaagatattcataactcacacaattggtccaagtagcatgctcacatgtattattgtaaaaagatgatctgctctaaaattgcaccaataatagtatgtaactttttctatcttaacatatttaatcattaccgttaatgctatttatttactctattttttttcaacaagttttgatcttataatcttactaataatttaaatttctatgaaaatgtaaaatgtaaagaaaaaggaaagaaaaaaaaaataaataaaaaaatatattgtagacgatatattttattatattattcttcaggattgtagttcaattggtcagagtatcaccctgtcgagacggaagctacgggttcgagccagtcatcattaaattattaaaacaaattccataacaggtgatttttggaagaaaaaaaactagtagatacaaaggacttaattgctaagaaattacaagtttaatcaccaaattaccatttttgttcctatgagaaaccgttaacaagtttttatcaatatggctctcaataatcccaagtcaatgcatcataatccggaaaatgacaaaagcaacaatagtatttatatgaagtaattacaaatggccccaatgaatgagaagaaaattaatagtcaaaatggaaagacattaacaaggtgaaaagaaaaagtatgacaaagcattgtttcactaaaagaaaaagtaagctataattgtacaatacgagtatcctaacaaaatgcatatctaactaatgtgaaagcctgaaactttcataattgtggtcctttgttattgtaccagtgagataaatggaatagggaccctgtctcttccacttcacagattaaaatctactataaccagccctttcaagaagctcttccgaattaatgaagaaaaagcaacaaaaaactcacaagaaattggttcaagcctgcccaagtcaaacacctgcattgataaaaggggttacagatcattctacgtagtgttaaacggggtaaaatggttatagaagacattataaatagagtcaacagcaactaaggtcaacctagttgttaaagaaatccatcgagtaatgtcaacctagtcactgtcagtggatcttctaataagaattctaaactgaaatgaatatatctaaaaaagtctttctttctttgcgtatgagcatatacaagtccttcaagctaagctgtgagcctattttttcattattattatttttatttttaaagcaggaaaaggattcacaaagaagatgggttatggattgtaaggatgtactaccctcttgataaagttcaatatctaaaaaaccagaaatcgctactagcctgctacaatagaaaaacatgaactagtttacttaaatgaacaggaaagcagcttggactctttggaatggcggcgactatgatgacattcaaagtttcaaactgctactctgaataaatgcagaaaaattgatgtccaagtataccaaaataaaattacagcaactgagaatgaggttaagattaatcaaacccctgagataacccagcgtatatctcagtgaatatactgcaaatcttcaattaattaactttccaactacttacagtcagcctgagaaaatggaggacataacccatggattgactttcctaaaacccatggattggaaaggtagtaaatggagcataaaatcttcaattaattaatattccaattactaactcctagtgttccaacattattaagctactgaataaaattaatatattcatgtcagtgcaagagatacattctcctgttttaatcagctgaagtttaaatgcaaatcagcagcctttcaatcagccttagaattactgaacataaactatacagtatcaatgaaaaggctttccaaacaaaatatttcagaaattactcaaaatttatctagacaccatatcaaaatataagcaacatcaacctagcttagtatagccaattaaaaaaggaaagggacatacttgaacgtaatcgtgttataggaatctcccgcatttcacgtttaatgcagagatattctcctagtagagccataattgcaattccagtaccatttactatccaccatgttactgaggaaggccatcccccatacacaatacagataaagagatggataatgaagacagtaaccgaaaaatccaagcatttctttgctctctcaaccacaaaaacaagatatccagcactgtacaaacaaacaggacaccagtgttaacaagagcaagcagccaagggagtttataatcaacttcaagtgccaaacacacataactaagatattacatgttaaaattgcatattcatctacaatatattgagcttggttagaagttaataatcacttcttgttaaaatcaaattacaagcagattccttgagaaataaatcgtttatagccaactaaatcaaccactcaacctataaccctcaagagtgctaaatagtcatgtttgtacaatgccaagtacaaacactatcccttgtaactctaaatcataaaacaagaagctatcatatgaagtaattgataaacaaaacaaacaatttgatagaccaagtagaagagaattctaaccttgcaattgcacttagcagaaacgaagcaatgacacaccacccagttacagtcgaagcagttagagtagcatagtcaaagaaatagaccaaactcatccgggaaacccgaaatccaacaagaatggacaagaataacccaagtgtgagataatatacgcattgaaggcaaaatatttgtgcaacaatcagccaagggtcccatacaacagtaccatagaacatttctgcaataacctaattcaaattccctaaaatcaacaataatatcccaccaaaccaatccaatcaaaaaacccaattctcaaacccttatggggatccaagccacgatcttttcacaatccatccacgctagtgggcatctcccgaaagaggaaaaccctgagacccaaaaaaaaaccacgatcgtcaaggattcggatctaaaattgggaaaagggtctaacccagatgagaattgagattatagttggaaatcgaattgagatttacatgaatgtgtgtagggtgaattggtttgaagttaagaagatgtagatcggtttgagattgtaaaagggaaagtgaagaagagagaaaaacgcagcaagtatgggattgagcttcacctgaggatgctgaagaaagaggatttggttgcttaagaaaattgtagaaaagcaatcaaactcaattcaaccgtgagacgacggtaacgtcaccaaataattttgcttttattatttatttctttatccttcaaaacaaaaacaaaattaggaatatttagggctcgtttggaaggccatactaggtcgtattgtattatattgaattgtattttatgtaatatttttatgtaaaactatatgtggt

SEQ ID NO: 296140 - DNA, 3188 bp, Cannabis indica
aaaaaaaatactttgaaatatataaatgaacaaacctttttttatacttaaatttgatttcattctattccctttgatattcatattttcattcctttcccaagaagatgcaagatagcatgcttggaaagttgaactgggcattgaacgtaagtaaaggctttaggtgaattttctttggttagacctttggcttccgtcctatcgtaactgcgcacaattttgtttttgttttgattctcatttcacatccaattaattatcaaaaccaaccaaattctacaaaccattttggcgatagggaggaggatcatgtaaaggctgattgatttgattgcaaatggttctgctgcccacttcaatcgttagaattagaatcatcttcttcctcgatattccgcaaaaaggaaaagaaaagaaacacttactagactgacatagacatagtgaagtagaaatggttctgcattaagaaacgtttctgaaaattgtgattacaaacccaagttcattcataatagatgcaaaactttttaagcattttcccattctaaaacacataaaggtgttgtgtgttgtatcttgtattgacatgaactgaagaatctcatttgatcagataattataggtatataatcagaaaagaagaatcccattcaaatattacaaacaaaaacaagaaggtgaagtcaatgaaagcgaagaaatcgtacttgtgtatactatgatatgatagttatcatatggttgaagaagtcaaacgatccaaaccctgttgagctacggccaattctggttcgaccttaagggcgtcctcgtaagctttcctagcctcctcctccattttcttcacttcatagcattctccaagcagacaaaaagccttggcattatcagggctgagcttcacagcctcatccaagtcggtgataaccgaatcaacctttccacgccgagccatggccatcttcaactcagctctcttgaaaaaggcgtcccctctctctttctcactgagagacttaaccgcaagaggagagagagctgcgtcgagtgattcaagggcagaggtcttgaaaccctgaagatcgaaaaccagagccttgagtatgtgagcggcggcgtccttggggtcgagtgcgatcgccttctcagcttcggctaacgcatccttggcaaatgatgaggaatcggagcgagactttgcagatcgggctcgggcgagatgctgtgcgcctagaacgaagtggcgcttagattggacttgggctcggtcccggtaacggaatttggcgtacaatttctggggaatgttgtggagagctaggaacatgaagagagataccagtataagcaccgcttggaggagtagatcagtcaccattgacatgattctatgaagaatcgaattcaaaatcagtgatcttgagaaggaattaggaaagttgaagagggtttttgatttaggaaggaaaaggaaagtatcaccagagatgagaaggagaagggtatagtaaatgctgggaagaggaagacgccataactaggcaggggaggtcttctaggttgggtgggtcgctcttcttctctgacggctttgactggcacaaaagtcatttacgacaataaaataagtcaatccacctatttacttacttttattttacaatgttatattttagtggtaaattgggttatattatgacttaatgtttcagattttatacacctaatacctaatgtttatttttgaaagcaaagatacttaatgttacaattttcttatactggtactaccacttccgttaactcataaatatggatacgtggagggttcagatgcattacatttaattttattttattgtaaaatttaatattcataatatcagaaactaaatattacttgtttaaaaaaaaacatgttatcataacaatttttacatgatattggcactttaattccataatcatattccatatactatactggttcactcaactatggtaatttagtattgcatctctcttaatttttttaaaaaagcaagtaatatttattttttgatattaagaatattaaattttaaaataaaataaataaatgtaatcaatttttaccctccacgtgtccatatttatgaattaataacggaagtggtagtaacggtgtaaaagaattgtaacattaggtatttttgctacaaaaaataaacattagatatttaagtgtctaaaataaaaaacattaggtatttatgccgcaatttacccttaattttattcactattttctttttaatttttttcactcatctcacattcttacaaaaaaaatatctttatatataaaatatgaatatttaacgatttttattagtttaatagaatattttaaaaactataatttagaaagaattttctttatcaatggtgatcagtcatggtatccatagtgttgcttctttttcgcccaacctcgatcgcatcttgtctcatgtacttccctttgtctttccgctcacgtcttgcttagacttaatcccactaaattgaagcatgacccgtgctcaaaaatgtcaccttcaattacttatgtaatcccaaatatttttagcaattataaaagaagtgacagtatatatggggctcaaaagaagtacacaaataatctcatttgaagctaaacacttttcatattttgtaggaaaattcccttctctaatcttgggaattgaaacgaaccatccacataagcacaagattttttcccgaacaaatcattcttcattgcataagcccgtgacaagtcatcaccctgggaatttatacctctattggctttgcaatccctcttaagaagtggtgttaagtcaacaagaaagtctattaatttcgttcagtgaaaggaccctatcttatcccgaaccactagtctttagcagcactattcgatagatgtggattgaccgattctgggtccctaattggacaagcgggtagcactactacgactgacactatgactcattacctggaaatgcctcgtcatagcacccacagaagttcccttggtctgacaattttaaatcatttacttgctttattatggacaagcgggttattttaccatttattttatcaattttttttaatgccaaataattcaaacctaaacctagttgga

SEQ ID NO: 296141 - DNA, 9736 bp, Cannabis indica
aatatataataatttacaacaatatatatatacctttctatttaatcaaactcaatgtactattgaagaaaatgttttccgcatcctgctaggccattgtaaaagttggttacatcttattactttaataatgtgtatttatttaatttggttttttgctcttctaattgctgttccaatcaaatggctttataacccgtaaataacatccacttataaaaatgtctttgtacgatcttggattgtatagtttgtgggcaattaaaatttgttactttaactcattgctaggaaaaaaaattcttactttaataacatataattggatgataaacgatcttcttactattgatgtcatgaaatggatttaccacctctctgtgtaccttatgttttttattttgacgttttgttttatcatttcatcctcttcagccttataatggacttctctgttttctgttttattttctcgtaaacatcagtgcaatattttttcttctttcctaataaatttgaaccttaattcattttttaattttttaattgcagttttgtaacacacatatgtatatttatatgttaattatttaattcaattaattaaataataaaactacaaatttttctgcttatttggtgagcaattatgtatttcctgttgtatctattcattcaatccagattaaagttagtagttttgtttgttgattctaatgcttttaatttgttgctgtctacggcattgaaatataattatttattcactgtttgtggtttctgaatattgttttaatttatttggttcatatagttaattgttttcggtgtattaatccaatctggagttagttttattttgatctgctaagcatattgggctcctgaatcttgatgtatatgccctgtatttatagtaaataggaattttgattgattgtattgtggttcctgtataatgtatatgttttggagagagggtaaaatgaatttggatggtcaaaatctgtaatgtagttcttttagttttacattttgtttgagcattcataattcgttgctgacattgttcagtttattttcttatatttggcagggatttaggaaattcaaatttgtcagggcatttggttcctgaacttgggaagcttgagcatctgcagtatctgtatgttcttattattctcttttcttgttaactaagcagttaaattagtgaggctttctaatattctttgtatctgatttctcgtatagggaactctacaaaaacaacattcaaggtaccattccatctgagctcggtaacctaaagagcctcattagcctggacttgtacaacaacaacatctctgggaccattccatcctcattgggaaaactgaaatcacttgtgtttttgtgagtttagttaatttagtattgtttcccatcatacacggatagtaggattcctaagttgttctttcttatagtgtatcatttgtatgaaattgatattatgcttaatctttttctatattgactggaaagtgggtcttgcttgatctaagctaggagtataatttaaatttttgagtatcatgtttggttttttctgagttcgttttgcaaatctcgtaagggttgcttctgttcgcatcaacatgtaactggtatggtgtagcaacattatatgtcctccttgtgctgcttacggtggattcttgttgtagtctgtccttgaagtgttatatgctgaaatgcttgtctatgtctcatttaggctgtatagcattgcactgcttgctttcatcttattttaatttttgtttgacatgtagacgtctcaatgacaaccgtttaactggaccagttcccagagatctcattgccatttcaagcctcaaagtagtgtaagtgctgttatcaagtttccctgcacctcccagttgtgatattgcttttaacatcaattcatgctgttcaatgtcttgttttcagagatgtctcaaacaatgatttatgtggaacaatccctaccagtggaccatttgagcacattcctttaaacaagtatgttatttatctcattataattgtgttctctgtttcttgtttgttttcactctttctattggactctcttttgtagatgtcttagttaattcagttatatgccttttcgtgtcaataagtaactgtcacatgttctgtttcctctacttacaaggaaaaatcacacacatacatgcgaatacatacactctacacaatctttgttggaccaattagagtagtaactcatttgttaaactcattcagtatatatatctcagggaaatttcattgaactgcatctttaatgattatacggtattgtttacttttattgtttgaatttttatagcttcaaccattttattgtattttcttattttgtttcttttgaaaatgagatcctgtacactattgagtgagtgtatagctgagaagttggcaacataaattctgactcctatgcagacacatacatgcacaatggcataaataaaaatttacaaaggatgattcctttttaggacatttgacaaaataatttatcaacggggctcgggttatagagtgtggctaagggtgctcaaatatttttttttccctttttatgtgataatatgaagtgtgatgtaaacagaagtatacttgtgttgtgggtcttgttaagctaatcttttaaaccgaaataatagttgaaagtgattgaaaagttttagctcgacattgcttttacactcttcacagaaaagaactattctttcttaatttagagctgtgtgattgttttgcctttgccctttaagacttataataaccattttgttctgttggtgtgtatgtactatctagctttgagaacaaccctcgactcgaaggtccagagttattggggcttgccacttacgacacaaactgttcatgaagaaggattcattaagctgactttggtatggtttaggtgttttactctttaaagctgaaaatgtttgtttacttcacaatgtaatgggataggatataaatttcattccctcaatataagaatatgtaaatttaaatctgatgatactactacaatatcaatgtatttgtaacttgttctattgtcttcctaagccaagacattgaatttgtactttgcaatacctagtgaaaagtatttgtcatggatctctctatttttataaattatacttttatatattaaacgtgtgttttttttttctgtcaattttaacaaaatcttataattattaacataatatttttttttgtaattaattcggtatatgtctccgtatcttagatataacttttgatttataagtttaattgtaataaattatttaccgttaattatgtaatttaaattttataattttgtaccatattaatggcatgtttacttaggaaaatgttaattaattgtatgatatgattcggatacaattgtttttaaaattttagaaatggagaaattagttgtccacacaaatcacagagaaaataaatggaaaatctttttcttttttagtttagtttatttaattttaagttttattaattaaaataaaaaataaatataataaaaatacttatatgttaccatggtaatttagccaaattaaaacattcttattactttttatgttttttattactttttttactttgttaagtcaaaattattctgattccaattataattacagtttagtaaacgtgtcatattggataacgtaggaaatgaatgaagtaattctcattgatttatcaaatgaagtaagactatttcaatagttgtactagttttgtgtatatttttttactaatttgatatagaatctactatttttagtgcaacaattctagggttgaacatttgtaccaggtttggtttagacttggtcaactcgctcgtacccgaccggttgaaactgatcattggagagaacttgaggaagttcagccacttctcttgtatcatgagagtcgccttgaacatcatgacactgttacagacctcaacatgaagcttcaagccaatgtggcattctcaatatcaagaaccaattcctacagaccatcccaaggctccaagattggaagtcgaggtggattttgtgggttcaatcagaacaataggcctcagtgccaattgtgccttcaatttggtcacattgcccttgtgtgccattatcgatttgacaagaattaggttcctcccaaaccaggcataaacagtcaaccatccaatacctcgaacccctcccctcgtgccttcatcaccgtacacaaatttgactatgatccacaggtgtatgccacttcattcatccttgactttggtgatgactctggatggttcgtggacattggttccacaaatcatattacctctgacactgaaaacttggaaacaacagttgcataccctggctcagaaggtcttgcaataggagacggtaagaaattactcatttcttatattggttcaagcacattaccttctgtcaactcattaactcataaattgaatttagtgcttgatgtaccttcaattactaaaaacttagttagtgtatctcaactaactcgtgataatcacgtgtttcttgaatttcataaaacatgttgctttgtcaaggacactgctcaagggaatatttaaagaagggctttatgtgcttgaagacagtgtcaaagatctagtggtaaacaattcaagacaacaaatggcctatgtttgtaaccccattgctatggtttgtactagtcattttgatagtagctatataacaaatgacaatgcttgtaatcaaactcaaatgaataaagctacaacttctgatatttccaatctctgtctagttgtttaccaatctagcaaagctactaatgtaaatatctagcaccaaaagcttggacacccatccgaaccagtcctaagcaaggtgttacaacatgttcatcacattagttctttagaccaattagacttttgcaaggcctgccaaatgggcgaaagccataaattatcatttcccatttccacctcaagagcttctcaaccattagaactaatacacacaaatttatgaggtccatcacacattaaatccaaagatggatacatttactatgttaactttgtagatgatcatagtagattcacttggatctatccattagtgctcaaatcttaagcttttgacatgttcatcaagtttgaaagcatggtagaaaagcaatttaatcttcccataaagagagtataggcagatgggggagggaaaaatcgaccttttttcgaatttgtagctgatcaagggattgtcttcatacatccctgtcccaaaaccaatgaacaagctgggagggcagaacacaaacacaaacacataactgaaatgggacctactattctagcacaatttggtttggacttcacatattggtggcatgcctttcacacagctgccttattgattaataggctaccaactaatgtgttaaatctacaatctccctaagagtgtttgcttggaaaaataccagactacaacattctaaagctatttgggtgtgcatgctaccctcatttaaggccttacaacaagcataaattggagtttaggtcacaaaaatgcatcttcttaggatactcatcaatgcacaagggctatttgtgtgaaaatctacaagggagactggtcattgcacgaaatgtgatctatgatgaaaatacatttcctgcaacctcaccatcaacaacacatcaggtacaatctgatcctgtctctaatctacctactgctgtgtttcaaacttctcagtttcctaatgctattcctaacacatatgttcctcatgtggacaacactggttcatttgtcactgagaaaattatacacacaaccaaaaataaaactcctgtcactgccactattcatgctccatccacttatgcaacaagccaaccatctccacccatcgcaaatcagaaccccacaccagaacccactccgtctcccataacccaaaccaacaatcctattactacacttgcaacacagttcccttcaattactaatgaccaacaaacaaacataactatacttactgtcttacccaccaatgctccaacagctacatctcaaccacactcttctacaccttctacaaatgaaccacacgtggctgttacaggaacaaggacacatagtattcgcacaaggtcacaacatggtatttccaagccaaaatcttacatggcaaccaagcatcccgtaccagaaactatgcggccatctgaaccaaagaatcttaaggatgctttaaatactccacattgaaacaatacaatgaacacagaaatgggagctcttcacaaagaaaagacatggacattagttcctcatgatccatccatgaatgtcatatgatgcaagtagattcatcgtgtcaaaatgaacaaagatggttccataaacatatacaaattgaggatggtagcaaatggatagctccaagaagcatgaattgattttgaggaaacatttaggcctatagttaagcctgcaacaatgagaactgtcttgtctttagcagtttcaaacaattggaatgtctctcaacttgatgtcacaaatgccttcttcaatggaccctcaactaaaactgtttacatgagacaaccacctggttttgaaaacaaggattgcccaacacatgtttgtaaattgcacgaagtaatctatggtctcaaacaagcaccacgtgcttggaatgacaagctgagacaaaccttagtctcatgggggtttcaaggatcaagatcagacagttcattattcattcatggctcaggacacaacttggtcatcttccttatgcatgtagatgacattcttgtaactcgaccaaatgccaaactgataactaggctaatttttgatctaaacaaatgcttcactcaaacacttaggtcaagttcactattttcttggggtggaaatatacagagacaacacagggatgtacttgtctcaaaccaagtacatcactgacttattgttgaaagttcacatggagggtgctaagtcttgtcctaatccatctattgcaaacactaaactgtctctaaaagagggtgaattatttcacgatgtcactctgtacagaagcaccataggggcagtgcaatacctatctctcacacgtccagatgtggcattcatagtcaataaactaagtcaattcttacaggcccccacgacagtgaactgggaagcatgtaaaagattacttagatatctaaaaggcaccatcaaagaaggcatttgtctcaaaccagctgctgaaacaactcttcatgcatactctgatacagattggcgagctttgtggatgatagacgctccacaggaggatacttggtgtttctaggaggaaattcgataagttggttagttacatagcagcaggtagttgctcgctcaagcacagaaaatgagtttcgtgcattagaaaatgctgcatctaaacttaagtgggttcgatcactgctagctgaacttcaagttcctttagttcaatgccctgttatttgggttgacaaccaaagtgcaattgcacttacaacaaaccctgtgttccatgccaggtccaaacacatagagattgatttgcacttcatccaagatcaaatcatggaaaaaagtctaagtttgttatgtttttgctataaataaagtttttgatatcctaactaagtccttaaccactaattgatttatttatctaaaatccaaactacaaatggtatctacaccatttattttgaggggggatgtaaaagatgttagttagttcttcaagtggttaagctagttgacattgaaactgtcaactaacagtttgttacttagttttttctattttagcttgttattgctttatactcgtgtatataaacatctcttttggcaattaatgagagagagagagagagagctgttcatgattctatttctccaattctagttttcttcttctttttctctctctactttgtgttctattacattaactctttaaaataggatcactaattacccaacatgtaaacatgcaccacatcccacctatctcataaagaatagaaattaatcaaaccattactcacatagttatctaaattacacctattaaccataagaaaacataataaaatatttttttcaacattccctctcttaaattgattgtgtttataaacattcaatttactctttcttattgtatcttctaaaaacacatactacaagcatcttctttagtttctaaaatatatgcagtttgagagactttgtgaatatatcagcagcttgctctttacttatgcaataaataagatcaataacaccttccacagtgcgctcccttaaataatggtacttcacatcaatgtgtttgcttctaccatgaagaataagatttttagaaagtttaattgttgaggtattgtcacaataaattatggtggcctcctcttctttgaagtgtaactcttcaagaatccaaaaaacttgacaggaactagttgttgctgttacaaactctgcttcagttgttgataaagtgacaattgattgcttctttgaagaccatgaagctgctcctgaacccatcataaaagatagccaaatttgcttttctatcatccaaatctcctgcataatcactgtcagtaaaaccaactaaatctgccctttttcccttatggtagaagaccccaaaatcagttgtaccgcacaagtaccgaaaaattctctttgtagcaagaagatgtatctcccttggacattctatatacttactaataagactcacaccgtgcattatatctggccttgttgctgtcaactaaatcagacttccaactatttgcatatatagagtgttttcaaccttcttttcttttggatctttgataggcttcaaaccaacctcagttggagtactcataggattgcaattcttcatttggaacctgtctaaaatttcttggacatatttattttgagaaataaaaatactatcattagtttgcaccacttctatgccaagaaaaatagtgctttagtgcaagatcagtcatttcaaattcaagcatcatggattgcttaaattttttaatcatgacactatcatttccagtataaattaaatcatccacatataagcaaataatgagcattttatctatatctccaaatttaataaaaagtgtgtgctcatatggacatttatgaaaaccttcatttaaaaaaacaagcttcaatacgactataccaggcccgtggagcttgttttagtccataaagagtgttttttaatttatacactttatgctcacttccaatcttaacatagctaggggttgatcaataaatacctgttcctctaggtctccatgtaaaatgctacttttacgtccaactggaagataggccatgagttttgagcagccaatgcaaacaaccaatctaattgtatcatgtctcgccactggatcaaaaatttctttgtactccataccaagctcttgcttacagcctttagccaccagtcgcgctttgtgcttgtcaatttcaccattttccttcaactttgtcttgtacacccacttaacacc

SEQ ID NO: 296142 - DNA, 1682 bp, Cannabis indica
taggttaattcataatttgtcattcacttcaagaaaaggatagcaagtaggcattaacgattgggtaaactaacaacaggattctcctccctattctctcatcttgattaatactcacttgttattttaagtttctgaattattttactgaattcataaaaagtattgatttgccaaatagaatcataagtataatttagtggtaattaatccaattccctgtggttcgacctcacttgcgtgagctcacttgactgcgtatattgcgtagtgttcataaaattcgtaacatgaagcttcgaagaggtcaaagaaagagcataaacccaagtacattgagtactctagcctgttagatacttgagagttgtgtacagagcaacatgcaatatggtccactatcgaaagcccccgagaatgcctgaaggggggaagttcaaaagagatccaagtaagaggtgcgagtatcacggagaggtatgacactccaccaatgaatgtggctacttgaaagatgaaattaagacgctggtaagagccgaacatttggggcaatgagtctggattcctattatctatcttggacagggggtcactcacaaacagttaatcattccaggacagcagggtaccatatatcctctacatggggtaggtcaccctcaagctcccaaatcataacttctaacactcctgctccacaagctttggctatagtagcattattagcttttgggaccgagaaacccatcccccccaatttagctccgccactagtggatggacatgtagccacattctctggaggaatacacattgagagaagtaccaggaattcctaaataagatatttgaaagagttagactgagagggggagatgtgtgcacttgtgcagtcaccagcctaacatccccaaaccatgaacctacccattacattcacggaggatgatgccaaacatgtgcacttcccccgcaaggaccctttagtcattgaatcccaaatcgcaagcaagagagtatctagagtcttggtggataatgaaagctcagtaaacatcctgtttaaatttacgttccaagtgattggcctcatgaaagtagacttatcaccttgccctattcagttgcatggccataatggtgatgctctatgtctatgggaaagatccaactaccaatcacacttaaaatagaaaacaatgcttgtgccttcaatcactgtaccttcatggtggtggattattccaagacatacaacgccatactaggacgaccaatcctggttgactttggagcagtgactctaagaagacatttgtgcatgaagtgttggagtagtcagaggtgatcaaagaagtgcaaggagttgttacaatgtttcagtccaaactgtgttcatggtccgagaggaagcaacaattgctcttggaactgaagttcaagtgaaagttaaagccatctaggaggattttgaagatgaattagatccctgagtcggggtagagagaatgatcaaacaaatggaggatgtagaggaggttaagggttgttgcccctgatttcgcccaatatacgtggaccaaccggatagggacacgtggatcagataatttataaatattcgctaagtctttgtatgccgctaggaaacatcctgggcataggtcccggaggaggca

SEQ ID NO: 296143 - DNA, 3736 bp, Cannabis indica
aaaaaactagtataaaatttagtatacgagcctcgcatgtaactttttactagtatatatatatgtaacactttttaatgggtattacccatgaatagttactaagaaaatttaactataaatattaattttaaaaatattgatcaaactattgaattttaatctaataacgaataatcaaatcacaaatttaaatttctatgctatataaatttatattattcttttcccgttcacgttgaatttagaaacactgaatttaattgcatgattttaagatgaatgaatatgttttaaataaagcatttattaattggtttacaatttcaaaataaaaaaaagtatgaataagacaatctagccgctcacaccttttccctattattcatttgatttattccccagttagatatgctcaaattgctctcttttcttgattagaatatccacaaacacgctttcataaacacaccaagtaacttgtgctcaaaaagttctcgagagtgaagctttctcttttattaacgaaattgtataattaaaaacaacagtaaaaaattaattaatcaagctctatgcacacacccacgtatctgtatataataataagttcatattctcttctccaaagatatatcactagtgatatcgatcatgaaggttatggctagttccaaacaaaacctcatcactctttttttcttttacttcttcttcttctttgctagctcatcaaacattaatactactacagaaaacagtagtcctactactactactacagctgaaaccatatgcaactctactccatatccatctgaatgcatatccaatctacctccacctcaaaaactcggcaccgtacgagatttttgcattcactttatccataaatccttaacaaccacacaacaatttctttcacttctaaactcatacctaaaccgacatcgtcatcgtcatggtgctgatgattttctcacaataccactactgtcgaaaccaatcattggagcacttcaagattgtcaccttctcgcagagctaagcctcgaaacattatcaaaaacataccaaactctcaactccacaaacaataatttaataaacagctttgaattagccgaagagtttcatacttttctcagcgcagttttgaccaacacacaaacttgcctggaaggcctcgaagaggttgtgggggactctccatctaatccccttactaaagtcatctcggtagctctctctggtgggaccaagctttatagtatatctctagctcttttcaagcacggttgggttgatgatgttagctataataataatcaaccatcgacgtcggccatagtagggggccgccgtggaaagaggctgcttcaggtgggtttgggaggtgttttagtgggtgagagtgtggtggttaatcgaaatggaactggaaattttagtactattaatgaggcagtggccgcagcgcctaataggtcagctaacagtaacattacatcttactttgtaatttacgtggctggtggagtttacgaggagtatgtttctataccaagtaacaaaatgaatttgatgttgattggagatggtattaaccagactctgattactgggaacagaagcgtcgttgatggttggaccacatataattcggcaacatttggtaaaatttaatttactttagtgttaattaatgctttaagttaggaacttttcttgattttttttttctttgaaattttctgagaagtcttgtatacttaaaatgataactcaaacagcctttttttaacaaacctgaaataatttagccgacaaactatctgaatgctacttttagttcactaaattagctaaaattaacttatagataaattgtagtacaaagaaaattagttcctagtagtactactcattctccaaaacataaaataataaataatcttacacggactccgcattaaaattgagggggtctatttttaactttttatttaaatttttttttttagaaataaagacatactttgtttatgagatagggaaaatttcacttagcagtatagcatactaaaatataaaatatacactacaattaaaaataaaatatttatagttttaatataactttttcttaaatacccaactgtttaacccagacatagacacataattcaaaaatatattaaaattaatacaaatttatatttttatactactagaatttttttttttttaaaaaaataatatatataaagtttgatttcaatagctaaagtactcaattcttgtcttcttggagttggtgggagttgatctatttttagaaccatcgttattttgaaaaatataaactgtacatattgaaaaacaaaaatgctctagttggattttgaacctttgttcgtagaataaatgtaagataacttataagcactagaagcattttgttaataaatatcaaatttgtttataaatatttgaaataactaattaaaattaaaatatataatattgacaattttcactcgcctttacgtaactccaccgccctatctatacaacaattatgaatcataatatatatatttcatgttttgcagccgtagttagccaaggctttgtggccataaacataacgttcagaaacacggcgggagccatcaagcaccaggcggtggccgtgagaaacggcgctgacttgtcggccttttacagctgcagcttcgaagggtatcaagacaccttatacgcccattccctcaggcaattctaccgagactgcgacatttacggcactattgatttcatattcggtaacgccgccgttgtgttgcagaactgcaacatctatccgaggaagccactgcccagacaattcaacgccattacagcccaaggccggagcgaccccaatcagaacaccggaacttcgattcagaattgcaatataaggggtgctcaagacttggtcacggctaataatagtactagaacgttcttaggaaggccgtggggggagttttcaagaacagtgtttatgcaatcttacatggatagcgtaattgacccagttggttggagagagtggtcaggaaatttctctctggcgactctgtattatgcagagtttaataattcagggcccggatctaataccagcagcagggttaaatggccgggttaccgtgtcataagtacttctttaaaagttgttaactttactttgtcaaagttttattatgggagattcttggttgccgacaactggggtgccttacaccaatggattactttgacttttagtaaatgagtttgtgctacttctactttactgtctttttttcttttcgttctttaagttaaatggtatatatattttctaagttataaaagtttatattagttgaatttcaaattttggtcactaattacaaaaaaaaaaaaaaaaatggtatacatttactttggttgctaattcatacacaaaatgctacaatgcaactataatgatattatagaacaaagtaaataatattttgtacttttttataacaaaaaaaattgttaattagactcttagatgaaaatttagaacctatatttcttaaaatagtatgaaatagaaaattaattccattttcgttaattttttcttttctttcaatgtaatcaactaaatgttaatttctagcactaaaaaaatgtaaaaaaaaaaaaaaag

SEQ ID NO: 296144 - DNA, 2742 bp, Cannabis indica
aaacttggtgctctcatggttgtgaaaaatacaaatatttaaattaaaagcacgattattggctgctaaatgacagcttgggcccaagtcttggcatgtgcaaactcattggatgcttttatttatgagaatcttcccataatcagatcagaaagacactattttaattgggaaagtacaactcaatgatcaaaaattgaaaatttgaaggaagtcctctcttaagttcaagctgatgagaacattagaattgtctgtgaactcttaaatgattcttaaattcataaacttgtcattacaaaaagggagaaaaataatgtatcaattatctttccccttaagtgtttattacaatgctatattaatagtttattgtaacaaattattgagttatcattaccctctaaattaatgattaaaaggtcaactcatggatccatatggtactatagtatacataacattttacaaactaagcatgcacagaaaaagagccaaaaaagaacacaggcttcagcttcacaaaaatcactagatgcacaagcaaaattaatctgtggaatataagataatatatacaattctaatgttctatccaatcaggctataatgaatatgatacaaatgaaattgaaacgtcagtgggtatgtttgaaatcatcatctctgttcaacttaagagcatgtaggaagaatgaactaatgatacaagaaagttagctccagaattaggaacttaccaattaggacctgatactttcgatttagtctcattgcctatactactggaagatacctacaaccaaagggtgttaactgtgatactggtgaaagccggaacttgagagattacctgagccactactgctgatggatctctcgatatcatcaatatcagcgactaaaggaattggtcgttctgggatattgggaactgacaagtctgtttctaacattttcacaacctgatccatagttggcctggcatacaactgtggatgagaacagagaacagcaattaacacatacttttctaagatttcaggcacacccttttctggcatattatcttcaataacatctaaagctctcccttcccttactaaagaccatgcccaatctgttacaagagagggttggctctcatcattcacaagaagtgctttcttcccacttaaaagctctagaagcacaacaccaaagctatacacatcacttctctctgtcaactggccatacaaggcatactctggagctacatatcccatagttccagctaccctcgtgctcaaatgtgtcattccctcaggtgtgaactttgcaagtccgaaatcagccaccttggcttcaaatgtctcatccaaaagtatattattagctttaatatctctatggatgattgagggttgtgctccataatgcaaatatgccaaaccccttgcggtccccagggcaatattttgacgaataggccaactgagcttgttatcaggagatccaaacaagtggtcataaagagacccatttttcatcaaatcacacacaatgattctttgatgaccctcatagggagtagtagcaatacaataacctctcaaagcaacaaggttgacatgtctaacactagcaataacctcaacctcgtgagcaaaattagtatctcctgaagctgaacaattcttaaatctcttcaaagcaacttcactaccatcaagcaaaacccctttatagacattcccataccctcctctcccaactatgttatccctagaaaagtttctagttgccttcttaatctcatcaaaagtaaactttatcaaattagtactgccactaatggactctaaagccgaacccaaacctctctctctatctttagaaagttcctcctttctcttcttcaccttatactccttatgtttatgccataacaaccaaaccccaccaattatcaccagcaaccctaaaccagaaccaatcaaagcgacgaaaatcacaactttcttccgcttcttcgtacctgttgatcccggagtcgcgaaatcgagcaaaaacaagcagttagccgtccctatatccgtgggtccaaaatggttggcgaaagccgcggcgtaaatcgaagggaacgccgtgcaatcggagacgttcccgatggaagctccgatcaaatacgaagcccgcaaattggacaggctggttgtgcaagcggcgcagggcgaaccattaagtaacgactggttacaattatcaactatactgttcaccaccgatttggggacaacggcttcgaactgcgccctggtggtgatgttcatgcaaccctgggagatccagctggtctggaagccacacttggacaaaatatcgaaattaggaacgtaatccttaagcaggttttggtaatcggaccagcacgattcagacgagttgagaggaggtaaaaacgagttggtgagtcggagatagttcgactggacgagtcggaggctctggaggacataccgacactcagtggcgacgtcaagagaacgccgcttaggactcggagctagttgccggaggacggtgaagttcaaagggcacgaaacggcatcgttttgaagctgagttaaggccacggagttgaagcaggatagcagtaacaaaagccggacggcgacgaggaagagggcagagaaggacatttaggcctagggtttcatggaaggaaaagcagacagaggaagaagaagaagaagagtt

SEQ ID NO: 296145 - DNA, 1771 bp, Cannabis indica
aaaaatacaaaaacataaaataataacattaaaaaaatgcaactaaaaaatatatatataaaaaaataataataatacataagaatgatttttatatataaatattgtggttaaaatattgcagttattctttaaatatatttcatttaatcacacctcattatgataataatgacaatattaaccataaccacaccacactatgtagtgtggattttgagaaaaagaaaagattggaattgtacaacagttgaaattcaacattgaattactgtctgctcaaaattcatgtttggacaaaggaaaagtactataataattacccatttaagcaaaacccatgaaaattaaccattgcattacatttggggtggtggactttccctgcttttctcttgaggctgctgtgattaggcaaatcttgtctagtaatatgatgatgatgatgatgatgatcatagctcaccttcttccacattgttcaaatctgctgcagctgatgtcaatccatttttctgatgatattccgagtcctcgagttcttgtctgtgcgacggcttagaccaacttcgtctactacggtcttgcttacttttctcatttccaacagctaattcaatgccatcttccagttccctctcgatgagatcatcgtcgtccatcacatctgttttccgagttgtattgccaaccgaattccttcttttctccagtgctgcctttaatttgtccttgtcgaactttttcattacctcttgtggtgattgccggcttataagtgtgctttgtttattttctggatttcgaacttggtttttgctcttcaattctctagcatctctagtttcactttcttcaccagtttcggggtgtggcaattgcctaggttcggaataatgattctctctaaattcaccatcatccaccttgtgatccgacccattattcatttcggcgtttctgtggtcattacttcgactctcagctgttctaaggtgtccgccgtgattttcagcgttagaaaacttggatggtggcttagataacaccacaggcttagaggctcccggtcgagtacttccagcctgagaatgattgttgttagttaaacactcttcattgctcgttgtcgctttgacaggggtcgcgtgagtaacaccactcgcagcacttccttcaacatcacttgaaggtgccacgcgattttgttcgtacagttccaacatttgattgctaacttctgcaagaaattacggaaaatatttaaacttgaaacccaacagatttacggaaaatatttagcttccgttttactcatacggacaagaaattaaagaccatttttgaattggtaacaaagaacactctcgaatgatctagtttcctgtcttcactaattctcttaaagcatgcttggaagtcactatataattacactatattttagatacaagtcgtgaattcttagtgtgcatttgaaaagtcacgatgtaattgaatttgtgtgtacttgaaggtaataacacaattttacatatttatctgaccatataattggaagtaattaaggggttctaattacactctctaattctcatgaccccatgagaattgagtgtaattacactatataattactaaaaatttaccatattacactatataattacactatataattactaaaagatattattttctcgtgtaattactaattattttgctgaacaaaatattaagaattcatatataattaccacctcatattcaa

SEQ ID NO: 296146 - DNA, 2229 bp, Cannabis indica
acaaaaatatagtcacacggtaaacttttttacaaaaatactgtgtttttaataaaacaccagtaaaacaacaaaacagaacaactacaaacaacagtagaacactaagtaaacaccagtagaacaccagtagaaaacttaacacagtatactgcagtatagaaacttaataaaaaaacacagtaaaaaagtaaaagctaccgcctggcagtatttttgtaaaaaaatgacaaaagttagtataccatgtaaatttcccttataaaactctacttataaaatgtattggatactactagtgtccaataatatactctaatacaaatagtcagataacaacattttaagttttttttttttataatcgtgtatgttataattatataggatttgtttataaattttcaaaaaattataaatagtttataatatcgaaaataaaatttatatattttgttacatgcgcgactgattttcttatacgtgtggtaagtaattatttaaattttatttttagtactgtaaattattcagaatttttaaaaatttacaagtgaccttaaataactacgtatgtgattataaaaaaatagactaaaaaattctcttaaataccaaaatagataaataatttaacaaaataacccttcaagagggcctcctacaaacatttccaatactaatatcagctcagattgtttaagtcaatggctcaacattttcttatccaaaaataatagtaatgatgtttttaataaattaaataaaaaagtcaatataaatgatgtaaacactctagccaaacttgaaaaaaagaaaagaaaaagaaagtatataatagattgtcaaaaagagaaaacttttggacattaattataattaataattaacagataagccaaatcagatcaaaatagactttcccttgacatttgttttaaaaagaaaaatgtgtttttcagttatagtcctcaaattctcactctctcctaattttgtaaaatctttcagctttctatttatatatttacattattaaaataaacacaaaaattaattataaaaaaattacataataaaattttcagttttaattttatccccaaatatcaaacgagtaaagataagatgacactctccaccctaacgagatttaatttgagtcgaagacctcgagtttatttaaagtaaattgggttgtataaatgggttgaaacattaatttagtctatcaaaataaattgggttgtatttttcatgatctaattattctattatctaaatttttgagaacatctttatctcatgttgggttgtactctattcgattaaacttgtacacagtatactccaattaatttgtaaagtgtgagagagaacattatcatataaatatatttctgtctatgctataaatgtatatatatatatatatatatatatcaaagaattaaactacttctcttaaataataatacttatattaaagaaaatagcaaagtacatactatgtgttaatattgtcatttattcaattaagtactggacctcatataatttattgtaataacttttaaggagtattactagtcaatcgcaaaatgatatatttagagatgttgtgcctaataacaatgtttattacaaaaatcctactatttcaacaattaaattatgggcatttgggttattaaaaagaagaaaagaaaaaaaagtcttctgttttcaataaattggttgatgtttgtttgtgcatagtgaatagaatattattccattcccaagatttctagaaaggcaacaccttaataaagtaaaaacttataggaaattggtgtggtccaaagtccaaaccaacccatgcaagagttcaaattaagcacattatttttgttacactttcttcttcaacacagttaattaattgtccttacattgaaagaatagggttctaaataggtggcatatgctgtggagtggcagctgaattaaaccaataacaaaaaaaaaaaacatgcattctgtgtttttctcatgctccaagtccaaggttagacttttattacaaagatttttttagggaatgtctattgttctactaggtcccttcacttgtgcttttcaagaccaatgatgttgttgtaaaattcttgttgagtattgatatggggtactaaagtgcttaatatcaccatgcggtgacgttttataattagttagcggtttttt

SEQ ID NO: 296147 - DNA, 1695 bp, Cannabis indica
tattctattctcattctcattcttatgttttattccttctaaccaaacgctaccttagttcttttacaagcgtatgaatttagaaaccaccaccactttgataacaaacaatcatggtaaactatgctacagcaaagaagtaacaaaactcacagcccagttaggaagtaatgccagcacagttggagaaagaccacgatacatgccacgtaacccctccttttgaaaaatttgctccaaacttccaactataagaccacctattcatataaaaaaaaaacaataatgaatggagtggacaatatgttaagtgttatgaaatttgtacctaaaatatgcacccaaaaattacacacattgattcctctgttgcaggactatgtatctctaatacaaatatataaatatatatatatttcaaattataacgattttctttttattttgtaagaaaagaacatttttttagtaataaatagaaaagtttccttctaataattgaatgaaaacttatatgtaataggaaaacattataatcgattaaattattttcccatcacgaatttaaaagaaaaagtagataaatactcaagaggtaggagctacagtagagatatgccacgacttaattcgattactaactctagcttccaattgcaattccacaaagatcaagagcttgaatcaagattgggtcctttatgagatcttcaacgacaacaatcgttcaatatttgaaaagaaaaaaaataaactcgcagcttcatgacagtttaccaactaaaaaatacaaagtgaaaaagcaaaagggcatacctttaatatttccatttccgttaccgatggtctgcaacccatgaacttgaagcctagtcttgataacatctaaggggcacacaaacgttgcggcaataacccctgcacccaattgccaaatccaatcaattgtatgcttttaatcgacagtcatacaacacaaaattcaaaattaacttcgtcaaatatcaaacaattaaattgaattaataagttcgatatagcactaaatacagggtaaatcaatactaaacaaagttgctaattttcttccaatcctcgattttctcgccattcaaacaataaattcccgaaaacaaaacaacgtaccagcagcggcaccagccccggcattgcacagaacactcttaggagtaagagtatgagcgtctgcagccatggtcgaattgtgaacgaatacgcaaagaacagtccgagttttgggcgaagaactcaaagaaaccctctttggagaggaagatccaagcagccaaccagcgtcgcatggccagaaggatttggacgagaagtagagaacaattaactcaattctcggttttcgtcttcgtcgtcgatttgaatcgaatcggtccgagatagggttagagatggaggagggtagtgccgtgcaagggtggaaggtgggtgagatattatgggtggaaattgggaattgggaatgggatcaaaccaccatagttgtgaggctctggattggcttcgtttctctatcgccaaaacccaaagcctacgatggtccccgctccgacgagtcgccacaattttctttttccctctttctatgggtccgactttatattttaattatacttaattaattacttaataggtttttttttcttttgtttttagaaaaaa

SEQ ID NO: 296148 - DNA, 11055 bp, Cannabis indica
tttgttgttaagaaacccaccaccattgatgaattgaattgaagtaaagatagagtctttatagtattattagtagagttacagagaaggattatgatcaagactcaagtcaatgtaactaagtaacactaaagatgaaaggagaatcctcttcaccatttccaaataaaaagaagattttttcttcttctcaaccatttcagaataggaggaaaactaactatgtttcttcttcttcttcaacaactcaagttaagaagaaagctagtgctgcttctgatgatggttttactgatactgtgttttcttggtcttttgatgatgttttcaatcatgacctttacaccaacaaggtttgatttttattttcttaactattgcctttcaattagttatgatgagaattgagattttaagtcttttggttaaatgggtctttgactaattgtctttactggttgattagactttgtccgtacaaagggtttcatctaaatactgtcttttgaatggagaagatgaaaatgctttgactttaaattaattttgtgtatatatacagtttaaacgttaattatgtttattataagagtttacaatgtttgtataactatagtttagaattatataaatcaagttttccattgttgtttgttgtttgtttttcttctggtgttatttgcaatactaattttatctactgaaaaattggtgttagcaatagttatagatttgctataatctgttgttgagttcataaacaaagtctttattttttcttttaggtgaaaaagattcctggatcatttcgatcagttgaggattacttggagtcttatgacaaccctttatttgaagaaactcgagctgaattgcactcgagtatggaaatgatgcatcgagcacctttcgctgaggtaatttcttttgaagaagctttactaaatgggaaaaaactataccaagttcgagttagttcttggagaaacgtttctagtaatggtggcagggaatcttacaagacaattcctggtgacatttttgtctagcaaatagtaagcccgaaaatgttaaagatttgcaaagagaaggcatgtcatggacttttctatctcttgttgatcatcaagggggtgtaaataccactcagttcaaagtcaaggcatcaaaagggtttaagcatgagaccatgaagcagcagtcatcgtcgctctatgtcattttcttagtgaatgtaatgcctcagataagaatatgggaagcattgcatatgtcgcccaatctaaagatgattaatgaagtcttatgcaattctggggtaagctttcaagactttttatgtactcttcatatgtgctgtaaacattcatttagatacagtttatttaagttaaagaaaaggtgtaattgttgctaaagagactctctaactcactctttctaatgctcaattgctaagccactttcattactgaagtttctttctctgccaatttccttatttgttatataagtacatatttatgttttgactgaaagtcctgaccctatataatgacaggctaagattcaatgtgatggttgttctgaactgagtaatggattctgggatgagaaatggaaggagaataatttgtgttccgaactgaatgagtctcaatctatagcagttttttcatgtcttcatatgatctgtgcaacttatacggggtcccccagggacagggaaaactaaaactaccagtactgttcttgtcaacctcttgagaatgaactgtaaaaccctcgtctgcactccaacaaatgttgccatttctgaagtggcttcttgtctgctgaggttggtgttagatgcagagggtaatgatttgttctgttcattggggggtattcttctttttggaactaaggagaaactcaacattggttcacatattcaagagatgtatttggactatcgagtccaaaagcttggagagtgctttggatcatttggctggaagaaatggttcccttccatgataaatcttctggaaaattctgtttctcagtaccattcattcttgcagaatgagttaaccgaagagagaggagaaagcaatgtaactagagttgaaaagaagggaaaagttaaatcatttcttgagtatatgagagaaacatttgattctacttcttcagaacttaagagatacatctctatcatatgtaggcataccgcgaaaagttacatttcggaaaaaaatttccaagatatggtgtcccttgatcgctcacttgttacttttgaatcatcattgcttcaagaaaatgtggaatctgaagtactggaagagctgttttctcatccagaagtaactcaatatgaatctcattcatatgcggatgaaatatatttatttctctttcaggaaagaagtgagtgtctatctttgctgagagatctttataattcccttaacagacttgacatttcgtgtttcaaggacaaacatgcgataaagaacttctgtttcgaaagagcactgttaattctttgtactgtatcgaactcatcaaggctgcaaaaattagcagttaatccaaccattttggttattgatgaagctgcacaattgaaagagtgtgagtcactcatacctcttcaacttccaagtttaaagcatgctattcttgttggtgatgaatggcaattaccagcgactgttaaaagccgagtaagttggaaaatcttttcttttttcacttttgcatatccttaacttttgctgattatatcctggttaatttttttgttggattttacattaaacacctataggtttgtgaggaagctgactttggaagaagtttattcaagagattgttgttaaacaatttttcgaagaagcacctcctaaataggcaatacagaatgcatcgatcaataagcgctttcccaaattcaaaattttataatgacaagatcattaatgaagatagagttgaaagacaggactatctctcggggccaatgtttggtccatattcttttataaatgtaactgtcggaagagaggaaaaggaagatgatggacaaagacaaaaaaatatgatccaggtagctgttatcttgaaaatactgcagaagctgttcaaaggtatccacattctcatatttccatcaaacttagctttaatttgaaatggtcatgtttatgtatcctaatatatatgaaattgtatattgcttttactgaagaatgacaaagattatagattggcagtaaattttccttttcaatgtaaaatcatcttgttagttctggcatgtaggaaaattctgcaaaaaaatccacagaaaatgtagaacaactactgatctagcaagttccttaaatctttaaaaataaaaaataaaaaaataaaataaaaactaacaaacttgaaacttagaggcatgaaagagactatgctaatacatacagttttttttttcttctatattaagcatgggtggagacaaaagaaaaactcaacattggcgtagtgtgtccctacactgctcaaatcgatgcaattcaggaaaatcttcggggtatgtatgataaattcgatggctttcatgtaaaggtgaagacagttgatggatttcagggtggggaagaggacataataataatgtccactgtctgttgtagtagtgataatcattcatcggatttcaaatctgaacctcggagaattaatgtcgctcttacaagggctaggtatgtaaactgcgtgttttatgttcttgcattaatttcacatctagcaactcactactgggcctattcatgtctccaggaattgtctctggattttgggtgatgaaagaagtctagctgatgatcaattagtttggcaacctatactcattaatgcgaaaagtcgtggatgttttttcaatgctgaagatgatgaggatttagctaaggctttaattcaattcaagaaagagttcagtccaattgatgatatgcttaatgctaagagtgtattgttcaggaattcaaagtggaaggtacagttattagtgcacacaaaaatagttaaatctaacagtttccacatactcaagaactttgttttcctccttttgtgtccaaactattgtaggtctttttcagtgataactttctgaagtcattaacagcaatcggaacaaataagtcagttaggaaacttctagttaagctttctgagggctgcagaccgagggaacatattgtagcttgtgagagttctttgccagtaaagattttcgaggttgaaggtttgtgtgttgtcaccactgttgacatactacaaggggattttggttacgtgcaagttttgaagatctgggacttgctgccttatgatgatactccaagactgatagaattcattgaccgtatttttgtgaagtacaagaaagattttatcaacctctgcaatgaaattcgttttgaagggtatgttgctttatgttttattagttttgagtttgtgtgtctaaaacattaaatgtgtccttatgttcttttgctattgttgtttttggttcccagcaaattagaagtaccgaagagttggccatcctatttagatattgtcaattttaaggatctttccatggaaaaaggtggaagtaatttagatggagctgtttctgatcaaagaggttatgataagaattcgaagctcaacgagagttcactgcctatgaaattctactctatgtcaagttgtgtagcgaatcacatactatctgaccgtgatggtagagagttggatctccccttcaaagtactagacctagaaagggagatcatcaattgtagcacaagtacatttgtacagggacggtcaggtactgggaaaactactgtcttagccatgaagttacttcagaaagaatacttccatcatatgactatggaaggattttatggagtcaaaaccaatgcatttggacctgtcaatcgaaattgtggggctcagaataactcagcagaagctcagggaagtggtttacgccagctttttgtgacagcaactcctactctttgtaaatctgtcgagcaacacatttccaacttgagaaggtgcgtaaaaaataattattgaaagttcaatggttaatattaactggaagttatattcatgcaggggcttaaattattttgttggattagcataggatcttggaatttacattagcttttacttaacttgatcattcaatctatggtaatatttaaatcatattaagatgcttgaagtttttcttcgtgttgaacatcaaatgatgatgatgattaagaaaaatatgaaaaccataataaggcctagaacaaaaaagaactccataaagtctgtagattaagtctaaataatgtgatatagacatagagactggagagcagagaccatgcactgccttatatctcctgtgtttttacttcataaaagacatgtaagccttaaaagtatttttgtgaacactagttgaattttctcagtcttctttatttgtatgtgataatattatacactataaatttatgattcaaaaacttgttcataaaaactcttctatttatgctcccttatttattatattcaaactttcaacagttcatgtagtgctcaccatccggctgaaagaacgttgattgatatggttgatattgataaggaagaatcaagattgaagaacatcccagattctttccaagacattcctcatgattcctatcctcttgttgtaacattccacaaatttttgatgatgcttgatggaacactgagtaaatcatatttcgaaggattaattgatatgacagaattttcactaagtcacatgccatgctcgagatcacgtattatagagtccttcataaggaccaaggaagtcaactatgaaaggtttagttcacaatactggcctcattttgattccaaattaacaaagaagcttgactcttccacagtctttactgaaataatttgtcgtattaaaggtagcctgcaagccatgaaagctagtgatggtaaacttacttgggaggactatcttaagtttgcaaagggaggtccctctggcttaagtaggaataagagacaaacaatatatcaaatattttggtcttatgaaaaacagaagatggaaaatggtgaatttgatttggctgattttgtaaatggtcttcacaaccaactcagagatgaaagatacaaaggtgatgaaatgcattttgtgtatattgatgacgtgcaagaccttacaatgagtcaacttgctttgtttaaacatgtatgttgtaatgttgaagagggttttgttttctccggtgatgatttacgctcagcaacagatggtatggattttaagatccaagatatacaatctctgtttgacaagaaaattatcatcaattcgactggcagaagtgaagatagagaagacaagggaaaaatcacaaaaagtttccatttgactcgaaactattgttccgactcaggtatttcgaaactatcacaaagcattttggaactatgctatcatttctttcctctctctaccgaaatgatcaaatatgaaaccacaaaagtaaatggtggagctccagttttgcttgaatgtgggagcagcaaaaatgctatcataacactgtttgggagaagcaaaaatgctagccgaaatgctaacattggttttggggccgagcaggtgattttggtaagagacgaagatactcgaaaggaaattaaggactatgttggcaaacaagctcttatcctaaccataccagagtgcaaggacaagtttcaggtgacatacatacataaatactttttctatgtttaatatataattaaattgaaatgccttgccatattttctattcgattaaagaagggatatgattttgtacatcagggacactcctcaattttcttccagtacggaacttttctactatttgctaacttccatgctgaaacgataaatatttccttttgtaggatgtattattgtacaactttttcgggtcatctcctttgggagaacaatggaaggttatatgcaactacactaaggaacaagatatgaatcttgttttcggatcatttcctgtttccacgtcacctacttttcctctcttcgacatatccaaacattacattatgttgcatgagttgaagctattatacattgctgtttcatgtacaaagcagagattgtggatttgtgatagcacagaactatcaaagcctatgtttgactattggattaagaagtgtcttgttcaagttaaacaactggatgattcgttcgtattttcaatgcaagtcccaagcagtaaacaagagtggaaatcacgaggcatcaaggtttgcttcttattatttaactattctatttgttcacacatggtgtgatcagatttcaagtgaagtgatatttaagacgttaatgaagatttcgaaaacaaaatcttatcatctgtttttgtgctgttactatgcctttttaaaatttttctttgatatttttgtcatcatcataaagattagaatttatatgtaccactatgttatctgtttcctgtttcggggaaataaaatgctttcatcactcttcccacaagctattgcatccttttctacttgaaaacttagcaaattaaatgtcttcctgcagctgtattatgaacacaactacgaaatggcctcgatttgctttgaaaagtcttttgacatagattgggaaagaaaatctaaagcttctggtcttaaggctatggctgatcgtatctgttcttccaagtctcaagaagctagttctttgcttagggaagctgctgagatattcatagctttagacgagactgattctgctgctagatgcttttgtgatttgggggagtatgaaagagcaggtataattttctaacctttctaaacaacttgattctataaacgtttttcttttactcgaataatgaggtgccattccagttttaaaatgaatcttgcactcagtgtatctctctttccttcatgtcatggtcagtttttgaactcatagcgagcatagggaattcatgtgaactaatcaattttccttggaaaactactgcagattttcttctttacgtaactcatgtttacacaatcccgaccatagtccttattcaaagaagagatctaatttttcattttattttccaaaaataactgattaaattaaagacaaggactggttcactaatctgataatgttaacagttcatattctagcagagctttatactaaatatgattttacctaacttatataatttctctcatgacataggtaatatatattttaaaagttgtggcgagtctgagctacaaagagctggagaatgttttactcttgcaggatgctatgagcttgcagctaaagcctatgcaagaggaaatttgttctcgaagtgtatagatatatgcaccaaaggaaagctatatagtaagggtttggcgtacatagaacgctggaaacaacatgctaagaaagaaggtgatatgaacactaaagctgaagaaatagaaaaaattgaacaggagcttttggagagatgtgctctcaattgttatgaggttaaagataatagatccatgataaattatctcaaatcatttaaatcaatgaatttagttcgtgactttttgcggccattaggttgctatgatgaacttatgttgttggaagaacattcaggaaattttatggaggctgctgaaattgcaaagctgaaaggagatgtacttgctgcaataaatcttcttgagaaggctgggaaatttaacgaagcagcaactcttattctttcctatgttcttgccaattcgctctggtcatctggtaaaaagggttggcccttaaagttgttcaaacaaaaggatcatcttttaacgaaagccaagtcatttgccaagaacgtgacaccggatttttatgagtttgtgcacacagaagctgagattatgacaaatgagaagactgacttagccaagaagaaaaatcaaatgattgcttcacagagtaaaaagagtgttagaggtgagatcttatcatcccggaaaattcttgatgctcatcttgcttcttcaaagctggcagagtatgtctgggaagaagatttagtacatgatcttatgaagcattcagaagacttgatttccaaaaaccagatttcagtggagtcattagtctacttctggaatttttggaaggacaagattgtcaggatttttgaatatcttgaatgtctacagtctcataatgttgatgtatttaaaagttatggagaattctgtttgagctttttaggtgttttgaaacagtctcagaatcagcatacgaattttgtcttgctgaacactgatgctgcttgggcaagaaatgtagagaaaagatccgtttgcagtaatggaaagttggtttctatcgatgtcttcgagtttgtttctgctgctaagaattactggtcttcagaagttctctctgttggttttatggttctacacaaactagaggccatccataagtttgtgaccgagaaatctcatccagttttcaggaaatgcaggactctttctcttatctatgaggttgtacaatttcttttagagtccaagtttcttaagagaacacatcatgaattagaggatctgcggaaattgaggagactatctactgatagttttttagctcacatattccctttagattggcggaatcgttggtggaaaaccatatttctttcagaggaacatacttttgtaagaattttctaaagcaattcacagttgaacatgccgtctcatctaatttgtcttacagagaacttggaaatgtggccatgtttattcttgtatcaggcaagctcaatgatgaactgtttcaaaagattctgagaagggtagagtggaatcgtccgtggaagcaattcttcgagactttacacacgtgtgaaggttcatacaatctgaatctgtctctgatttgtaggcttcatgatgctttggaagatgcatacaaagcacattgcagaggagtatatgactgcatatctattggatgtttcttgtatcttcttgagtgctttgtgactttgttatcttcctttgaaagttgcttcattgctacaaagtcatcatttgttgagtggctcgtctaccaagatgttcatacaacgaacaagtcaagttccaatacgtggatttgttttcgacaaccccgtttagagctattacagtttgttatccatgctataaagcattgccttcacaacaaggaatttatgactgaatggatcaaaagatctgtcttagttgagaatgagtcctactcattacttgttcagaggatggttgccataatctgtttgatttatgcgaatttcgaaatatgcttggacttgcttcttgatttacgaggaagaagttacatcactgaacaactaccaaggcagttttgtgaaaccctcaagtctagttttcaaaattcaaatctcgataaagcctttatgcaaatagacaataatttggtgattgtgagctttagggaaaaaccctcaaagtattcctttccaaatgctgtactcgtcaacatggaggcctatcatcacaaaaacgacatcataagattattgtttacgaaaacctttgacacttcagaagacttaactctagctcagccttctgtaacagaagcctgtgactcttgcacagaaacagtttctacaagcagttcaaccacagggatgagttccgagctttcacattctagttttgagttagcaactgatcatgacagccacacttggaacaaacccgactgcaatccaccaatggatgttgtatgcttttgggagatatttgaaaggattaactccgatgtttctggaataggcgaagtggaatttacattgaatcctcaaacaattaaggtacactatagttgagatcattttttatttattttagtatttt

SEQ ID NO: 296149 - DNA, 967 bp, Cannabis indica
gttggtatctaaaaaagtattaaaaaaatgtttataattgtatcgtatacataaataatttggttactatatatcaaatatcaaaaaagaaagatagaatgtggttatcattatgtctcttctctcttttcatataatatggtctaaaaagttgctaatcaccatattgcatttatacaaaatcagcccaaaaaaaatcgatccaaaagaatgatatggtcgtacatatatttcggtactttgttgataaagtttgtgtagtgaaatataaagtaagaacaggaaatttataaaccgttgaaaatagttttttgttatgtaaaaaggatttggctcaaatttaccataatgatgtatacaaaatatgcactataccataatatggaccaaaactgaaaattgcagctaggaccacaatttggtgcttcacaatatatttggatccttctttgggttatataatatatacattgtccacattacattgataattttatagccgcaaaaccaaattgataaatatcatttccaaaaataaaagagcatttatgcaaaatcatcattggatatgccatatttataaccttgttgcctgccattgttgatgctcaacaaaaaggaatcctagtagtgagtcagtgacacaacactagtcagcgattggttccaaaagcataaagttttgatatattatctctacttgataattatccatattgataatttcaaatatatgagagttagtattggtagatcatctttaatggagtgttaaaaggaggtgtattattattttttcttttcaataaaaagttttttcaatggtgtacaataagttgtgctaaatttaccacatgctaaaaaatttgaccaaatttataacatggtatagcattgtgtcaaatttaatacattgttacttttttataatatttttaccattaattattaatgaaatactttaata

SEQ ID NO: 296150 - DNA, 4181 bp, Cannabis indica
gcagagaagacatgtgttgctgctgcggagaagactggtgttactgctacagagaagactatgttgctactatggaggagcgacataactctagagaagatgaaccaccaggagtttgtgattgaccgacgtttggataaagttatctaaaaaattagttatataacttagcacattattcaggtgttagactacatgtgtcacgatagtcgtaaacatatttgccacaatattgtatattttattaggggcaaaggatgcacaattgactgactttgactgtatatattttttttacttttgcctttaatcttataaccaatgcctctttgataattaggtctttccccaagtactttttttaagtaccttgaatcagattcagtaccaaatgtatcactctgaaattgtctttcaagtcttttcctatcaagctccttaagtattttcccctattaaagtaaaatattattagaagatataactaatataatatttaaaatttaactatacaataatttgatacttatagaaattataattcaaattattttatagagcgtatacttatagttatttaaaaaaaatttatatgttttgttaaatttcaaataatttatggcagtaaaaatagattataaaataacttattttacttgaaacaaatttcaaaattacgtacttatgttttggctttcggcacatttatttaatacaatctctgtaataaccgcataatttgacatggaaattaacagtggtttatttattatttatgataatatgtgcattagaaaaaagacaagtcttattattagaaataggaattagtgatataatttattaattacgaaaattttattgaattttaggtatgccatatatgatatatgaattttagtattttcatattttatgtttgataatagtaaaatttgagtaaagaggtgtggtgcaagttgaatattctgaagcataattttgtgctttggttggctattcaagatagattgaagactagagaaagactgcttaatttcaagataatagatgacctgatgtgtatcttctgtaacttggcaatggaaacaaatgatcatttattttttgaatgccctttctctcatgattgtcttatgtagttgaaaatatggcttggatggaatgtaggctctgtttcattgcaggggttgttgtggtggattgaaagaaccagataaagcacgttcaagaaataagtattttcagctactgtagcagctttagtctatcaaatttgatatgttaagaacgataaaatatagaattcaagtactatttgcttgcaacaacaaagaaaatgattaatcaagaatagaattacttgtgccatgccaaagaagattacaaagaaggatcgggactggtttgatacactataaatgttgtatatgtattatttactgctgtatagattcttacatgtcttcattcttgaaggtgctcatatgttgtataaaacattgattggtaatcaatgtcatatcattcaataaaaaaaaaaaaagtagaatttgacgtttgtttggccaatattgtcacttaggtatggtttagtatcctagaattagtgcgacaagatttatggacagttagaatatgaggttatgatgggtacttggttatgactattttacctgtaggtgaaaaaattacttaagggtggagtaaagggtattttggacatttatcaattaagttttgttttatttttctcagtggattaagttgaaaaataagtatatttatgctgaataaaggttagattattcttgaagattttaaataacctcaaaaatcaagttagaagcatttctctttcttttctaacctaatctctcgaccttagctggaaatcaagaagaaacaagctaattctagaccactccaccatcttagtagggatttcaacttagtctctaatggtgattgaatttaaagacaaaggtaaaccctatactcttctcttctctttaaaatttttgatggaaagttggtttgggtgagtgactttgagtttccggttatgtataaatttaggtgagttagaagctattttagggtttggtttgtgattgtttgtagctatttttaaaggataatagcagctgtagtttcagttgtgtgagtttgagtttaagaactcaaacttagcttaacaatggtggtttttaattctatggggttttgatgtgtttaattggttgattgtgtttgttatgccttaattaggtgttctggaaagtttagggtaatattaaggaaggaaacctcgagtttgtatttcttgctatgaaacagtccaccatctttctagaaacgatgaaccgtttcccaagcagaaccccagaaaacggtgaactgtttggggatacgatccactggttggggtgattttgggtaccttagtttttgtattttctccatatttagggtattgtcacgatatatattgatagagaaacttttaattttgagtttaagtcccaaaaagcgtttaagcgagacacttactggtttaacgtgaatgtgacttagggcctctaatcatcgaacactttttacactcagtttgactaacaaacttgattatggaattgaggtaagattagtataacacacacatatgcacatgtttagcatacatgtttatgtttgccaattagataacatatctgtaagagcagtattggtgtacttagagtttcacttggatattgatgagatatatgtttgacaattcagtaaagtacgaattgatactaccacatcaatatgactagaatactgagtataggttggtattatgattaattgtacttatagtatgaatattactatcacatcagtacgagtagattcttgagtataggctaatattatggtcaatcgtactgtagtcaagaatattcaagactcatacatgtttcgcacgggttagggttgggaaaaggtgtatgggcacctatattacaagtcaagttattgttaacctcgaaaattggcacttgagatttctaagattagctgaccaaggcttgaagaacgacatgacgaaagtcgcctaacccaaaaatgacttaatgtcactcatccgtgagagtgacaatatcacttgaccatgagagtgacaaagtcatttagcaagaatgacaatgtcactcggccttgcgaatgtcaatgccactcatcctagaggacgacaatgttacttggccatgacattgtgaagtcactaaacatgcatccgtaaatgtcactcagcacacattcgtgaaatgtcactcagcatggacattcacaatgtcactcagaatgcatccgtaaatgtcactcggaatgctcccgtgaatgtcactcgacatactctgcgaatgtcactcggtaaagacattcacaatgagactcggtaatgacattgtaaatgtcactcgacacacatctatgaatgtcacttggcatacatccatgaatgtcactcggcaaggacattgtgaatgtcactcggcaatgacattgtgaatgtcactcagcacacatccgttaatgtctctcagtatggacattcacaatgtcacttgacaatgacattgtaaatgtcaattggcacacatatgtgaatgtcactcaacatggacatttataatttcactcaacaatggcattgtgaatgtccttcgacatgtcttcttcagaagccgctataccatgacatcgcaaatgtcactcagccatgaccccaagcaagaggagagtgaagcgaggaggatacgatcacaaggataaggtaagcatgcgaggagactacaacaatgccttttacatgctctaaatgtaaggaggtgcgagaagtggaggcaccacacctgcaaggtctgaggatccaaccaagggtgcactgcagccactatccctgcaaattgggaccacttgacaccagacaagggtatgaggtgcaagaccacctcttgcaactacgatttacagcttgaaagtgacaccttgtctctttggcaccaccatgtatctcaggccattaaagcctataaatacactactacaaacaaaggcctttaatcccggtttttaaggctttttatcccggttttcgctaaaatgaaaaccgggatatatgccagtgg

SEQ ID NO: 296151 - DNA, 3927 bp, Cannabis indica
cacttgattgagctttcttaaggaatagcaagtccattccaatgctcattcatgttaatcattagggtttagatttaatgtattaattgagttcaaagtcttattttaatcattttagaaaatataggatctattttatcatttaacaaaatagaaggtccaatcaataatttctacaaaacacaaattctaaaatagtatttaccctaaaagtattaaactacataaaaattaaaatattacacaattattattatttaataaactatttattactaaaacataacttaaaaattataaaaataatactaatatattataaaaataaattacaaattataaaatatttttaaaaatataaaataaaacactaaacgagttaaattaatccctaactccacccgtttaacattcggaaacaaaaaataattttaattcttatttcattttttatttaaataaaaaattagaagctggtaatttacatcgtcctaggtataaaaatgttaaatcatgtaattatcttccgaattcatgtggccctcgtgtgtttgattacaaataaaatattacccattgctgtaattgattctgacaagtctgaatttgtctttttttgtttctttaactttaaatattttcaattttcaatgttcattcataaaaatatcaaaaccattttcatggttcaatatccaagaatccactcctatcaataacgattctacttggtatattctgagatcttcttttgttaaatctctacaattcccctgatgactcataaagtttgaatcttttaacctcaatcaaactatattcagtttctcaatagagaatttcgaatcttctttcgatttatacgtcaaaaatggtgtttgataaagaagcaggatcttcatcccaagccctaaaagctccaccaccgccgagggaggacacgcccttactcggtagccaaaaatcattatcatctcaagccaagacctttgctaatgtgtttatagccatagttggtgctggtgttctgggcttaccgtacaccttcatgagaacaggttgggtattgagtctccttacgatgttcggcgtggccgctcttactcaccgatgcatgatgttgttggtctacacccgccggagactcgaatcctttgatgggttcacaaagatatcatcttttggagatttgggtttcattgtttgtggctcatttgggagattattggttgatgttcttataatcttagctcaagctgggttttgtgttggttatctaatcttcataggtaatactatggctaatctcttaacttcaccaactgcatctttgaaaactactatgacccttttgagttccaagatattggggttgaatcccaagagtttttacatatggggttgtttccctttccaattagggttgaattcaattccaactttgacccatcttgcccctttgagcattttggctgatgtggttgatcttggagcaatgggtgttgtgatgattgaagaagttattgttttgttgagtaataggcctgtggtgagggctttttcagggttttctgagtttttgtatggcttaggtgtgattgtttactcctttgaagggattggaatgtgtttaccattggaatctgagatgaaagagaagaacaaatatggtaaagtattagcctttacaatggggttcatatcaataatgtatgggagttttggttctttgggttactttgcttatggggatgaaacacaagatatgatcactgctaacttgggtgcaggattgattagcatcttgatcaagcttggactttgtgtgaatctatttttcaccttacctataatgatgaacccggtttatgagatcattgagaggaggttttggggtgggaggtactgcctgtggttgagatggctttcggtttttgttgtgactttggtggctttgttggtcccaaactttgctgatttcttgtctttggtaggcagtgggatttgctgtgcattggggtttgttttgccttctttgtttcattttctggtattcaaggatgacatgaatcgaactgcatggtggtctgatgtgactattttcgttttgggcattggtcttggagtttccggaacttggtatgctttgcaagaaatgtttgctgctaaagtgtagatatataatgaatctgtaacaggtttgaactataaaagcttataccaatgtattgatgttctcttcctattatcatttgtaaattttgaattgtttgagttgttaagtatgaatttcaatctaatgaacaattctcttcctattttttcttgatacaaatgggtggttatctgtaattgcaaattaagtggcaacaactaagtaagtaatatacagaaacacgtagtaacaactatgtttgattagttgtataaggtagagagagagagagagatgaggttccaaagtggtgtagttgggttgggtgagaatagaaaaagtcccacatggaaagtaagagaagaggatagagagaaagagagtataaaaaagaaggaagaaggaaagagtaacatacttacctggacggggtcaatgggtgatcaagaaggcccatggcctaggctggtgacctccattgcacttaggaggggtgccagcttatggtctcctcaagtaggagagccaacgtcataatttgtggtagtgggggcctgcgttcgcgcggcccctcctcaattcttagttcaacttttcttctctagtttttaagctttcttcatttaagaggaaaataatcttttgtttttgatataatttatttgttactctagtgtaattttttactttttggcagaaagagagtgtagattgaattacgagctttgtaaaaattcaatttctctgaaggaaggagcctgtaattttaataaatacaattttcataaaaagttgagggggccattaagatgcaaaaacaaaatcttggagggagccattaaacaaatttgaaagaaaaatttccatttctttaaatatacaacttgatttatgaggggcaccatgcaaaaacaaaataaaaataagtaaaatttacaaaattatcactaaaaaaaattgtaaaagaaaaatttgggggaccctatgagctacaatatagctcgagtcttgttattctctctatctttttctaaactctcactattatccttccctctctcactaaacatagttttaaggtagtttagctagatgacaatctaattgcgaaggttaactacatattatccacctaaatacacaggtgaggtgataccttttttagctttttaagattttacagttgatttatagaagagaagtgccttaaggaaaatttcaagtcaaaatatacagatataaaaagaggatttgcctacttgattcttgaccatctttcatttatatccatacaagaaaatgaacaagacaaacacatctcttaagtaggacaaaatcataagagtttttattggggataaaaatggcacaactcaataggaaaatatactcattaatgtaccgaagtaatgctcaaaaatcaaaggagaatttccatctcaacaaataaaaaagaattgaaaaaaaaggggggagaagattacacgaggtgaatacaaaattacatcacaatcagtggcggcatactatataatatggtattcacgcgagggaaaaacaatcccacacgacggcatatcatctatatacggtgctaatagtaagtcgctttgaataataagaagcaaacacaaagaagagcaagaactactacccggctaaaatgcactccaactgtcggtgccttttttcggtgtttgactatccagtgatgtcctaaacggcgctgaagaaccaaaagggtctgatcttggagtttgactatccagtga

SEQ ID NO: 296152 - DNA, 3747 bp, Cannabis indica
aaataaagaaagagaaggaaacttaggaaaagaaggccattgaaatcgttggtattgcttagattacaaaaaaagtcagcaacctcagatgtgagatagaagaaagctaacgttcacgtcaaactagtcacaatttaagttaaataaataaataatatttcaccatttattactttggaatggacttaccacctcacccaactcctgaaagaatcactctaccaacaaaagaaaacagagtattcatctcttcttcttcttatttttcttgttacattttttttacctgtattaagaaaaatgccgactgacaaaacataaatgtgcccatattgaaggtggtgtagttgatcagacggtgaccattatggccaagaggtcagattttgctcagaagcttttggatgatcttcgtctccgaaaggagcgaatgtctgcttcatcacagagctcaaaccgttctaattcaatggctattataggtaagtagttaagtttagtattcacattacattgtataagtttttattataataaaaatgtttgaatagaattagttcatatggaataatggtattttttagtgcatgcaataaattaacattatgttctttgagtatttattgctataattaggatatggaattagtttatttttatactctgacttactaaataaaaaaatgaaagataattacataaataataattaaaagcttcattatgtaaatggtgcagttaattgatatgtttattggtgaatcattacagatgcctattcttatgccaagcaaaactataaaggatacaaagatgtaagaacaaacgaaatggtaaagcaattattgatttattggttgaatttcaacagacgaaatgaagtgaaacttaaaaaaatgtttaattattttgtataggttggttctagagctggaaatactcgattaaagtctagtggaggtagtagatcatccttgagtggagaatcaggaaaacaacagttggtgtcttatggaagaggccaagggtcagagcaatttggagatctttcaatggctttgagtttcgcaatagaaaatgctggaaaacttggaagaacagattcatccacaagaagttcaatgcttggatttctacaacagatgggaagaagctctattagcaatgctgataggcacaggccttcaactagccaattccctgccttttcttctgtacaaattgatgagatatcaaaaggggcaatgaagttgaatcaaatccttaaagcttgctccaatggccttaactttgatagttactctattgaaattgggaaggaactactgaaaggagccatagatttggagaactcactgaagatgcttgtcaacttgcaggaagcttctgagttcatggtaagtagtagtgcacagaagaaaaagaagacaaaccgaatcaaattgctcgaggaaggagaggaagacgaagacgaaagtagtgtgaatatagctgaggaatggaaactagaggttcctagattctctttcgacaagccatcaagaaaaaacatccaagagtttggaagaaatggccataagcagagtctaccagctctgactaactcaacacaacatagtaacttcaaccatgaaaaccagctggtgcctgccccaagatcaagttcctaccaccacaatcgatcaatcagttctggttctaatgccagaagtctttccacattatcagaacgaaagaatcaaccggcctcatctgattctaaatcagaaaaggcaagaattcccagtgtgattgctaagcttatgggattagataagcttcctgaaactgagaatccaacttctacagcacagagaaactacatttccaaaccaaaagacgagagagatcagtcatttcggagaatggtacaggaagaagagagagacactcctaagattgttggacacaaagctaaagtccctgagaatcttgtacaacccagaaaacaaaaagtggtagaagttaacaagactacttttggtcataacagcccttcatttgtggtggtgaacaaagagaaaaaggttattccttcttctcctttcaactttgaggttgttatggaagacgaaaaatcgccatgggagaattctcaagggagcacagcaatgacaagatcagataaggccatggcaagaaaagatgagcaacagaatgtggtaattcaatataaacagaacacaagtcgaatggataataataataagaagaaacagttgtcaagcagtcaaaagaagtcacagaacaatttagagttgcaacaaccattcgtgcctagaaaattagtatcagaagataatggaaaacaagttttacagacaagaaaacaaaagggtagcactggtagtagtgaagttatggcaaagagtgtatcgaaacctgtccgtgatggaacaaattttcaacagaaacagcagcagccacagtctaaccaagaaaagttgaataagaaaggtttgaaaaaaggtactaatacagacgatgcggtggggatagaaagaaatttggctgaatctaatttcgttaaggaatacaacaatcgaaacccggatcagaattcgtctctaaaactacaagaacctgaaccaagaaaagaaaagcctcgcattccaccagttatggatgagaaagctgttcatgtgccaattatacagaaagcaaaagttgctagagggcataataatgaagtacttggcagaagaagtgggagtttgaacaacctgaccaggccaccaagacaccagagttcaattttgaaagaagcagtcaaatctagaaaggttgaaaaacttagagacattagaccagaagaagcagaaccacgaatcatcaagtctaatagatcaaccgtaaacaatcaactgaatgatttgactccaaatttgctcaaagaacaagttgagaacaagtacaccatgaatacttcaaaggaagatgactataaaagcttgcatgagccagaagcactaccatcaaatgacagagtaagttaaaaaaaaattcttactagtaatggctaattgaattctagctatatttttatttttggtttgcctttcaatctacgaattatataagttaatatataattaatgatatattgctggttgttatgcaggaccaaaacgtgatacctattattgaagaagatcaaacgcctttatgtgaagatgatcaagagcacaaatgtggaggagatgtttcaaatgaacttactggtaagtacaatatacaatctttcttttccaacattataactctttgtcaaactctttgtgttgtcatgtcatattcgtgttcgtattatgttgtttaattggtcaacactaatccggcccatatatattttgtgtcaagaaattctaactctaatctgatctgtcgtattttcgtgttaacttatcgtgtttgtgtatcaactatacttgtggtaaatgttgattggcatgattggtatcgcatatttaatttttataaaaataatttatcacaaattataataaaatttttaatatcaaatataaattatttatcttatattcttgtagcaatttttttctaattatatattttatgaaaataaataataatttaactataattttaatgatttattggaaataaattggtcaatttgtgtcgatttcgtgtcacatgcataaatcttaacccaactcaaataataatcgtgtcatttgggttcga

SEQ ID NO: 296153 - DNA, 3807 bp, Cannabis indica
ggcataaaacccaacactacgtactcgtcccgtactagtgttggtaacactgtgtcgtaccctttgaacatcatatattgtaccaatacactcagtaccgcaatcgtactagtgttggtagtatacaagttacataatacaacatgcaatttacatacacacacatatacatatacatatcttatgctagtctcaccttgtttcctaattcaagtgtgtcggtcaacctgaactgaggccttatgccacaatcacgcaaaatgggtaaatcacttgctaaaaccttttcgaaaatctaaactcaaaactaaaagtttccctatcgataaatattatgaaaataccctaaatattgaggaaatacaaaaactaaggctcccaaaattactaaaatcggtaaaccaaactttcaaaatggtaaatcgttttctagcgttgctggccttcttggttgtgtttttattgttgttcttattgttgttggtggtggtggtggtggtgttgcttgccttcttgctagtgtcgttattgttgtccttgttgaagtttttgtagctagtcttgttgttgttgttgttagtttggtgttgataatggtgaattgggcaccgttggagtggtggatccctcgagatcaccatccccaccgggaaaaatttgcctaattggattggacttaggctttttgggatccctaccggacggttgggggggagtcttgcgctttgaggtcccaaaaatacctttcttgggaaatacgagcccatctaaactatcttctaaagcattggtgttctctggttcttctcgagcggatccctccacgatcggagtatccactagggcatgttatttgggatggcttccctagttcacgccattcccgaatgcgaccaagtctttggaagcccctcccatcgcgacaagagttttatcgagcgccgcgaaagcagtacgggtggggtctgcaatggttgccttcccatgaggagggatctcccaaacatccaaagaagaagagatagagggaggcttcggcttacaggactgggaagccctagtcttgccctttccttttcccttagttccccccaccttggccaaggatttagccaatttgtcattcaaagccttcaacattttcatcttgggagtatctataaaaacaacaagcacatgattagaaaaccgactcccaaacagcaaaaccaaaggcataagcaagattcaaacgatatattcctaaaagagtgtgcatgtgggtgcaaccattcagtgagcaactataaagctccccacaggtaaagagattcatgtcctcctaaccaacgaagttgccataatctctgaagaatggaaggacatggttgcaaaaggatccactataatgttgtcttgaggcaaccctggattactaggactcctaacaattttgtctactctatctatgaactcgctcagtggatatttagcaagatttaaattcaaaaagtaattgtcgaatcccccttgattcatctgagagaaatgatggaggttggggtacaaagaacaccgaagggcctattacctcttctggaagtgttagctcccaaagcgcctttatctgggaaggtcgaaccatacctctcctagatctccctagcttcgatcaaaagatttgggtgacagagcatccaactagctttcaggagttgatcatctttagcagcttttgtgataagtttggcaaagtcatgagacaattcctccttaatatccttaggagcttgactatggcccatgttgctaacattgtcaatgctttggaaagtcgcgatgagtctgtgctcccaaagtaatggtgttgtaactagatcttcgactttcagttggtcctcagtgaaagccttatattgagctgcttttttgatcaatttctcagtctcagcactctgaggaacaagatatgtcaaaagaaacaaaagagtatggaaattgactcaacacttgaaccaaagcagaagataagggagaaaataaatcaagacactaagtgcaaaaaatatttacctatgagttggaaactgagttagagagtaggtaacctcctcaccaagaagtcggtggagaaaaaccaatactccctgaggtcatgggagcctttggtaaaactggtgggacagtaagcatcaggatacttctcaagcttataaaaccccaacttcttgcaaattagtcctcatcgggtgagacttcagtgcgtagaaatacaaaatctctttcaggaagggcacctcgaacttgttcactttgcaaaaaatataccatcaagcaagaagcttgtaagatggaagtattagttggaaaggagctatcccaacgcatgcggtgaactctgcaaaataagttcttagtgggaggtgtacactactttgaatatgggaccagctccaggcactgaattcccccatgctcagggacgcagattcctctagggtggccctcctgtgccacatcaatctcagaattttgagtagtccagctccaatagcgtacgactcaagcctcccatacgaacggaagaaattctatttctgatccatctccgagatggaatcatttacctcctgggcaccaggcgaagccctagctttcatttttctcttagattttttgagggtactagatggagcctcctccagaatggtttccgaaaactctcctagagtaaccttcgaaatgacctccgggatggtagccagttgaatttcccctgcaggaactccctcctaagttccctcagtgatggttcctccggcgaggatgatggaagagttgtcttcgatctccactgcatcaagatgtgactcttcattcaaatccatcactggcgaaagaaagaaaagcaccaagcaattaaatatccactatccaaataacaaaatgggtattgaagaaagtctccctaaaaattgcttggagaggtccctgaagtctccctaaaaattgcttggagaggtccctgccggacccgtcgcttttaggaacaagtttttcacaagtaactcaaaacgaccggtcaggaactctagagaaacaaccaaaaacagcatcgatacaatcgatcccaaaaaacaaaggccattgcagagtcctaaaaactcctcacatgcataaaagaataaactttttcgggagtacattcaagaatccataaattactgttcaactctaatcctaaaatcctatcggcatgcaaaacttataggttattggtgattataccctaactgactacacgacaaggacactcatggcgcaagaaatttgcacacaacccaaccctggaaacatgtttctacaagcaacatctgatcattcaaacacacagtatgttctagacctagcttgaacttagcacttatatcctagatatgaaataatgtaaagtcaacatagcgtcagggaacttacttgatgtttggatggggaatggaaggttgtcgtgcaaatctgcccaaaagcgttgaacccagtcgatcaagtggtcatagccggcccaaatatcgaaattcttgtctagttgggggtggagcaagtctgaatttatgggttcggcttttggaaaataaaataaatggaagttaaggaaatactagatgagacactcaaaagcctcttgcattcactattaatggcgatggtgaaacaagagtctttggaaattaaaggctttggttcgaaaaattgtaagaaggcttaaaaatattgaaggtgatagaaaagggggaaatggattcttggaacctattgttgggttttatg

SEQ ID NO: 296154 - DNA, 1088 bp, Cannabis indica
cccaaattaaagagaacaacttcctccttcaagtatctctcggccaaaaggctttgcacatatatgacatggtaaatttcataattataaagacccttaggtctatattgctttctattagattcttggtcataacaattttcttccagtaccaattagagcttcgtgtggagcctcataaatccaccagttttgttctttaatgtagacccaccacaagttatttttttattagcaatatcctaaacaaacttgcttaaagcacccacattctaatggacaatgtttcgaaaaccaagttcccctttcactcttaggacaccaaatagactcccaagcaatatgtcatggacttaaggaattagaacttcctttccggtaaaaggccttgtatatgctattaattttactaagaatatatttagataaaatcataatttgagcccaataaatgtgaatggccaacaagacaaaattaatcaaaatacatcttccagcagacgagacatatcgggaactccaaattttgattttagcaactattttttcaataataaagtcacaatccacttaagaaatacgaccaacacaaataggaatgatcaaatatctaaaagggaggctgctttgagtatatatatcttgaactaccaagaatgaattttacattagaagaagttatacctgagcaataaagtgaagtcttgttggaattggcttgtaaaactgaggtatctacaaatctcttgatgttcttaaaggaagcataacgaattgaatatcctctttagaaaaaagaagaacatcatcagcaaaacaaagatgattcagatgaaggcttttatatctcggatgataattgctttcctttctttttaccattttagccaataatctagaaaggtattccatgttgagaatcatggggttccaactcaaaaccaattggctatgagtggagtagcccatgttcttatatatggatcaattctctaccatttattccatgtgggacattgtccacaatattcccctcaagatgatagactatttttgctcgatcaatcttgaaccgtatcagagtggac

SEQ ID NO: 296155 - DNA, 8174 bp, Cannabis indica
agttttttattttatttttttttttttttgtgaaataatcttgtctgattttaatacaccttctaaatcaaaggttatttttttttttaattttttaacaataccttattattttattttacctccactattttatttagttttaatttgttgatgcttacctataaatggctctgtcagagcacatgagaatgtaccccttgccccgaaaagatatatccatataagtgtttgtatatattgataactagtgtgtgtgtgtgtgacagtgagcgtggtttgagaagagaaatgataaatgaagatagtgataataaaaagtacgtagctggcaccaacatccaccaccattgtcttgtacattgtttcttttagtttcactgtttctgaattctttatatgtctatattgatagtggaatatattatgagatgctcttttctttaactgcactcaaacctgcaaaatttaattactaacattggtctctttgacattgtgcaatatatatatcttataaataataaatattattgatatatggaatgtggcatcctagcataaatatcacatgttacatttttctattaattttctgttattatcattatcattctgttggaatgatgactgtacattttttttttaataattaagtaaattttattaagaaagtaaactaaaacatagtagtaactacaacgggggctacctttcaaagacgacctttagcattcaccttggcacaacgagcccaaacagctaaggcgtccgcgatgccgttaacataccggctaatgtggataaagagcacattatcaaactgcttacagatgtttaaacaagagacggaaactggataagtcgttcatcccacaggatggtatccagagttaattaagagcatcgactacaaccaaaacatcagattgaatgtgcagcttcgaaatgtttcgctcccttatttttcggagggccatcaaaattgcaagaagctcaccctcaagggcactcgaaactggagcaaaatccactgcaacccacagctcagttgcagccatatcccctgtttccacgatggccatccccgcagccttgtgcatcaccgaagcatcagtttgaaaacagacggtgtccacatccttcagaaactctggtagagagcatagttttttttgggtcgcaaatctccttcaccggcctagataccacaatttcttgatatatgaaacgaagatcataggcaatgcattccatattaattctagttttctcaaaccgaattttctttctccatttccaaagcacatcacacaggcagacagcaaacagcgttaaatcaccatcactaaggtttgtccaccagatagcaaaatcccataccgaattccattgcagactgtctatccaaatgccccaaggactctgaaactatagacctttagtgaaattgcattgacagaaaagatgcaccgtcgattctttagaagctacacagaaagcacacttgttttcatcaggatccaagaatcctagtctctctttcacgggaagaatatcagactagattttctacaataaaagctttagtctagaatgcatttccatctttcacagtaccctccaaattttgttaggttcctgaaaacgaaagctttgactcattgagtaagtacacttcacaaagaatttacccgagtttgccgctttccaaaaaaagcacatcctcatcttcctccaacatcctgatacagagaatgctacgtgccatatcctcatcgaaacatgcccgaataaggtcaccaaccccctccttttctccagccaagaataagtcaaaaaccttgcaaaaagcgtgaacttgattatacttgaaactctccttaatctcctctatagtcttgtttgggatccaaggtctatcccagagatcaatatttccatttcctactaaatactcgacaccatccaaacaaatggggcgcacattcaacaagccttgccaacactgggtttcccttgccctttcagggacaaacctagcatccaggaaatggcactatttggctgacataatccgaatccaaactttgttatcccccgtaatgaacatccagtaaagtttgggaagtaaagccatattcatgtcaaaatacatcctcaaccctaatccgccacagctctttgtttcaggaagttaaaatcatcgctttttctagtagagaagaaaaaaggattaccaaggtatttttctttagaattaagcgtgttcataccaagaactacctttaaagtctccttttctttgcatggcgtattgggggagaaaaccactctactttttaccatattaactttctcaccagactaaccctcatattgtctcaagcactccatgagactagtgacattacgataagaagcttcgcaaaagaacacagcatcatcagcatagaacagatgtgtgataggtagtgcattttgagagacccgcacacccacaatatctcccttctattcagcccaaagaataagtttggacaacacttcactgcagagtatgaataaatatggagataagagatcgccttgtcttagaccttgcttgggattgaagggagccaaaggcacgccattaagcaaaatagaatatgaaactgatgttatacttataatgagcacgcaggcatctctctaaaatccattagctttcaaaacccgtaacaaaaagctccattcaaggcgatcgtaggccttacccatatccattttaatcgcaataactccatatttccctttcttgtgtttgagaaagtgtagaacttcttaagtcaagattgaacattccgcgatccaacgtcccggaataaaagacgattgatatggagagactaatctatacaaaattcctttgagtcgatccgtcagaattcttgagataatcttgtaacagaagttgcatagacttatcggtcgaaattgatcaaaggtagaagcatttgtagtttttgggatcaagcacaaaaaaggatgattaatttttctgctaagattcttcagagcgaaaaaatcttgtatcatttcgcaaacttggcttccaacgatcacccaatacttcctataaaaaataccgaaaaaccatctggtcctggcgatttcaaaggatgaaacgcaacgatacgtctcaaatttctttatagctaggaatttttcaaatcatttcattttctgcctcagtgatcccttctgttaacatatcttcaaaatcatccctgatgattggacattgagattcgaagacttcactaaattttttcctgaaaaaatttccaatactatcacgatggtgcacccacgaaccatcttcgtcctcaatacttccaataaaattccttcgtcttcgaaccactgtggaagcgtggaaaaatttggtgttaccatccccaaaatgcagccaattttccctggatttttgtttccaaattcgctcaattttatcttctatatcaagtattttgagctgcacactcgcttcccattctagagcctactgagaaaaggaagaattttggatcgaaactaattcctcctttattttccgtaacttatgttcacaaaaaccaaatgaatttaaattccaaattttaagctcttttttgatttcccaatttcttagatagaataacatcactactgccataaaatatgttactccaagatcttctcaccaccttttcacagcttgggctggtagttcatgcttctaagaatctgaaaggataaaaaagtttctccatatgaccccaaatatttagcaatagaggagagtggttcgatgccacaatcaacaaatttgtgactttggtgttgggaaaggccatacaccaggagacgtcaaccatggccctatcaagcctcttgcgaatgcgataattgccccttttctagagttgtgccatgtacatttgacaccatgaaaacccaagtcgacacctctagtctcaaataagaagttcttcaaaatacttccctccatgtccattacaaacgtcccaccttccttctcggtttcatccaagattacgtttaaatccccaataacgacccaaggttcgtcacaacctgccactttactcgtaaaccaattctggaatgccacttacccactcccctagccacggagatcaccccatggaagccagtatcgaaagtctcaatcatatgaattacggtcccctgtctccaagccaaacaaaaccccccaccaacaccaacaaccggtatccccaccacatttgcaaaacccaggcgattcataatggtactcaaaacttccattcaaaccttagtctcagaatgaaaggcacatccgcattagactctcgtatcaaaccccggagggttctctctatcacaggcctgcagagcccacgaccgttccaggtcaggctcctcatggggacggtgggggcatgaaagagttcacctcctcgccattgccaaaattttgctcatatgaaattgggatctcaacacagttagctaacaccacttccaaattacctgttaaaacttcatagtcttcctttgatatctccttatgccttcgtcatctcctcgttttaactcccgacgttttctttgtagtagatgccaatttatttttgcctttgctttttcttacatgcccctttttccttgtactctcactagcttcgccaacaccaatgtagaaattaagctcaaaatttgcgactttcccgacagcatcaatctctgttaccttctcatcattaccagggcaagtaaggagttattcaagatagccaaatagggatgataacaagtgtgcattttcctcttacgacttccaagtaggtgcataatcatctcagataagtcaggtgggtttgagataagtgaagcctaagccctatagagaccagtgtaatctggcccgtaaagcttgagaaacagtctttgggcctcatcataattattgggccaacaaataggggtaggttcagggaatagatgtggtcgttgggatcgacatatccaagaatgaggaacttccaatgtttgtgcaattgttggcccaatatcagggatcaaatcatctctaccctccactgaagtaaaattgggctgaggtagctccaaaaaagcaggcccagtatccactctaggtccaatagcattcaaactaccctcacgaattatcacagcaaatctgttatctacgtcagtccccacaccaatcaaattatccacgttccttgcctcaacacctgtgcaattagcatacccatgttcctttatcatacactgactgttagaggctttaggggaacagccacgcctcctcgtactattgatgctttttgatagctcatcattttactgctagtaccattctcctccatctctgtccatttagccttatcatcactgtttactgacatgtgtccctttcccagttcaccgtttccatatgcccttttatttaaaacacattttaaactcttttaattaatttattctcaagtaaaccctttatttaagacaatattattatcatcaagtttttttcgtaaaggaataacatttattatttattttgcgttaggacaacttttgtcttaattttgttttaggtttgagtttgaattcgaaacctaaactcaattatatttatttaactcaaaaataaatttgaaaaaataaatatcgcacaaaactctataattttgtcttaagtatataaaataataaaacttgtttattatttattattaaataattcagataattattattttaaatttggaatttaaatccaaataaatatctcaaaataataattaattatctacaataaataattaatagataatttatagtatgtatactatatatacactataatatatacatatatataatagtgaggtttaaccgggctggggctgacaagcaccatggaccactgtagtcggcggcttgacctacggtggccgtggagagcacgagaggggattcacatgatcacatgtcacaatcaactcgagacccaactgggtctatttttctcgaggtggacggggatgggaccccgtgataagctccaagaggagtcgtgggtttgggatgaatggagaaagacttccagggaggtcgatcagctgtctcacagcaacgaccaaaagggcattcgttgttcacgtgggttaggtgaagaagaaacatatgggtctatgcattgcttacatgcattcatgtgggcatgctacccgaagccactcgggtggttgtccatggctaggaaataattctcgagctcacatgcatgtgaatttgacgtgtatggtttggtttcaagtttagaaactgatttcacatgcaatgagcattacataggtatataatttacatataaattaattttcataaaattaaaataacagaaaaaatttcatatgccccttgatcgcttacattattttctaaaaaataataacaacaaaatttatacccaattataccatataactaacaattcatcacctctcatatattcacaataatttaactatccattcacatacgtattgcaaatatatatatatatatataaaaaaaccataaaacccacacaacatttaatgtatacacattcatggaactactctgttataaattgttgatttttatggtactaaattagatacgcagtagaaggatttttgtatttataattatcattgtaccatagctcaataaatctccaaatgtgtgtacattaaattaaaacataaaatagtaagtttataatatatacctcttgaagactatcagcgtatcctcaaaatttctcgtatgttgtatcccttaattcagatgatgaggataatgcaattaaactcacgccagtgtcttctaaaaaaatccactacacaaaaggaatagtaagggctattaggataaattttataattttgctcgtaagttcttaacacatgagcaagttcaattccttagagaaaaactttttcttttcatctgcctatttcaaaaaatagctatgtcaaaagttttctgttttctcaaatcaggcttctctttatagcagttaaaaactctttaattaaatcaaatctaattatttaaataaataaagtatctataaccgaatttggttattgatatttatgaaaaaatctctcaactacttgagagaatatctcaacaactttaaaatatctttaaccacttttcaaattcaggtatttgtctaattgaattaaataaataattaattaaccaaaataaacaaactccattgggcataggcgcctaccttgtcctaattaagacaaagatagtgtcttttatccttataaatattatctcaacaaatcttgtcttgacaaattttgttttaataatatttatctttgtcttatttgattaatttgaaaaattaatatttattataaaaataaataattactatttttccaatttaaaatatatttttttgaacaataatatactactctttatcccaatccttgagagtgtttcaaggtagtgattcagaggccatgaacctataattctaagctctgataaactagattgtttattgagtctcgtcaaccaaataattcttgtttataaattccaagattactccactaatatatggaattaaactcttagtaattatagaattatatttattgagttttactacagtgtccattaatataatcaattttagtgattagtcctccatgtgttggttagtaattagtttagggtaaattactattttacctttataattacttctttatcctttagtaccattaattcacaagtggaagtataatttagatcccatctaaatttgtttacaacattctagctctagaattaacacttaaagaaaatcagcattcgatccattaggaaagtcaagtttctataattgtaaatcattttcccagccatccactttattagcttcccaaaacagtagttgtaagaaatatcttctctgagaaactttaatgagtgaatcaaagaaactaataacatgaacaggagttcatgattactcaagatttaggtcgatctactattgatcatcattatgataagaatta

SEQ ID NO: 296156 - DNA, 5256 bp, Cannabis indica
ttaaataaaagtctaatggaactttttatttttaattttgaactcccaaaaagtatgggtcctaggcacggaccttactcgcatatgcttacgattggcctcgtagcaaccaactacaaaagaacaggcaagtccatctcagtgagatgaggtgcaatagagggaagaccctcattccacctagcagaagctttttcatctaaagccatcttagttaaacaataaacgagaaggttaacatctctacactcaaaccaaaactcaaccaactcgaacgaattacaaaactcaataatctcggtaagaatacaatgccaatcacccacatttattttgtacatggttgtttagcaaccaaaccagcaacattaatttttggatattgtccaatatcactttcaacaatcaaatcaacaatacaagttctgcttagtatcctagactgtatttaacaaacaaactggcaacacagattcctggcaggtgtccagactattttcagcagccaaacctgaaatatgggttacatgtaagtgtcttagaccattttcaacaactaaattttattgtaagtttataagaatgtgtcctagaagattttcaacaaccaaactagcaacatgagtttctggattgggtccaaaagcatattcggcaaccaaaaccagaaaattgaattccttggtgtcctagacaatattctgcaagccaaataaacaacaagagtttccgtttctggttagtgtccattatcctatattattctcatcactgttggctcaagggatatttctaaattcttctcaagttataacaggacatgccggctgtaaaagctcaaaactaacacaaagttacttcacgagataatagcatgagacaataagcagagacccatggtatactttaagttcaattaaataatgaaaatcagagccttcgctagtcaaatttatgaaaaatgtcgactgatttgtaagcgaggacgaattatagtaatttattcctaagatataaacaaagacgaacaatgccatactaatagcaatgataagcatacctgagtacctgagtagtcttgaacctataccagagctaaagtagaaaacattggagtggtgaagttgtttgacttgccaaaaggttcattcagtcttattaagatatccatacgacttttcaaatgctgtatccaaaaaataagattatactttagttttaataaacaacagcaaattgaaaagcatactgctaacttcatctctacttaaacatctaataattatcactaaaccaacaccgaaaaaccaaattatattagaggcagaaaatagcctgcttatctgttaccatctagcatccaacctttttaaacatactcttgcagattctctaaacccctgaaatgatataccggagcttgtcttcaaatcattgattgacaggtttcgctcaatgttgaaagctccaaaaatccatatcctacaaaaaattatgagttattagttaccccagaagttaaaccaaaacattttatctcttattaatcacaatgagaattcaaaataccattaaggaattctaaataaaagctcacttttttccatttatctcacaggagcacatccagaatccctaacaacaatgtccattgagaatagcttgattgagaagctttttttcttctacagatgaagtaacattttactgacttcatactatgcaagaccatctcttatttctgatgatcctttgtaacttggcaacatctacattggcagagtaccaaaaaaaaaatgacattagattgaaattccatcagcctcgtgatagccggtatctagccattggaaggaatcagaaaaagatatatattatccatgaaaatgaaccacatacctaaaaacaaggatggacttgaatatgatgccacctctgaaccaagataattagtatagatggaacaaaaccttcagctccaaggaattgatcattaaacttatcatctggtacaaaacctttctgtagcatatcgtcatggtagcggaatgctgctttcaagttgtcctgtgacacatgtccattaatcaaaaacgtatatgttgatttatcaggcttcacacctttttcaatcatcctctgcagtactagctcagcttcttgcattctaccctgccgacagaatccatttaaacattgtatgtaatacatctggcaacaacccttgatcttccatcttgctagtcaaaacaaaagctttgtgcagattctcttcgtttatgtatccattaatcaaagtgttgtatgtaatgctgtcaggaataattccccgagaaatcattttcgtcaaaaactcatctgcttttgcaagatcacctgtcctgcagtgcccctttaagacagtattacaagtcacaagagtaggttttataccttctttcaccatttggtcccacaacctcaatgccttaggtacattacccacgctgcagaatccatttataagaatgccgtatgaaatgtgattaggaaatatacttctagaaatcatatcatcccataattcctctgctttctctatttcgccacctttgaaaaaaccatcaatcaatatgttgtatgtgacaatgtcaggcttcaaatttctttcagttattgtatggaacaaatttagcgctttcctcatattcccactcttgcaatacccatgaatcagtgtggtataagtataaaaatcaggaatgacaccccgttccatcatctcaccaaacaaaagttctgcatcagcaagcatcatctccttacacaatccattcataatagtattatatgtgaccacatccataacacagccttgctcaatcattctatctctcattttcagtgcctctgacatttgaccatttttacaatatccatctattaggatagtatatatcacactatctggaaccaaacctacatttttcaaattcctaaaatatcctagtgcctgatcaagatttccatttctagtgaacattccaataagagcactaaaactaattaaatcaggtgaaacacctcgacatgacatttcacgaaaaatcccctcagcctccattacaatattttttctacatctctcaacaagcaatgcattgtatgtagatgtgtcaggattcaatccaactcgcaccatctcatccaaaacttcccttgctcttgcataatttcccaatttacacaagccatttatcatagtgttgtatgtgaaaagtccaggtctcaaccccttacccaacatagagttaaataaataaaaagcctcttctaaaagcccttggcgacaataggcattgaccaaagtattgtatgtcactatatccggaagaatccccttttcttccatgttcgacaataacgacttggtatcatcaatttttccatctttacacaaagcattgaccatgatattaagtgtaaaaacattcaaattaattccactcctaagaacttcttcatatactttccatgctaagtcaacccacccaactttcacaagccctcctagaagactattacaagcatttatagagacatgaaaacctttgcttctcaatatttgaaacacttcccacccttctctcagcttcttagcttgcacataagtcctaaccaataaatcaaacaccaaaggatttgagccaaaactttctgacgctgaaacaaaggactcaacaacttcaatccgcgaaacgccactcctcctcaccattctaagcaccagcgcttgtgcatcggacaacctccgaccacgcaccagaatatgaatcattatactcaaggactctgaagaaaacttcatattgggactatccaacaaaatcaaatcaacaaactttatacccagttgaaaattttcacgacacctactaaggacttcaactacaactaatgggttcaactgaaatagataactgcgcagtgaattatgattaccttgcttcaaagccagtacaattttctccacatagaaagaatctgatgaaactgattcccgatttggagttccagaggcttcttcttgaatttcgaaaggtataacaccaacgttagagaacgattttggaaagcaaaagggaacccataaattttttaaatatggtattcgtaaaggtttcaccaaggttgagaatgatctaaggatgggttcttgaagtagctgttgggcagccatttgaaaaggaacaaaaaaaagaaagaaaaaaagctttgcacttattatggcttcttggtattgaaattctgcaagtaatggaataggctatagacttatgagttatgagtctttacttttcattagattggctttgcacatttgtgttgcaggtcaggcaatgtttcctacatccatacctacatcactggtttttataagtataatcagatcaaaagttataataaccctagtttcactgggaacctcgaacttgaggcatgaaatgtaaacaatgaattactgaatgctatttcatatactaattagtctacaatattaacagtttaactattttttttttcacaatttagcaaaccataaacgtatttcatatacaaattagtccaaaatattaacaattagatcacttttcttttacaattaagcaaacaataaatcataaacgagttgatttaagcatttgtatgaatagtagagagacagtcttgtcataatacctacaaaagacctacaaattactgaatcaacacaatcaaaacaatggcatgttacagtcataaaaattataataaatcaataattaacaaaattttaattctattctataactgcagtagcagctaaatatacccagggcgtaaaactctgcatcttaaaactgaatactaatcatatactcattacaggaatcaaattaatacactatataataatatatgacacaatcaacatttagtgttgtttaaaattcaaaaacttagggacatatgcaaatatagaatgtaacagagggttaccctcttaatttctctgctgaaatccgaaagggtggcgaacgccgagaagggaaggatggctgccgttttggttgtccgagaaatgtaaggtggccgtggcgggctggtttcggttgtgggtgtgagtctggaaatgagcgagtgagaaagaggagcttggagatgggaaatttataaaaatactgaaatttgagttaatttttataaaaatattatctcacggaaaagtttttaaaa

SEQ ID NO: 296157 - DNA, 5115 bp, Cannabis indica
gtgacagccaacaactcaagatttctgatcactcacattgataaaacaacaatgatgttgagatttagtctgaaagaagtttcactccaggatgtctaccgtgtactaggaatgagtaaaagtttagtatgagtggcgcaacttatgacgtcatgccaccatgtcgtatttggtcctcaacatgtcaagatctaccaggatcttcaaatctctagaacaccgatgatgagaggacaactttagaatctgtctatgtaatgtcagcaaaatcaacttatgcagacaagattcgaaagaaagaaacaacaaatttatggcataaaaggctaggacatgtcaattatcacaaactcaaggtgatggtgaagaagtttatactaaagggtcttcctcaactcaaggttagaacatagattgtatgtgctgccaaccaatatggtaaggcgcatcaattaacgtataaagattcaatgttcaaagctaaagcaccagtggagctggtctattctaacgtgttttggtgagtcaagcaaccatcaatcagcggcgtgagatacatggttacattcattgatgacttctcaaggtatgtatgggttttgtttataaaagaaaaatctaaaactttttcaaaatttaaagaatccaaagaaatagcagaaggaaaagtcggtaagaaaatttaaagcctttgaatatacaacaacggaaaatataccttaggtgaattttttaagtggaattctgcatacgccatcaatttacatgcgtaatacaccccaacaaaatagagtagctgagagaaagaatcaataccttatagagacatgtcgaagcatgctacattcacaaaatattctaggtagattttgggcagaaggaatgaaaacaacaactaatatcgtcaataaacttccttaagaaaagttatggttcatttcaccctttgagaaactgtggggctataaacctgcagtaagccacttccgagtatttggctgtgtgtgctatctatacgtgccaagatacctacatagaaaatttgataagaaggtgatacgttatatctttgtgggatatgacagccaaaggaaaggatgaaatattgcgaccctacaactagaaagtgctatacatcaagaaatgtggtatatgatgagggatcattatggtggtcacctcaaaaggaagagttaccgaattctaaggaaatagaagaaaatttgcaaaaggagatgggagagtaaattgttgacgtacatcgaagtctagaaactgatgatggggatcaaagtaaaactttcaaggatgaggcagcagaaaatccatggcaaacaggtgtacatcaagacagataactagaagagtaagcctaaaacttcaaagatcaataagagcacggaagccaaatcccaaatatgttgatgatgatgcagctgaagaggagaagttcaaagagcttgattatatgaggaggcatatcataactttaagtggcttgaagctatgaaagaagaaataaatgctctagagaagaattaaacttgggagctggtgccaaagtcaaagcaagtaaaactcattttgcggaaatgggtataaaaggtaaaaaaaaaactcttcctaatggttcaattgaaagatacaaggctcagttagtagctcaaacattctcttcgaatgggagctgcgatgaacatgaatttaagggagagaaggacagttgggccgaggaagtagagcgtgaggattttatgtcaaactcacaacaataatggaagaaatttactgaaagtaagtctctaatctgagaagcttaacttacatgtactaaacccattctgaaagatgggataaaaatagctcaagttgatgttgatgaggttcaaaaacaagctgctaattggaatttagcagttgtgtgtatggttttaggggatagcccccaattaaagtgttcgagagttttatcaaacgtaaatcggggaatcttagagttacttagattgtgaggatgaatggtggttataccattatcaaattcaatgatgttttgactgaagatcatgtcttggaggaggggattttgtaattcgatcgaaagcctgtaataattcgaccatagacgatagattttacagccttaaggttggttaaatcagttctactttggatatgattacatgatcttaggctttattactggggaaataaatgtcggctcagtgcaattgtgagtactattgggaaacatatttcaacagataaggttacaagggagagatctatggttaaatttgcaagggttctagttgagatggagataacagataagccactgagggttattcattttttgaatgaacatggccaacttattgagcaggaggttgagtatgaatggctctcagtgagatgcaaagcttgtcaaggctatggtcatataatggcagactgtaggaaagcttaaaaggtccctagagataagactaagaagatgtttgaggcgagagtgtgattgtaggaatagggaaggtggatgttatggagagtcgttcagagtgtgtaaaggaggttactgatacaatggagcagaatggaaacaacgaagaagtagaggaggtattagaacatagtaatgaagctactggtatagctgtagtaagagggagcaaagatttgaaaaagctagaaagtaggagttggaaaactcctaaaaaatccttacattctaagaaatgggaaacttcacgtatataattctaatcatcctaatacttttgagattctacattcacaatagggggtttttaagctgagattggtactaaaatatctttacatggatagcattaacatacttagttggaatgttagaggcctcaacaatgtaaaaaaataagaggttgcggtggatttgtgtcagattgggaagattagtttaggtgccttattagagactaagatgaggagaaataaagttgatgtttctatagcttctaatttaagtggctggaattattattctagtcctgtcatagaaggtcgaatgttagtcatttaaaaaattaagtttgtcaagatcttgatcttggaggaatcaagtcaatttgctcactgtctcgttaagaagcttcgtctcaataaagagttttgtgctacttttgtatatggttctaactctcatgaggagagaaagaacctttggattgggttgtctaattaagctccagatgtcagttaaatcctggattattttaggagattttaatgcaatttttaagtttggtgtcgaaagctgagactgaagatgctactaattggattgccttgggtttggttgatgctctgcatataacaggttatttcattacttgatcaaacaacgaagatgccaaagatcgaatcttctctagaattgatcatgtcctcaaaaataaagagtggttagacacatttcctaactcctctgctaatatgagtttggaaactttatctgaccactgttcttgtgtggcctgttttgcaaaagctattgatattggcatcaaacccttcaagttttttaatttctaggttgattacaaggattacaagcaataggtggttaaaagttggaacaaacctcttagaggcacagggttgaaagctattttcctaaagtgtttgagacttaaaacattgtttaaggtaatttaataagaggactattgggaatgtggaagtaaactttgaagaaagaaaagaaaattcttgaagcaaggcttgcggctcaatctaaccctgggaccttggttattattaaggaggaaaagaaggccacaatggattatagtgaaaaggagaggcagatgcatagctatcttgttcaaagaagtgaagctaacttgttaagaaagggtgatgacaatactgctttcttctatgcgtgcgaaaaaaaaatgagagaagataatagaatagctagcttcaaaaccatttcaagagctatatgggcagtgaaggctcctcaacaactaacttgaattttcataatttgaaaggtagcaagctatcctttgacttgcagcttaaactcttaaaacctttttctaagatagaggtaagactagctcgattcagtattcctagtagtaaaagtcctggtccggatgggtttaattctgaattttttatgtaggggaagaattttgtcagtctattctcatcttttttgaaacttgttttattccagatgagttcaatgaaattgctttacccttgatcccaaagagtgaaaatccttccagggtagttaattattgccctacagcctattgttctactatttacaagtgtatctctaagcttaattggttcagtctggccgaggttcttcctcttgtggtaaaccaaaactagggtgtcttcgttcagaatagatctatggcacataacattcttatcttctaagacttagtaaagaactgtggaaggaagaatgtctcttctccgtgtgccatcaaaatagatctaaacaaagcttatgacacagtgaattggaagtttttagaagcttggctgaattatctttaattcccatctcgttttgtgaagtggataatgttgtgtattcgaggcacttcttatgatttgatgattaatggtacattgccttatctcacattttgtccacctgacgtggcatgtccacgtaagtcaggacaaagtacatgtggaacacaaccttgccaataacaagacaaggtctccttacaagatatggcaaaatcgtcaagcagcaagaaaaatgagtgaaacaagccatcaaggagttgtaccaacatgtatggccggccaagggaagtttataggccggtcagggtgagtttatatggccggccatgatctagcccaagatggtcaaccaaaacgtgactttataccaagtgagcttccattcgaccaaggaaagttgacctttgcaagaaaggtgtacaaagctggcctccacttaccaaaggctagtgtaacaccctaactaacataggcgtattacgtgattctgtttaactgatacacaaaataaaagtcgcctagcgaccaattacaaaatcagcctcgctgtcccgatga

SEQ ID NO: 296158 - DNA, 5965 bp, Cannabis indica
attaatttccaattatgtatggcttattcaggttctgtatgagagaactaagcagataattagtaagttttgactatcttacatagtttgttcaccatcttttttagggcaaaggtggtgtgcgggttgaaaggagtggtcttcatgataattgggatgatgctgagggatactacagtaagtatttaatctatccattccaattaaatcttgctcttttttaaaaatagcgttttttccctctatatatttcgttagacttgtttgttcattgtgaagcctttatacggctgccttagttatcatttcattgtttggaatgtcacgttgtgtcttgtttaagtgttgaattatatcaacacattaagaatgtatacgttggacttttttttttttttaatttaagcgtttatatattacaacatgttttacctgggactcgaacccaggacctccaacactcacacacccacctatggccattagagctagcctcaagtggttgtatacgttggacttgatgttggctactatttttgaatgaccaaaatattcatctgggaatcttaagggggtatttggcataaggttttcaaatagtctgattagatggaatgttatgaagtagaatatgattgttagaaaacttgttaattgtgtttagttgtgcaagagaaaattttaatcaaatactgttaattgaattacatttttttttgctgaagttaattgaattacattgcttggttaaaaatcaaacaaaagaatcttatgagttattgtaaaaaaattaaaaaaatataataattatttattatatattagatatttttttgttaattatacatgaaaagtaaaattattatttgttaaaaaaataaaaaataaattggtaattataaacctcatcatatttgagattaattaatttgaactttcaattacatatactttatcatattttgttaaattattttttatataatttttttttattatttgaatgatcatgaataaatgttatagttcaataaaatctaacggaaggccaaaatgagaacgaaaacataatttgaaacatcataacaatggccataatattcaattaatgaaaatctaattaaatattctcttgcacagccaaatacagtttacaagttcccctataatcacattctccttcatagtatttcctataaatagattattttgaactcctcatatccaacgctccctaagtatttcagataaatgttattttgataatattgaaaatagtgatcaattgcaaactattttggattattaaaataagtattaagataatacaagggactaaatgtaaacatacattttctttctgcatgctattgtattccttcagtaatttgatcatcattttcaggctacagatttggagaattacttgatggtagatatgagattactgcagcccatggcaaaggtgtcttttcaactgtagttagagcaaaaaatgctaaggctagtaatggtgaaccagaagaagtggcaataaaaataatacgcagtaatgatactatgtaagtgattatggtgccccttatcctgatttagttttcattggattcatttctgatgccatctcaccaagattgattgctgctgtcacaattagagaagagttttattatagttccttaaaaactttgctgttctcttcttatacacaggtacaaggctggtctgacagagctggtcatattaaagaaattagttggtcaagatccagataataagcgtcattgtgttcgttttttatcaaatttcaaataccgaaatcatctttgtctagtttttgaatctcttcatatgaatctgcgtgaggttttaaagaagtttggacgcaatattggtctcaagctgactgctgttagagcctatgccaagcagctttttattgctttgaagcatctaaaaaattgtggtgttcttcattgtgatatcaaacctgacaatatgctggtaagctttgtttctcttatttattattattttaattgatacgtattgtttcttttgccttactttttcttttcttcaggtaaatgaagcaaaaaatgtgctgaaactttgtgattttggtaatgctatgtttgctggcaaaaatgaaatcacaccttaccttgttagccgtttttatcgcgctcctgaaattagtgagttaacttttgaaccggaatttttgtattatttgtagagaatatttttgggtaaagctgtaaagctgatttgtttcttgatatctctttttcagttcttgggctgccttatgatcatccactggatatctggtctgtaggatgctgtttatatgagctttatacaggaaaggttctttttccaggtgctacaaataatgacatgctacgacttcacatggaattgaaaggcccttttccgaaaaagatgctacggaaggtattattatgtttaaatatttgagatgaattgaataccctgtttgaatagtaccttatttccctgcttgctgccccaccgttaacttttacatttgtctttcaaaaaatcaaattattaaatgctgtatgactatttgctgagttgacaccataatgatttttttgtcaagttagagaggagttgagatggactataatatgccaagatagtcttgagtttcttacatctctttactatttttttttttcctagggaggttttactgatcaacatttcgatcaagatctgaactttcatgctacagaagaggatcccgttaccaaaaaggtatattttgctctttgatttatgttgtattttttggagtggtacattacttgtaaaaagtgtactttataaaccatttttctcttccatgtttaagttggcttttccctttgcagactatcaagcgattgattctcaacataaagccaaaagatattgggtcaatcattttgggttctcctggtgaggatccaaagatgttggccgactttaaagatcttcttgataaaatgtttgttttggatccagataagaggttgactgtgtcacaggcactgagccatccattcatcactggcaagtgaaacctgttgctgattttctcactcaagattcctgttcagctagatatttgttgattatgtcctaatttatgttcatatctaatcattggacattatgtcttctctatgatggcatgagagcttgacacagcttgggattactgaagtcaaaacggttgatgtttggttgaggagtactcattttggctggttctttcagtggagtgtactgtttctattgtaagacaactagccgaaggcgattcttttcccttgtaacccccattaatgatagctgatgtcaaaattcattgtctctactatgaatttatttacttccataattttatctgtagtttgaacattgatctgttccatatattaattcccttgagctggtaaatttttactcctgacaaaattgtggggtttgtttttgtcctcaattctttattttattttatttgcgcatcaccatcgttatatgattcttatgttggatggtcatttcttttgtgttgtatctggtatatgggcacatatcctataattagaaggtttgctgtgccattgtccaactctatattactgaatttgctcattcttttattttgaataataataatttgggttctgggaaatctaatttaatctttcattcaggatgtcttctgctgcttttgggcaacccttcagtccttagatgctttaaagaaggtaccttggtttgtttattgggagattatagtggcaccattgatagtagatattattattatctttcctgttctttgtttgttctgatctagaaacagtttcttggcctatagaagttgaagccctaagatattttcttcctttttagaaggtaccttggtttgtttattgggagattatagtggcactattgatagtagatatattatgtttcctgttctttatttgttctgatctagccatactttcttcgcctatagaagttgaagccctaagatattttcttcctttttatgtattttttctatggcttgttccactggtagttctttaaatgtgtgtgcttttttagttcattaggtagtttttgagtaattacttgcatctttatcctagaatatgtttgttgagtaaatatgttgcagatagtggccattagatttttcagttccgttaatattttaccttttagtttctctctcgataaacttgattttcctatcttcaaattttagatgttagtatcagttgttttttgcatctttattttttgcccccgcctttgctcaagtacatctcctaatgaaagtgcattacatctgattctgatccccatatggtgtttcaatttggaggcacgtgcattggaggcgtgtggctgctgcaaggatgtttgagttgagtggtaagtttgcttttcaaccttgtcatttatctattatattacttcacgtggttgtcgtttttaacgcttccttggaaaatatatgttgacttgatactgtttttttggttttgttaggatatggccccatgtgcgtgcaacactttgtaagtttttcaaccataattcttcattcattattttgaattgaagtgtgatgtgaagtagcgtagaaaaggttcttaagtatatcctactgtgtgtaatagattttattatcgatctagcatgaggagatatagaaagctaaggtttacaaactgtgtattcaatttttagtaggtgatttggttgagtagagaaaaccaggagggatagatagagtgggtcaaactcttggtttacatatttgatcttcgtatagacctatctagcaatatgtatttctttttgcctattaagcttctaggttgctcccaggttattggtgtagcggcaagtccttgagttaggtctgacataggcagacttccaaggttagaaccccggcaactacaaaaaatgttcagttgtctcctaggaccttggatgtgttgggcctgctgggtatcctaatttttttttttggaaaaaaagagagcctactaggtttactcccatggcgtctgggattcgatttattatacgggacctacatagcaatgagcaactttttacaaattaaaaaacaaaattagtgttcaactgatcatcaagtattaagaaaggtaagtaactcatgtattattctttttaaaaaaggggaaactcatgtattatttaagcaagattgacataaacatacaaaataagtgagcagtgaagtcatttctgtggttgtcaatagattatgtactttactgagcaggttttttttatttttcttttttgctatttaaatgaaacttaagttgccaagtgtttttttttcttcatcccgttgaaggtatatgtattagagggcgatataaattagatgtggttatatgatcatatccgcctttttaagtgaatagcattgtagtgatttcattttatcaaataatcagaaaagaattttagccttgaaaataaataattaagaatcagaaatctgacttgaagctgagttacatagctgatgtatatattgttagtggctgctaggctggatttatctgctgactatgatctttacaatttataataaaagatgatcttgggtggaaaagttcttaggaattcaacatttaagtgcatttcttaaaggtcgtgtaatgcgtagtctcccttctttcttttatgtgatgagtttttgtagatatggatgttcgtatttgaaattatcgttttgctgcttacatttctcaaaataaggtggcgtttggttggaggtaatgaaatggaatggaatggaaaggaaacaattttcattccattcctttgtttggttgcattgctctttctaccattttggtggaatggctattcc

SEQ ID NO: 296159 - DNA, 3613 bp, Cannabis indica
ttgttaaattaaagaagaaaatagtgataaaagataagcggaaacactaatctgaaatcattgctggagattacagagaatgtttgatcttaaaagaatacattatctttctatttataagctcattatataataagttttgagtatttatgaatttgacccatcaacaaattataaattaacttacagtatctacacattatttccatgataatttaatacccttttaatactcataacataattggtcacttaattttatatcatactttataataacatatacattatacatatgtgcccataataagattttaatccaacataaactctttaaattttattaataatttgggaccaaaaatcctaattctacttgtttaattttggtgtgtttttgtattgttgtagtacggtttattatggacaatacaaatgttatggacgaggagcagttatgagtaaaagagtggaatatggtcgtaaccttacgagccttgaggctgagcctttcttgaccaaagactttattggtgtcaaagcttggatacgccctgttcccaccaaattcaccaaagcttttaacaaactagttaatggtgcaaaaaactaaggacaacgtatgttgatcaaatattgtacaaaaattctttaattctttaaatttatcatttatgtgattctatttattacaatattcttttcttctttcattgatgtaaaaaatcatacaaaatggttctttgtgtaaattatcatatataaatgtaaggcattgtataataacatataacgtgattttattattaatttgttcagatcagttaaatttcttacttctaattcatattaaaaaaaaaaagcacctcgctactaaactctttacatatcattaattttacattaatcactcgggtaaaaactattatggtaaaactacttaaaatagtacttttttttactcaccaactccataaatcttttcttttctttgtttggtaaaagtcgagtcatttgaccaaattatgtgcatgaaatacgtggcattttctatggcctaaaatttattttcgttaatcctccaccaatgcttccctttgaaaaaaaaaaaagaatcccccattgcttcctatatacacagtagttggttttttttgaaggattaaacccaaagaactaatcaaagttaaattatacttacaagctataggtgtaaaatatgctacattattaaatctttaattggctcatttctattttgtactctatttttagtttggagtaagaagttgttgatggtaaataatgtttgactacctatttaaaaaaatcatcttaatttctcaagtatagtattttgatgtaaacatcatagtacttctactcgtggtattatcatacaaggggaactataataaattaaacagtttgcaaataggcattcccataaatttaaaatccaaagtgataaaaggaaatttggttacaggacatccttcaagacaaaatataagtcacaataaagcaatcaagaagaaccataaatgcaggcagccttcaacatctttagtattgttttcctagttaaaacttagaacattgaaagttcgccaccacctctagtgctattcctcacctccaaacccaaaaacaaaatgtaaaataaacaaaaaaaagaccgaccaaaatctaagacctgttacagatcatacgggctacttaatgttcaccaggcatgtttttaatgatatccgaatcacctgaaaagtttaatgataaccaataagaatcgcaaactataacaaagtacaaaagcttcgagtttgtaaataaaaagaagagccaagtacctgggtcaataatgctaaggcagcatactctgtagtattttccacatgcagttcccaagtctacgttgtctggcaaaatgcaataacaaaatgagcataaagtttaaaaaactaagtaatgactcaaaacacgtaacaactactatctccctcctgcttctcgattactaacataaacggtgtttctaaacctcaaccaagaaaaaaactatgaatcctaattgaaacaagaatcatgtttatagatttattaagctataaagatagggattaaggtacaatgattcagtcatcaaaccatatgaatgataatttactaatatcagaccacaatagatgggaaagaacactcaaagataagattatgataaatcttacaaagtaataatcacagagcaatgaaccatgatcgacacaccattagcaaaaaatgagcatattacttgagtattgatattacactacctaggacgcagacagatacaaaacaagtccacaaatactcttcaaataattaaggaatgattaaatcatatggctaaaactcaaaatggggtaaattcaatgtgtggttacaccagaaatgtaagatcattagttaaaaaacttactcccgttgtagtgatgaactccaaccttagccaacatagcataatattcaatctcagacttccttagaggagggcaattgttagcaatgataattagcttccctgcagtaaataaatttatgtgttaaaacaatcgaatatgagctgattcacatcatcaacaaatgaactcactgattcacactatatctacacctaaattattaacggtcaacgcctcaacttaaaaattaatccaaaaagaaaagaacatcaagacagaaaataatattatactatcataactatcaatgcaaccataggattgagctgaaaagaataacccacatcagagaatgcacaaacattagtcaaaagaaaaaaaaattatcctttcatattaaaaaatttgaaatcgaaccatagtcatacaatgttcgttaatataatgcatttgaattcgctcctcttaaagtaaatataaaacatcattaaaatgaaaagcacctttggagttcctgagagatttgaggactgttttgtagcccaaggtgtacttgccactcttcatgacgagagcaagcctgttgttgatgctctcatgagtcttcttctgctcgaatcaaattccacacaaaaatcaaacaaagaaaaataatttataatgaaggaagctgatgaatctatgagtcaaatcggaggatctccataaaaatggttgccgaaacattgattagggagaggaactaatcaaacaatgtttagagaaagagagcttacggtcttcttggcggccaccatgtttgggtgcttcgttgaggaaaatgtgtgcagcggcgaaaaatacacagcgaagaaaccacagaagatgagtcgatgaatctttataaagagaagaagattagggttttgaggctattattgtgtgtttggcttctaggatataactatccccagtcgtggataacaacaaaccagtttaagggtttttttaaaaaagaaaaagaaaaaattggagcaaaacactctcaaactctcaaaggaaaatttgaaattgtatacttaataaataataaaattggatccctaatacaatactagacataatttgtaaagtgggatacattttcctaaaacccaattttgcccccctcatttcaaaagtcactctct

SEQ ID NO: 296160 - DNA, 1223 bp, Cannabis indica
tagagaaaatttgagataccactgttgtgatatttctgatagcgtgtctggaaagattcgacaccgagaataatctcaaatgccttgcaagttagtttttacttccaaattgtgtttgtgagagagagggtcttcttttccagtgtatgggtgccacgctagatttctaaactttgaggggatctctaaagccttgattcgatctgagaaaggtgaacaacgctcccgttcaagctcaaactcaattggctttaaagatgtgatatttttaccaaggcgacaagagtatcgaattacgtgtggtgatgtgcgtatcagttggccatttcttgttggtgtctctttgtagcttcctttgtctttcgactcaatcaaagacgttgattgattcgagccttgtggttgttgcctggttgtgtggccttgctagaaactggggggatttatcatgtatgacaatagagttgtctctcgagcgtttgctccgtaagcggctgctcgtggtactatactaaatatttccttcgaaatagtcttccttagagtgatatgtgtggagggaattgaattgattactcaagttcaacatgtctccatacacccatgagaagtattcataatgctggccatcaggaccttggacgaagtacctacaccaagcaccttgttcatcatagaaatataattgaatgtggagtagttcgctggtcttcaccctctaaatctcatactcttcacttttatggtagagctttcaagtccttctcctaaggttgactacaggtcattttccttttgctagatcatgggtggcctagagtcattagacctgtgaagagaatcacatgaaggagattgatttcccgcattgttcaaattacttcgagaaaaattgtggttggtcctttcagttgcatgtggtggccctgtaggtttgcgaccccgagtatgattccattcgaacgcttacttgcagctcgtttccctaacatgtgaccgctctacatcaggcaaaggacccatagatccacattcctgagtttgagtcctttcagacactcgatcgtagtttacatccctataagggaacctcagtgcatgttgctcgctgagtagtggcatgactactaggagtggtagtgtggctttgcatgttcatggatgatttcttacttgaacttatgagttcctttcggaacaaagttcctgttgggttttatgcc

SEQ ID NO: 296161 - DNA, 2328 bp, Cannabis indica
ttttttcatatttattgtcaagtattatagtatttttgacaagtgttgctcaagctttgttaaatttgtgatagtttaattatttggtgatagtccaaactgcaaaaatcgcaccgcaccacatcgcaccattttttgtggtttcttagtttcacggtgcggttgcagtttgggaaattgaaaaaaccgcatgtgcgggttggtttgaaaaaatagttcaaaaccataccgcaccgcgaacacccctactataaattaacacgatacggctagaaacagtagcctctcgtaccatttaggctgaaccaattccaccattttcattaggtgcattctctcattgtttgcttcttcaagcaaggccttgatccaatcaccgatttgctcgaacttgcggagtgacctcaagtgaaggaggacacctcctaccataacattgctccacacccatatcgtctctgtaagaaacagaatttattatctcattaacgtaacaaatagcagtcaagaacagagttaaaaccctcaccagagatcttaaagaaaaattggtatcaataaagctgttcttaaaacaatattgagtgaaacctatagttacattaatctccaccaacaaaactcttgacacatcaagagctgattattaatgactttttacactgaatataagatgttgctgagatgaaaaagggaaaagaaaaaagtaatgaaaaagtcactaaaagattgattatgtgaaggagttatctattacagatccaatatagaatatgtgaatccacaggaaattatgtcaaatggatttgttaaaatgaatctaaaaaatatagtagatcttgtttagtaaaattcagttatctaataaactaactcgacttactcgactttgcatgtagctttgttgtggcctgtacccccacagttactacaattgcgagacttcacctttgtcttttgtcttcccgctttgtgtttcttaggtcggcctatgggatttttcttgacagggaccccaactctcatatttttgatgtgttccgggagtacccaatcgtcttcatcggcaacaaggttaattgttgcattgtaagtgttcttccatgtttcttttgtgtaatacggggagcaaagtgcgtgcacactcatattcatctctattgctgtagcacatgcatgatgacaaggaattttgatcatttgaaacaaaccgcacgtgcatgttttttctaccaaattgacatcaccacctcttttaccattaggacacctaccaacattgtacacatcggatccattatgttggacgttcaaaaacttagcatcggtaagttttagtgccaagtctccctcaaaaatttcagttaaaggggtgctacacttatctgcctttaaaaaatggtcagtaaaccaagtctgcagggtgaaccttataaatttaatcaaattagttattagaaatttctttgcttcctctgtcacaatgtttatgctttcgccagtgttgcttgtcattacgttgtatcgatcgcccatacaataaggacgagcccacttttcaaacccaatatcctcaagatatgcagcaatgacaagatccatctttctaaccttctgaaattctttatcaaaatctgccttcgtgaatgtgtaagccacagtccatatttgcttgttacatgcgtcagtcttgaacttgtcaaccacattcatcgcaatgtggtgatagcatgcacagtggcatgcatcgagaaaaacaacatcgataacatgttcaatgctttgatgtccatttgatacaaacactaagttgtgaacctctccaatcgcttccttcaacttgagcaagaaatacgtccaagaatcattattctcactgtcaacaattccaaaagcaataggaaataattgattgtttgcatccaatgtcacgacacataacatgatgccaccatactttgtctccaagcatgtgccgtcaatacttatcacaggacgacaaaaactgaatcccctcctacaagcacccagtgagaaaaaacagtacttgaaccgatcatcctctaccacaatatcagtaatagtacccggattcttttgttgcagtatgtacaagtaacttggtatctttaaataagaattttctggcgtacccctcacatacataagtgtcttctccctgcacctccatgccttctcataactcaactcgatgccataaactctctttacatccctcattatgtccttcactttgtactagtcccttctcctgtgtagtttctttataaagtggcaaattcccatcgtgtcgtgttgggttttatg

SEQ ID NO: 296162 - DNA, 4300 bp, Cannabis indica
acaatgtatgttgtattatttactacgtaaaaaatagtccgtattagcttgtattataatatttacaaaggagttggggtcaacactaatctccaacccgaacccaaactcgggatccggactcggacctaggacctggaccttgacctgagacccaaacttgtacccagatctagacctgggcccagactacccaggacccgggcttggactcaagacccaaacccgggactcgaacccagacccgagacccaaactatgacccaagacccagacctgatcccgaatccgattcatattagataaaaactatttttatcaaacttcgcttctccttttataactctaatatggaccataaaaataacaacaccaacttccccaaagatttgctttcctccttggaagaaatcagggcttccccaagcaccatgctagcgtggggccctgcgcacacaagttttccatgagttttgattcacgagaagtttgggtactcaactcatcaatgtctatctcttctgaagaagcaacaatgtgagaagtaggaggctcatcttcaatttcaacaaccttctctttccctatccgcaaatccatgactggtgaggaagtttcagttgcagtggctttgcttctcttttgacttcttcaagggaatagaagaagaagcgggataacttgcacaacttcttgaacaagtggttcatcaaccttggttgcaggtttcttccttctagaacaagtaaccatcacagcaaggaaaatcattttgtcagcagaacaaaaaacaaggggttggtacataagaaaaatatggaaaacaagacaaagtaagaaatctagtaaacaattacttcaataagtggtgaatcagcaactaattcacaaacttcttcaagcacacaagccttagtgtgatctagaagttcaatatcagcctcatcctcagagtcggcaccaccactactttggttaagagatacggatattctttcgaaatattctaagtcattgtgagaagagcctttatcttctgacatcactttagatccattacagtaccactttgccctctttcttcatcatctaggggaattgtccaagaatcattagcaaagcgagcatcgacataaactcactaacaagctgttattagagcccaacatggtgtatgttatcatcaatgaacaacatctttccatatctctcccatatcttgatctcattcaacatggcatctactctcaatttaatgtcaattagcagagctggtcttttgaaagggtcaaccttttggatagtaatgtgccttaaggtttggaggggagtatagacatattcttaatgataaaggctgcagttgcttttagtaacattgtctatctacacactgtactagtgaaggtgataaaatccttcatcttccaagtagcactcctttttagatcgcataagaaattgagtcagtgaggagtggggatagaccagccccgtagacgataaaagatgaagaacatctatagaatccaataactgttggggttcaattgataagggaaaacttcaaagtagtaaacaattgatacaaaccacatatgaataggcaagaatgcacttgcatttatgtggaatcctgacaagcactacaacaaggattctaggttgcactgggacactcaattctcagttttctcaccatagtttcaggtaaggagtattcatccctgatgaacttaacttgatgctcaaagatagtgctgaatacaagaggctttataacaaagtcacgatctcttgggtcctcactctcgatggcaacaattagtaatttagttcccatcactttcccactgtgtgctttgtcaaagttcttggacttaggcattgtaagttttgtgtcgatatattagactatataagggtcatacccatcaggctttcttctagttctcttcatacaaggcctttttggtttcaacttgagtctgcataacttggatcagttgaatatcaactcagttaacctcaattcagctcaaaatttctcccttcagctcacttgaagatttgttaggataagactagctagattgtatcttgtaggaaagatagatcttagctcaatgactcacttaaaaattatatgtttgatttttgaaggtattacaatggagttcaaggatttccattcgatctagaatccttgaattaagctctagtggatggaaagaaaaaaataaaaaataaaaacattaaaaaattttcccacctgaaaagttgaagaacacttgaaagcagttgaaaataaaggactcagactctcaatctctctataatcgtgtggaataagtgaggatagagtgagaggagtcctctatttataatagctagtctcctatataaatataaaattttaaaatttaaaaagaaaataagagagttaaagatttattatcttttctttgcttttgcttttcctttccttttctttttttcttcttttaaattttcaaaattcccagtccaaatggaaatagtgaatttcaaaattcctattccaactaggaatcattgaagacaaacaaaaaaaaaacaattattagaagtcaaaattgatgctcacctggtagttttgcatgaaatgggcttagttcattcacgtcatcaagtcaacctcacacaagtgtaaagttgacttggaaagaaaatgtttacctaaaagctaaccatggtgacatggacatcaatgtttgatatgtagcaagaaggaaaacatttacagagttaagtgcctcgagttatagcagtcaactctaggaaaggtccctagccctgcacccaagttgacttcgagagctctagaatgggtgtttgaatcctgccaagttgttttcaactcaccatcctttagtactatgaaccaaaaagtcaagcataacccaagtaggaagcctaagaactgaaaaaagttgaatcaaacttttagaagtcaacccgggcgcttaggatttcacctagtacgtgcccaagtggacatcttgggctagggtttcaatttatgggtctgtcttagtaaaaatggatcaaactttatacttagacatgaataagacatgtcacaaacatgatagaggcaccagaatcagaattgaaacacttcccgtttgaggcacctagtgatgcacccagcgcccagattgacaatatgtcaacctgtagcacttccaaccatttttttgaagattttttctaggtattttcttcccttcatccaaaatggggaaacaagtgctttcgggacgaaaacaaatcaacttgaaggccaaactagtgacccaatgcccatgctgacatattgtgaacctgggaaatttctaatgacgattataatgaagtcttttgggaatattctccaattccaccaacaattaagatacgagtgcttttgggaaataaatggagccatttgggagctagattatggacctaacacctaagttgacctattgttaggtctcagcgcacaggttgacttgttgtcaacctgggctaattccaaatatttctctaggaagtcttctgggaatattctccattttcatcaacaattaagatacgattgcttgcgggaaacaaagagagccatctgggagctaaaatagggaccgagcacccaggttgacatgttgtcaacctgggccagttccaaacattttctctaggaagtctttcggacatattctttgttttcatcaacaattaagatacaactgcttcttggagtcaaacagagccatctgtgatcatgagggggacccaacacccatgttgacctggtgccaggtcccagcgctcaagttgacattttgtcaacctagaccaattctaagtatttttcccaggaagtttctcaggaattttttttttgtttttaaaaataataagatataagtgttcttcagaagcaaaagagaccatttaaggaccgaaataggtacccaacacccatgttaacgttcaacctggtttgcatgtttccgctcctcaaacgcaaattctacttcagacattcttcttatattggtcaaaaacagggtaggaaacttcgttcacaatcttgaaggccatacaagtaacaaaaaaagtcttgagaagctcatcaataagcacctagtgcccaggttgacgtatagcctagtgcgttaaccgattccaattctatctcgagcatctaactatttttttccatagtaaatgagagctacgacttgtggcaattcaaattcacactttgata

SEQ ID NO: 296163 - DNA, 5468 bp, Cannabis indica
taataaaatgaacaaagaataaaaagataaataataaaatatgatagcttacaatagaataaagatattgtttattaaataataataatataataataagttacttttaaaaaaaaataatagagtaatattcactttattatgtgaggatattgaaatagagagaatatttaaaaccataaaatgcgtatagctattagtaaaattgtagcctgtacgtggagcttcgtaaattagaaaataaaaataaacaaaatatgtagaaaagtaaatggaagtttgtataaatgttaaaattatcaaacatccatataaatgtaaaaaaagtatcaatttaggtatttagtctaaaaattcctttcttaaaccataattatagtagggcaaaatggtaaatgaacaacgtcatcctcttcactcacattacttactagccataaccatgaccaaagcttttgaagaacaaaaaggaaagagaaaaaaaaaaaaagaaaatcttaaggctccaatccccagccactcgccacaaccatctattaattataaataaataaaaaaccttctttgatggccaaaacttgaaaaacgaaaaaacccaactttaattttgattcaatttgtgcaaaaccagtcaatttatggcttccatatccacctgcttcactcttccacccaagcctcgtctctacttaaaaccttctattttccgagaacttcccaacaaatttcccatttaccaaacacccattttcccaggacgcccggctaagcagaggggatctcaagcattggtgccggttgtcagagctggcattgatgtaacgaccgcaatcaggcctggaggtattattgaaagcgataaactttccagtgatgtcagaaagcgagctatggatgctgtggacgcttgtggtgggagggttactataggggatgtctctagcagggctggacttaagatgaatgaagctcagaaagctttgcaagctcttgctgctgatactaatggtttcctagaggtaattatattcaaactttttatgggttatatatttgtggtttatgttgttgggatttagagtgttctagtgtgtgaaaggttttactgggaattgaagcttgttaatggagtttctgttaatggggtctttgaatttttttttcctttcatttcgttgttattgtgaatacaatattttcaaagatggtatcaacaggtctctgatgaaggtgatgttctatatgttttcccaaaagattatcgagcaaagcttgcggccaaatcagttaggataaagcttgaacctttctttgaaaaggctaaggtaaaatatctgttgtttcttgtttttgatttagttaagtcgtgtatattcgttcatatgtttgttagtgatgtgatatgcataatgtttggcaggctggagctgagtatgtagtcagggtgtcatttggaactgctctaattgcgtctgttgttattgtttatactacaatcattgccattctttctagtagtcggtattttttttaaacttgattcaaatgtatttgatatttctgattcttaaccataatgatctttagaatttggttgttaatagtttgttttaacattatgagtttgattatgtaattttggttacagtgaagaagataatcgaggaagacgaggaagatcatatgattcgggatttactttttacttcagtccaactgatctcttttggtaatatcttcttcgcttgggaattcataatggttttctttcacatttgtgtgctttttataaattcctaaaagaaatgggtgaagtttgcttgtcttgttttattaagaatttaatatcacccgctgttaaacaactccaaaatatagcgaaattgcaagaaacgaatataggtagtaggtgaaaactgatcaaaattgatattgctaatatcaaagggttacagtgagaagtccctaggcaattagagaggccttggctcacccatgatgcagagaacaatctcttagctcttgcacacctacaactatccctttactcacttatatacaatttctcatatataccatctcctattaatcccggggaagtattttctaatttgtctcatctcatggaaacgcatatgaacttgatctaatgatgattttgtaggtatataatcccttaaaatttgtgagcatttatatgtataacattacatatcattcatttatctattgtaacaaaagaaaaccatgttggctaagatatgtaggtctctcaatatagcggtaatgtttgcaattttcttcttattcaaccccatgtcttttcccatgttgctttcatttttactcaggaacatttggttatatgccactgaaattattactttcatctatactctacttgacatattacaacgaaaaaatgtataatcatcatttcttgtctctagttttcaaatttaattagacacttaaaacttggaaataactctttgtaacctgtttctttaattactttataaggtattgggatccaaattactatagaaggcgaagaatacaagtagatgatgacaacaagatgaacttcattgaatctgtacgtgacataatggatctcattttactactctaatagccatttgttggggatcaaatattattttgtgactgttgtttttcagattttctcatttgtatttggggatggtgatccaaatcaaggaattgaagaagagagatggaagttggtaatacttgagcactgagttcagtggtccgttgctattaacaatataatttcaattttcaattaagttgattgtaaatttgttttttaagggttgtgcgtattgtctttcatttctccctcgagagtgatgcttgattgtaatgtagagtcctcttttgacttcattaaaggaaagattatcttcacattgtaatgacactcagatttcttgagctgtgatgcagattggccagtacataacatctaatggtggtgtggttgcagccgaggaacttgctccatatcttgatgtagaaacttcaggaagatctgcagtaagtttatatttgagttaacatagattgctgttagttacttccttataatatattttatttttccagtttcttattgcatatccatgctggttatttgtatattttgtcatgctgcttaaaatgatctcctttgttacttgttcaggatgatgattcgtacatcttacctgttcttttacggtttgatggtcaacctgaaattgatgaagaggtaaattaatgcgctcgggaggatgaacaatctatattttttttttaatttattaactcttcctgataatagattcatataaatgatgaatcaatctcttcaaatttatggaactcttgcgtttcttgatattataggtcctgcacttgtacaactgtcacttatgatttaggtggcaaaataaaaacttattgactagcatatattgcatattatgcagggaaatattctgtatagatttccatctctccagcgtacggcttcttctcaaaggagtggaagaaaggaatatgtaggcaggaaatggactgattgggttggaggggttgagaagtttttcaaggagaagaaactgcaattcaggttctgaattcttcatgcatttttcatttatatggtgaactattgtatggattaaatgtatattttctctctctctctctctctctctcaacatatttttggggccttcttttctacagcaaaactagctcttcagagagagcattggtcattgggctgggtggactcaatctttttggggttataattcttggaactatgttcaagtaagttggacttataattatgagctacatagttttatttactgcatctgacccttgtatgcattttttcctttttctgcttttgaagggaaattgcaattccaccaagtggctttattaaatttgcatctgacatatttcctctacttcaggtttgtataaattgaaaaatacactaaaataaaaaacaaattgtgtttatgttttactatctatcctatatgataaaggcaaagcagcttttgaaattctggataatcagacctcatcgataaatttgatgagaacttagcttttgaggctcatgtttagaacgttatttctacaggtctatgctggttctttctttgcaattcctttgtttcggtggtttctagtgcgtaataaaaatgctcagatagaaaagagaaaccgtgcaagagaacaacgagcccgagcacttgagcttccagatatctctttaaggcgaaaggtgagcacctttctgtctgaaacatttttccctttgattgtcaaaatccaaatgttctccctagcttcaaattttttatacatctaaaatgaaaacaccaaactataatgcagctcctcagtgctcgggacatggctcaaagaacagtaataggacaggatcaaatcgtatatagtactgacaaagattttgttgagcaagactacgaggctcgagaatgggatcgaagatttcgggagatagagaagtcagattaagacgaagttccattaagaacataatctcgctgcatgcttcacctggcatttaacagagttttcaagtgtcatatagaggcatagatagcacttgcaaatatttttggaagattagacacaatcccatttattgctgctgtgatagaaattcaacgttgtaaatatagcttatacttttgcataaatctaaaaaagaaatgttgttataaatgataggaggaagttttgttctaccttatcaaatgcttcatcatatggacttgggaggaggaatgtcaaatttgaattttggcgtttgtaataaactactatttgtttttatccttaaaggaacgtacttgtatttgataaaagaataaaaacaaagatttcctccaataaacggttcaaaattagtaatttgaatgtactattttgcccatttacttagcataaaccctcaagatgaaaatacctaagtaatacttgcctattcaagaagttattatcagagtgagattaattatgtctcgtgtaaacagataaaatagggtgtccaatttgaaagtattttaattattatccttcaataacttattattttgaaaaagtaaatggatggattcaaagttattagtagtcacggctcggaaaattattattttagagctataacaatattttattcatttatatcttttgagacgtgattataaatcatcgaattcaatgaaatctaatcgattcaattacaacagaccattaaatattggatatacaattgtgatcggaccggattgaatgttatttttgaataacaattggatcggatcgaatgttggatagagtgtccgaaaattcaatacatttaaaatccaatcaaactaattagtattttatttagtttggat

SEQ ID NO: 296164 - DNA, 6849 bp, Cannabis indica
ggtaatttttacaaaacacagagactttaatgatatttaccatagatattttatgaaaagtaaaagtagttaaatggttgttttaaatcccaattgatcttatcttgcaataaaatacctcaaaaaagaaaaagcttgtaatataatattatcaccttcttcatcatggagttggtaacaaatagttgagcttgtgatacattcaatttgtatacaaacatataaatatattcatatttacatgccatgaaaattggatggtttaccttctctaatcctactttgaagtttggttgatacaatcatacatatatataaacatggtccaacctataatatagtatgatgagctcaaaagttgtatgaagctagaaaatttatgtttaagaaggaaaaaaaatggatagtaaagtagttgaattgaaaggcagagtatgtgtaacaggtgcctctggttttcttgcatcttggcttgttaagagattgctcttgtctggttaccatgttattggaactgttagagatccaggtttatatatctatcttttttctctattatatattatttgaatctgtattttgtatgagttaacgattggattattttgtaatttttatcaaaataaaatttaataataatttgattattggtgtcttttgattagactgattatatttttttgtatctgtttatgctagaaactgactctaagttagttgggctaaagaaaatattgacgaaaattgagctcataattctattttatattattttaaaaaaaatctacgatctgatttattatttaacaagacaagactaacaggattcaatcaataattttttcaaaaattttgttccgtttggcttagttttataaataagttcttttttagcttttaaaatcaaaaaagttcttttaagagtgtggattaaaaaatatatatatttttttttaatttaaaagtcttttggaaaaaattaggatttatagcttttcttaaaagaacttttgagaaattatttttaaaattaaaataatttacataatttttaatttaatcacaaaaaatcttattttaatgatatccaaatattttgaaaagtaatttttcattaaaaaaatgatcttaatataatagttgtacaaactctaaaaataagtaaaagtttatacttatattatacttttaactatatacaaaagtaaaaatttagttaaaccgattattatctaaaatagtatttatcctatctaataaatgataaattatatttatatatgggcaggaaatgagaagaaagtggggcacttatggaagctagaaggagcaaaggagagacttgaattggttaaagctgatttaatggaagaaggaagctttgatgaagctatcatgggctgccatggtgtcttccatactgcctctcctgtgctcaaaccttcatctgatccaaaggcatcattaatttcaatattattgttcattcatttttaccaaatttcccatttgagcaaatgagtgtttttgttaacatgaggtgagagtagaatgagctcctctcaagccaattggaggccttaggtcaaaaaatattagtgataaaaatttaaaatataacattttgaaaatataattagtttttttttaaaaaaataaaatattaaatgtagtatcttaaaaaataaattaagtatttttttaagaaaatagttaaaaataaatttagggccttttttaaaggattttttggacatgagtcctgttgttgcacccttgagccggtcatgtccacaattaaatatcaagctattagtgtaagaaaatctttaaggggcgtttgatatgagatttaggcttgataggaataataatgtcaaactaaattaaatttaatgacaaaagagtttgtgtttccaagtgaatcatattttttaaattaaaaaatgatggtaatgttaatctcttccaacactagagtttcatattccctctaagtgtattgctctaactttactctctccaactcaaactcatatagcgtttggttggaaggaatgaaaacatagacagaatagaaatgacatttcaatactttaaaatgaaaccaaacaaaaaaataaaataaaaattgtttcatttccattccatatcattacatccaacaaagccatattccatgtgataattgattacaattttcttttattgaatcacaagcaggcagagatcttgcagccagccattgatgggaccttgaatgtgttacgttcatgtaagaagaatccatccatgaggcgagtggttctcacttcatcatcttcaaccatgagagcaagagatgattttgatcccaacatacctttagatgagttatcatggagctcgatagagctttgcgagagactccaggtaataaaacatgaacgatatatttaggaatgttagttttatccaaaaacccttctatcctacctgtacgggtagaatattacttgttgggtagggtaagggtatgaaaacaagtaccccatacgtggtagggttagactataggtgtaccctgcccaattactctacccgattatatatatttatatttataggtatatttgaatattatacattaatttcatgtttaaaaaacaattatattaaatattattaaagtaaaaaattctaataataaacctttactatttctaatactttattattcttttagtattttttttaattcttcttaaaatttattagggcagagttacccgtcggtattctatacctgatagggtactacctcataccctacccgcaaaaaataatagggtaacaaggctgggtataggtaaaactctttttatatatagggtcagatcatgaaataagcgtactttacccatactctactcgttgccatccctaaatatattatgcgtatgttactcaatgtataacataacatgtatgtaacatcatatgttatgtttgaatttgtttgtgtttaaatagatttggtatgtgttatcaaaaaccttagctgagaaagcagcatgggaattctgcaacaaaaatggaattgatttagttaccgttcttccttcattcttaattggacctagtttgccaacccactttaatgttccaacagcttctgatgtccttggcctacttaaaggtaactaataactaactaaaatcatgtggtttgtatattaaaattgtatacaactattgatccaattcaaattcttaaaaaataaaaactacaataggctcttcattgatatcaaagagaaaattacaaaattccaaactttacaattgactcaccctctaaactttacaatttgtaagtattaatgtgggtgttggaaaagcattatttttctttcacaaatgattaaattcttgttttgtctattgaaaaaataggtgaaactgagaaatttcaattccatggaagaatgggatatgtccacattgatgatgttgccacttgtcacatccttgtttttgagcacaaaaatgccaatggacgatacctttgtagctcaacagtgttggatattgatgaattagcttctttcttatcaaaaagatatccttatttgcctattccaaaaaggttgttttttttttaataacattattggattttctcacatttcttacaattatcttatctttacaattttatcacttgtcttatgattttgttttacaggtttgaacaagttgagagaccatattacgagttcaacacctctaaagtgaagagtcttggatttgaattcaagtccattagtgaaatgtttgaggattgcattgcatcacttaaggaccaaggatatcttaattaattgaaccattttaaggatcaatgagaagtttatattattataaaatattatctatggaatacatggactataagtattgatggaataaaaaagaatgatggaatatgaatatgaatcatattttattattattattatttggttaagatcttgattcaacattggactattatattttcaattttttttaagtttatttaaagattaacaattcaatgataaattagcttgttaattttgtttaccgttctcatcctaacttatttggtagtggagcaaaattgagcttttcatattcaccttggcaattcaaacttgtaagctagtaaaccaaaataaatatagctgggatttttttagggtaatcgataaatgttaaaataacaatagtaacaaaagttatacatgaggtgagggtttttttttttctatctaagaaaatttattgtctatcttaattgacatgcttaatcaatctatgaacctcaacattaaagttgcagactttaaatcaaatctcactagaatttttttttacttttagtcacaagttcaagttaacttgtgacaaaagtaaaaaaattgtgtgatattttacatccttccattcagggctaaattatttgagtcctagactaagtaaaacaatagtgtttgggccatgtactattatccaaacatttccacttagattttatatgtttgataataaagtaggggacaaaagcattgaatgcatatgttttacaccaatttagtataaaaggatttttatttttctacaaatagtttttttttttttttttgtaaataaatacaaacaaatagtttcttgataaggtcaaacacacataatttcacataacatctactaaatcctagctgtcaaaatttgtacacccaataatttccatctcaactatttaaggtgagaaaataaaaatcaaataaaataaacccagatctagtttttttaaatataataacttctgatatattaaaaacagttaaaaaaattaattacaaactcaatattacaaattaaatttacaggtaacatcaatattaccggtgatatccaaactcaaaatctatttggtaatattatgggcaataatattaaacatatgagaaatattaaaaaaattacacccaaaaaataagttagaaaattttaaacaagtagtaatataattacatatttctcatttaacgatggtaccattgatatcattgattaccactttagaatcactctccaggttcataaaagagttgtccttagctaaagcagtcgctaaggcaaactcacaggatgtcacttctccaataagaaaatttgtgaacataagattcttggtagccactcaatgtcagaacaacgattcctagctactgttgaaatcatcatggagttcaaaccaactgccacattacaattgatctttatccaatccaaaagagggggaagccaagcatccttgaataatttattaggttgatttaaaattaaagacgcatatttgagacgtaaccatttgttacctttctcgccaccctaccaaaagtctctcaccataccatcaatttagtagctaacttcttcaagaattgagtggattacacaacataaacaagaagagatagaccaacaaatttgatgagggttgcccaactgaccttagagagagtcttggatttctaaccctgaagttttgagttcaagttgctcatgatgaaatcaaaatatgcatatgttttccttgaccgaagtatggataaacccaaatagcgaatgttctcctctagttcttgaagcccaagagcagattttattccccttttcatgccataattggtagttactaaagaagataaaggcttttagcttgttcacttgttgtcccaattaggagcaaaattgctcaatacactctcaaaaccctctagcttcctcgatgttagtactaaggtgaacatacgatctaatctaatattttttctataattcgattcaatctaattagtgattgaatttgaaaaatcatcatctgatccaattcaattagatttcaaaattaaatctgccatctagctcaatggggcttaaaaatcatgatttttatgaaataatatgtttgctcgatactatttacttgcaattattgcaatatatatttaattttttttatgtagatattcaattattgcaattattgtttttttttttgttgagatctataagtttaaaatgtgtacacacttatttgacaaattcttactttcaaactatggcaaaaaataaaatattattttaaattttggtatgttttcaacatataaactcttcaaatatgtatttatgaagaaactggtttctttattggtgattttaccagcaataatgctaattttgacaattattctagagtttgctgttcgtgccgaaaaaataaccggagtagttgccggtatcggaaaagttgccaaagttactgctagcattgaaaaattcgtcagaatcgacattgtcgctagcaaaattaccagaaaaatcaccaagaaagtggtttcttcatcaaacaactagtttcgtcacacaacaataataaagattatgaaaacaaaacaaaaatgatatatacaatgaaaataattgaaaccaatttcatcaatcaaccaaatagaaaaaaatacaaaaaaaaatactcataaatataaacaaaacaacacacaatgcacaacaataatctaaaacaaaatataagtgtgaaaaccaatttcaaacctagaaacaaaataataaaaagaaacttaaaataaaaaatatacaataacatcataaaatagagcaacctcattacagaacccttaaaacctgtaaaactagtttcgaacttatgaaccatgtgaaaccaaatttgacactatgaaaaatcataacgaaatataaatgctaaattataaagttacctgaaacaagtca

SEQ ID NO: 296165 - DNA, 4436 bp, Cannabis indica
aattagagtttaataaaataaaaataaaaaagtaaatagaggcagggagagggtcacgttttgcgtaattttggattttcttctatttcttatcttagtattataaatgccctaaattaatatatatttgatttgttatatgtttttttatgacgtgggagttatggtcctattaattttcgtttttaataatataaatattttgtatttggtgaataaggtaagggcgtgtttggtgaattgaagattctcagtttgaatggttgaggagtcatttaaggtcatgccaaacaatatttttgaatgaggaataagacagtagtggtagtgaggttttcctaaaataaaaaacaaataaacgaataagaaaatgggagccaatatgatattgaagctaatatgaatggaagagaaaatatatctattcataaatatgaagttttttttttgttgggaaaagaaaaacatttatttttaaagaaaaaaactcttaaaatatatgtattatatatggagagaagagaaaagagacataataatacgtgttgtgcaaaataaaatattagttgaataatatgtatatgctttataacttgtgatgtggagatcagagctcataataaatttttatatttggataaaatgtggttatcatatggccttgagaaagttgatgaatattaattaattatagctacttttatcttttatatataaataataattatgtagtggattatcctaccaacaatttgtcgcttcctttttttttatgccgccaacttaatcatataactatagttttgtatgtatagcttcttccatttaataattaatacacatataatttgagaaatctttttgagtttgcaaaaaacaattcaacaaacaaatatatattacgtctgcacaaccgaaattaagtgagaacatatcagaagattccgtgatggttactgggaatctgccattccagtgttgtgccatctggtttttgaaggttgaaagccaaacttttttgttcgtaagcactttggcaaatagcacatgatcagaggcaacttgttggtcaggaagtgccatatcagaaagatcgaaaacagactcttcatccactgttaatttcaaaggttgtttcatcttttgcttgtaaggatccattgatatattgcagaaaaactaaagggaaagaagacagtgtgtcgggtgagaagttaaggttgtgttaatgttgaatggaaaagggaaaacctggggaaaaccatgggaaaaactgtcaaaaacagttaaaattcataaactgccacagagcacaaagagggcagacgctcatcacaaagcgcgagttttacttcgtgaaccatttcactttcaaaatcaccacattgtattacactcccctacacccggacaaagtgttcaaccagagtcactcatttatacgccattttgggtacagatttatcgattaccattcctcagcaagactaaaggacttgcaattgctcttggtaacatcattggtgaatatgtggatgtatttgaagactctctcaatgaaggatgggggccatttctgcgtgtaagagtgaaacttgatatcagtaagccacttttgagggggagaatgatcaccctaatgcaagcaaaagaggaatttcgggttgaatttaggtatgaacgtttgcctgaatactgcatggaatgtggacgattgggacatcctttcgataagtgtttgatttatcttgaaaaattggacaatggggaagaaccggatttggagtataggccaacattgaagggttcaccactcccagtttcaagttatgaccggtacaggactgacttttccaaggggaatgcctggcctttactcactcgattggccaaaacctctttactctcggccattccaacattaaagaatcgaaactctcctcaaccagaacaattgctcagaggtgaatcctcacgatcgactgtttcttctaatgtttttactgctgctattactcattccacaccatccacacaacacaagacatctctgaatactggactttctaatgcactgcttactgatgttgttcctgtgcttgataaccccatttccccacccatagtccacttcgcaccagccacacttcatccagaaacaaggccagcaaccaaacatcaaaatagcaacctgctgcatttttctgcagcaatgactcataacacttccaagccacttaatactgatagtgtggttgatctttcaggggtattcactcctttgacagtcatggacatgaggccaaatgtttttgcaacatatccaccaagccattccctaccagactctatgataaaccaaattcacactccattaccaacccaactttacaccaatcagaagccatctgtcagttccagtggtgaaaaacaagtggggaaggaaaatttgtcaccaaatcgaattatcaaaagatcttctgagggcattaatctgaggcaaaccttgaagagatgtaggggtaatcaaccacttttcatttctcctatgtcagaggagaatgaattacacatggatgtttccattgatgaaatggattctactggtgtcaatgacaacaacgcggagtctgaagttcagctctgcaagcagccatgaaaatcttaagttggaactctcgtggtttggggaacccgagtgctttccgtcatctcaaattgcttgtgaaagagcaatccccgtctgttttatttttaatggaaactaagttaggtcctaattctatttcccgttttcgcaatgttttacattttaataatggacttgaagtccctcgtgttggtcttagtggaggtcttatgttactttggaaagatgatgtaaatgtaaccttattaaattataatacaaatatatttgattgctacatggcttgtggaaatggcccgacttggcactttacagcgttttatggtgcacctgccactcagaaccgccatatcacttggactcttctcgaacgtttaaaagatgttgctccattgctaccatggctagttattggagactttaatgaaatattgtccaatgaaaataagtctggaggtgcccttcgaaatgagacacaaatggaaaattttcgacatgtacttgatcgttgtcaactacatgagcaaccgtttgagggtgatcctttcacatggatcaaaggaagacttgtacctgatgcaattaaggagaggcttgactggtgctttgtaaacagcatatggtgtgatacttttcaacaagtgattactaaacacctcgattattatggttctgatcatagactaatctcggtccaagttctgcagaactcctcggtacaccagcaacaccaaaggaaaacaagattcaggtttgaaaagttatggttacaagaggaggaagctacaaacatcattcaacaacattggaaacgtgctactactgaaaatgcaactgcaattttcacagagaacattcaaaactgtgcaaattccctccagctgtggcatcgacaaaagtttggaaattttaaaaagaaaatttccaaagtgcagaaaaaagtatcagacttgaacaatacaactaatcgaacccctgctgtgttggatgatttgaagcttcaagaaaatgttttggatgatttgctagcacaagaagagatgtattggcagcagcgttcgcgagttgattggttacaaaatggagaccaaaatacaaaattttttcatgcctatgcttcttcccgtaaacaacataataccattaaatctttgcacgattacaatggtaatgttgtgagttcaaagcctggtatgacatccatcattacatcttattttggggaactttttactgctacaacagtcaacttggatgcattgaatcacactctagctaccattcccacaactgttacagctgagatgaatgattctcttattaagccatttaccagtagtgaagtgtacactgccctcaagacaattagcccaaacaagagcccccggagtgatggaatgtcggcaatgttttatcataaatattggcacattgttggggatgttgtcacgaaggttgctttgggagtcttaaatgatggatatggtatggaatcttttaaccattcactcatcacattaattcctaagattaaggttccatcaggtatgggagatttcagaccaattagcttatgcaatgttatatacaaaatcatatctaagacattggccatcagatttaaggaggttcttccttttgtaatctctgaaacacaaagcgcttttctcaccaatcgcatcatcacggataatatccttgtagcttttgagttggtacatcatttaaagcataaaacaagggggaacagaagctactcagctctcaaattagacatgagtaaggc

SEQ ID NO: 296166 - DNA, 3010 bp, Cannabis indica
acacaagattcttttcactctctctcgttctctctatctttcctactactgctataatattcaacttggtatcaagagccgaaggttcatccatggcggcaccaccaggaggttcgaacaacaacaactttgttgtaccaaaccattttttgccacctctgcgtctagatcgaaacaactactttttctggagatcccaagttctactagcaataagggctcatgatcttgaatcgatcttgctcaatcaaaacactccacagcaacgcattcgacaaccaccagaatcaataactgagtttgaagtcttctgctgccttaatcaatttggttagttcctccagataggtctatcttttagattcaattttagtgtccactttcttcttccgaacctccatgaagttgtctttcatggcacagttttcttgagtgtcttggtgcagggccttcttattggctttctctagagttgccttggtactctttacgtcctttttaacagtatccagctttgtcttagtcttctccaagtccgctagggtcgtgatacttttgctctcggtggcgtctcgcttaacctagatattttctagctccagagccaatttcattgttatgtttgcacaacgctcgataagaaaagcatcctaaaaagacgaagagaagatacttagtagaaaaaaactatcaaaccatcaacaattagaaagcaagtgctataaaactaaaacacttacccgaatggcatgatgatggagagtttgactgaggaacatgacatctttgctcacgaccatgacccacctctccggcctcaattgacttatggagcctgatacttgatcaataaggagatgaactatgtgttgtcaatttatgtattgtcaatcaatgggtacttctattttagccagtagggctaccagtggcttggcagcgctaatgatgcagacatgtccaaggttggaggatatggcagaaactactttatggcacatgacataaaggacgtccgtcattttttcattgagtaccaacttatagttggccactccccacactgagactgagggacagggccaactacactttatctctcctagcaactaggcgcaacatctgcacgttggcctgtgaggagaactttaggagatatagtctataccctcctgctgagggtgttgttgctctaagtaacccacctgaggagcctgacaacactcctattggaaaggagaagagcaagaggaagtgacatgttgttgggaaaagtaggtcgccaaggaggcttctttggccaaggtgtggcctagacagaggagaaaggaatttcaattttattatattttattacttccaattaaacgcggcttaaaattatatgtaaagactttaatttatttgtatataagtttgtgatacacatagaaattatgtgtaggagaatggctattcaattacacatgatgtgcaactaaaaaatatgtaagtaaagacttttttgttagtgtcattcaaactctcatcaaccatacacacaccatgtgctcatatgctatcataaattttatatagctaacttaaataacataataatataatatccaagttatactaaaaatatatataaattaacttggtgaccaaaaacaaataaaatatatatgctcacaaaaaccgtgtgggaatattgctgagtcacatgatatgcctgtttatcttatatataaactcactaaaatattttttggtatgatttttttatttttacattttaaaaattgttttttgtttttttaagaaatttcacacaaaaattattatagcaattaatagagcaacttaaatcacaaccaaaatctgtatgagcaactcaaacagtaaattttttttaaaaaaataaaaaataatatctttttttcttgaaagcacaaaataattatataacaatatatatacatctataaatagaataaaaatattgtagtaactgtagtcattaatttttttttttaaagattttttgtccctaaactattacttttgtattattgtttttttgaatttttcaatctactaattaaaatgattcccaaactatttacaatgtagtaatgtggtatttctatcaagttttgtgtgttaaacagaatataattattaatattattattttgtttaccaagaaaaaacttgacgaatatgttaattataacattatgaattatttgaaatatttgtaacgagagctgaaaaatacaaagagtataatttaaacataaatatattaattttcatctaatttttttaaatggaatattcatacaattaacaatatgatatttagtttaattaaagtggccggtttagtaattagtattattcttagtggtagctagctagactaaaaatactagacaagtcgatctttcttccttctcaataatgtttataataattttctttaattttgaatcacttttacaccaacaaattaaaaataaaaataaaaaaaaaattggtaccatacattttttttatttattaattactaattgctaagtgctaacctcatccatgtgatgatatgctaaacaatccttcatgatagattaaattttatattttcaattttattactttgatattatatattatgactttaagttttgtatatatgaattttaaatattgtacctaattacattaaaataaaattcaatatataataaaaacaagggaattttacaaaaatactgcttttgaaccaaaactttacaattatactgggacacggcaaaaacaacatttttactgccccagcccaatttcattacttttgtactgcccaagcccaacatcatttcatttatactgtgaacagtaaaacacacgggaaacaaccttgttcgtgtgtggggagacgccggagacggaaatcaccaagaaaaaaccattaaatccggcgaagagttttttgagaaggaatcagaattgaagaacaaga

SEQ ID NO: 296167 - DNA, 1162 bp, Cannabis indica
tacacattatgattcaacttcactcacaaattattgcttggttaatggactagccatttctcaatagcagcaatattccagtgaattgttcttctaaattccaactatccttcacttttcaaattgcgaatcttatcccaagagacaagacctgtgccatcataattagccacccctttccataagaaagcataacacaccgcattcactttgtgaagtactttcttggacagaactatattatttgagcctaatatgcatgaatggtgattagaactgagttgattaatgttagtctcctagcataggagagatgtcaagtactccagacccaaattctttgccctatcttctctgttataatctcactttcagcaactggtaacaacttggaactaatgggaattcctaagtacctaaatgataaggcactttgtatgaaacctaaagaatctatcaatctttgaacttcttcatccttcatgccacaacaataagtggtcgatttagctgtgcttggaaataaacctgaggtttaagaaaagggtttgagctgcctttgtagcataagaaacactgatttataatcaccataactaataataacacatcgtctggaaatcaaagatgatttagtttaatatcaacgtacattttatgaaacttaaactttttttttacacaatgcaggttcctaattatgaaagaaatatataatatcacttcatttcctaacaatatataggctaattatgtaattcctctattagttttgagggattgaaaacctcaagtaattttgagcagtcggattagttgagaaactctaattttagtatgcaaccgttggaatcaattactttttaagtaaatagaaaatagaaaatggcaaccgtatgtgatttaagtcttttttgtactttctagaatataatactctaatttggtaaaggatggttttcttgaagaagctagattaaactgtttgaagctgaaggggaagggagaatcatatatacagagaaaatgttacaaaaaattgttagcagaagaaaaatgattaagttgagaggagagtaggtttgtagctgtaggatttttaccaatttaacctacaccaacaaaaaatttattatcagtatccaaggtcaatttcgacctt

SEQ ID NO: 296168 - DNA, 5196 bp, Cannabis indica
ttgtacatttatgaaaaaaaaaacccttaaaataaatgagaaagtaaatagatatatggcagttgtttgttggaagaacaggattgggatgagaaaattaggacaagtgatttttttccataataattaagggaatatttttgtaataaaaattttatttaagtatattaaatgaaattttcctttccaaagtctttacatatgtttttaggacatcaatactaccagatcgaatattaaaaaaagttattaagctcaattttataataaataaacattagccagtggaatatatatttatggatgataattagaatttagaaaggttcattaaaatttgatattatgtcaaatcaagtaaatttagagagagaaaactgaagattaaaggaaaatgcacacaatttaacgtggatcaagctatgaactagccttagtccttgcattgtacgtgaagaacatttgaaaaactcgagttttcttggaatttcggcaaattaaaagttttattattataattttctttccttaaattagtaggtaatctatttctgtagcaacttgtttattttcttcctttttctttcctactagatccacaaaatttacttgagtttagttacccgctgcaggaatggatccaaactgcggacagggttggagtttttgccaaacctactctaaattttatcatcaattttgaagttaaaatattcctgccattgatacagtgctattattaatcacataaattatcaaaaattcaaacttcatcactgcatttttagctaaggagacaattccataaaaacagcaaatgaaaaatttattcgactaaagatcatctttatgtgtagctgcgatacctagaagtttagcaagttggccattttcatatgcttcgacagtatctgaaagttcaccgcaataacaagtcataagtactagagcttataatatgctttttaaaacagtaaaccaatattcatatattaccatctgatcccccaatgtgttttccatttataaatacttggggcacagttcgcctcccaacaatctcacccagggcatcttgaatatttccaccatcatctatcagcattcacacaaaaactaatagtttaatttaaaaagatgacatgcaaatatcatacaggatgatgcaggtcgccaatttttcaataaacaatttttatcactagtcaatttcacaatgccgttgaaatatatacgtctaatttgaaggttcaccacaataatcaatgtcacgtattatgagatgatgatcaaactcctaagaacttggcataaatacttggacaacaagcttttactgatacgattttcacaagaaatagaaccaggccaatttattaattataatgcattggttattactaagttgtttgatctgttacttatcagaagtacagctatatacgctgctctttattcaattaataaaattacagagtattatttctacaatttctaatacaattcaataagcgaaaaaggcacagaagatttgagatgagtataagatgggagatgattcttgttcccttgcgttcttacaatggtgtgagatgttggattaccaacttgacaaaagttgtcattgaccatgtaaaatattaggttgtgtgtgtgtgtctagccttctgacttcatgcagataccaaagctcctcacagccatgagatgagccctgaagatgaatggtatcagaatatagatacagagccagtcatgaccgatagcatgatgcaccaggacagagttggtgtaggccaaaacagtaataagtagcaggtccaggatgaatgctttgctcatccagtggatgctgcttcggaccacaacagcgagatagaaattatttatagaaggtttacggaagctctgtccttggagctggaagctgataccaagatgaacaaggaagtggggaagactgcagttttggctaagatttttggtaaatgtggggtcgccagaaaattggtcgtccagattctatcacagacatgaacactcaaaggtaaatggaggcttaagaaataaaatagggactatcgggaatcttctttgactataaagaaggttgtatgttttaagcaaaagaccacggatcatcagtggacagttgctgaacattgtctaatggccagacaatggagagtggcagcaggttgataaagagagcgctatgtataggatccaagtgcaagacctcacgtgggaaaacctacctgctatagctacgaaagtatgttaccatggttttgaggttgctagtagaaaagaaacatcgaggagcggctttctaaattttaaagcagaaatattcagtactcatcaaataccagcaggcttttcctgagtattgacaggggaaggagtgaatacagtttaaatattgtaaacctcctcttatttgttataaatgtggatgcttcgctcattccactcccctgtaggaaatgcagttcaaatgtatgaccatcgtacaataaattttttaaacaaagtaaaaacacactactgcatcaaatacttctttatgctctacatttatacaatatattaacatgttattaattgttttggttttaacatttttttatatgtggatatgtatttattaatatttatatatttgaaatgaataaaacatattaaagaaaataaataagtttttgtgatgtattttgatagaactcaactaagaaactcacacacaaacagaaaatccctctctttatttcataaaccctagcctcaattagagactaagactcaattagagactaagacaaaatcataaaaagaatagaacagctaattcgagatagctaatctccaaagtctaaacttaaatccactaatttatactcctcaactaactattgctcttgacaaaataaaactcctagcagaacaatcactaacggaataacaacctactaacacagctcagctaagtaaaagaacttagattagttattcctcttgttgcatcttacataagtggaccttatcggaggtctacctactcccctcctaaatttgactcttgtcctcaaggttgacatctagaaactgaagctttttatggcctccaaagactcccaagtagcttcaaaatcttctaaccctagccatttgaataaaacttcaatttcccttgctgaggtgttcgtttgctggctgatcttacaccaagaagcttctcgggctgaactactagctccaatcctgtagacagttgtcgaggtaacggtgacaccgatacatcagctttattggctttcttcagctgagaaatattaaaaacaggatgtatgagagctatttccagtagttccagcttatagctcccccaccttacttgacacttcgtaaggtccatagaacctggggccaagttctcattacttcgtcaagccaaagtcttcattctgtaaggtattcaatttttaatttcagaaaaccttttcctattaccttgaaactaacttcccgacagtgtacataagcctctttcttcagtctagcttgcgcattgtttagatgcatgttaagctcatccatgagctcatctcgccccactaactgtgcatctataagatgaatctagaatcttattcctatggggaaaagctagacgtcactctttggcgggaagaaacctgaactacaagtacaaaggctcaagtactcgactgttgacttcagcatcaactcattctgtttaagggaggtcaaacaacattgctctactcacctttcgatcacgttcggcttgcagtgtgatgccttttcactcgcagttagcacgaccagccaagatgctcactcaacttgccttctttgtcagggaatgggccaagcatggcgctatagtccttcaccttgcatacaaggtaaaattcagccaaccggtaatgttagaccccaagatgagtagaacatggtagaagagagcaaataaaatgataaatgagtaattatattggagggtaactattgagtgggaatgggataatatatataggagtaggggaagaaagaggggttgtgtgtgaattcaggagtgaaatatcatggagagttccaaatctctcgaatgcttgtggaaatgtgattgtgttgccattttcaatagaaactctcaaactatttcttcttctcttttctactactgccatagtttttgcataaattggttgtttactaccaaggtacatcagactagtggctggctggtgatgaagacagatttctaactacaaaagctacaatatgtgtcaagcaaaagcatgtgatggacttgattttcgaaaatttgaagatattaaaagggcacttgtttcaaaacttgcaaggattacgacaagaaaggatgagacaccatggattaaagctttcgatgcacgatactgtaatagtaaactataaaccatttagagaagtgaaaagcaagtcaagagactcttatacctaagactaaaatcaagaagtatataagaattggttgttttgccagtctaagcaatgggagggaggaagacatatgaaatcaaccctggaaatagtgaaagttaaagctaccaagaattcaaagatgcttcgcctcgtttgaaaaaggtggcagcccagatgaatgaagataacaagtcctagaataaaaatttggtccttactttgtttagaaatgagataggttaacaatcttatgaatcttcagagaataccagcaaataggaaaggtaaccttttgaagagattcataagatggaaagtttaagtaaaaggggcttactggactggttataaacatcgctttaatgataaagaggctccctagaaacggatatgacatcacaatctctatccatgtcaatattttggtaagctgtgtcaaagatcctgccaacggaggatgattagctttctttaagacaaatatttctcattttgtcatgatgcaatagaatcaaatttgcacctgtttattgattgtcctctggctagggtaatatggttctaagaaccaccttcctcgagaagtaatgagttttatgtagtatctctatatgtgttggtagagtttgaattgtcctgggatgccaaggtctgtttcacaattgatagcgtccaagctaatcggaagcaaacgcagattaa

SEQ ID NO: 296169 - DNA, 2719 bp, Cannabis indica
attatcttccgctgcgaccctaatatgaaccctaaaaccaacaacccttttgtatatccttttaatgctttatccttaccttggagctttcctcccagataaggctctagacttggttgagtctttaggttgttggtagggtcattgtcatttaaagttacttcaaggtaagaaatagggagaacttcgttttccctcaattggagagagatagtaagggtgtgctttagtgaggctctaatctttctaggcagagacgattcatgcacaggaataggtgaggtcttcccaaggtcatttttcgccccgagtctatgagcatactttccaagtatgttggtactcttgtattcgaattcgtgaagtgttctcccttagatgttttgaaagcacgtatctcaagaattgagacacacattccaagaaacaatcatgtatcaaagatttaaactctacaatgtaaggagaataaggaccaatcatgatggcgcgcagatcccaacgtgaacatatgagttgtgtccctccgttgatcgttattcgatccaatggtttagaaacaacttctcttttctataaatacctccataaaaactctttatttaattcacacacttatcttgtgggaagaaacacaaacattctcttttagactttgcataaagagttcgcagatttaagctcaattcttgttgagggcaccacttttgtaggtactaattttttcttaatcctttgcttttctcaataagcacagttagaaaaacattttgttctcacaatgtgttcgcgtgtttgcatggggttgcttaggcatgtgtcattttgcatggcattttttacttcataagtcctctttccatgtttcccctttacaaattgtcccctcaaggtggtgattaattacatgccatccctttaggctcataatttttgagaagtgaataggatagaagtaaatagtgtattgggcaacttttagctcactcatagatgtggttgtgaatctttcttgacttttcatttgcctcttggggtgtaggccttcgaaatttcttatgtcccctatggttagtggcacaattcctgaaggagtgattccaattgaacttttgtcattcgacttggaggatcaagtggaagatccttttgttgtgtatcataggtagagggaagcacttattgctcacttagagcaattatgtgtgttgagggaacaactaaagcgtacacaagctagaatactctcccttgagtcatatggcccctgcctccatcgatgtcttaatgcaattagaacatcttcgatcctcacactagattcttaaagtgatgttggaggctttagaaaagtctattcctcctacaccattcactcctctagcgtctcctccttctctctagagttctctagtaagagaacatcaggcttagatgttgggtttccctcgtttctccacctgttaactagagactttcatagacttttctctgggcccacctttttccctgagcaacatgctggagttctcagtcttgccattcctggtttatctcgcaagagtcttgcacataaaatgaaaaatttaaaatgttgtgctcgtcctaacccttgggttagttatatccagatatgtcttcaaggactaagaggagaccacctacacttccagtggtggatcctgacattgcattacctcaggacaagattggtagcacgttgtctcttaggcatcttaaggagctaataaatgtatcctaaatatctgggccgactagggttatacctgcgcaaactgattagcgggcttttcttcctagtgatgtaacatttacctttagtgagcatgttttaaaaagggatatttcatgggttttcttaattattttggtatagctccattctagcttcatcccaacaactgttcaactctcgcttgtttctagatggcgcttagaggcacagctaagctagacctaacacctgaggaggttcattatgtctatcaccttttgcccaaaaacaattagtggggaactttctttctctagaaggcttcccctatgatgcttatggttcacagatccgtgtccaatgtgggcagctagggaagtaatttcttttttatttctagttcagatgacgtcgaacaacatctctttgtgattccatgtaaggttttactatatctttctctcctctccatttttttttaatgtcgatgcatttgttcttctactctttatttctagaggttagggatgtacccaccttatcggtagatgacattactttagggttgtagaaactttttgatctttagttaaataagcatctttgttactattttctcacacctgccaatttgaagaagcacagtcttatcccttagaatagcacattcactgcccatcatttaaataaaattccttccccgagcaaggtggatgacaaatcttcgactgttgactcccccaggaagaactcgggtttggatgctagcgtgacttcaatcgtggtcccttcttacaaggtggtgaagaataagagggcatgatgtccatctaacatgcgactaatccccatgacagacatcctttctgaggatggtggcgctaatcttccctaacacgagcaagtttaaggtcttcttcttgcttgttcatacactagattacacctgaaaaaaaaatttagcacactaaaatgggattagaa

SEQ ID NO: 296170 - DNA, 3059 bp, Cannabis indica
atccatttcaacagacagccagactctataatcagattcccagttcctcaagttgctaaaaacccagagctgcagcattaacttttaacttattgtagggatattgtgggaactctagtttacaaaaaatttaaaaatttccattatcatcccaaaaactatttacaggtccaagagtacaagcaccacgcattaattatgcaccataaagaagaaaaaggccaggatccaacgataaattagccaaggatcctattttggtcattcaatgatcttcctgctaagccaggcagtcattaagaggtagaaaattctagcaaactgctaggcagaactcatttgagcaaaccacttgagctaacctcttcgatctagcaactgatactagtgtttaaataaactaatcaagtaaagatattggtgaataacagccaaatcctttacatatacttcctacaggtcctaatatcacacatgaaaatagcaaaatagcacaaggtaagttaatatacaactattaattgtatacggtatacccaaacaaagatacaaataaattactttttactggaaaatagatgcaaaagcatataaacatggatacttactgagcaacttcctcactttggtgtttgtgcaacttggtatacaacttcacaggcaaagattcgacaacttcattaggtgcaggaacagatccaattgaagatacagaaggtcgggaggataaaaccacagattgctggtgaatttcatccagaacctaattaaattaagttcaaaatatttaactcatattaaaagtattcaagagcatactgttacaaaagtttacaaaataaaagcattacctcaaacaatgcctcagccaacatgacaattctggatatgctagccctggcacttgagtcatcatttagatgttcatcccggttggtagaccgacatgtacaacgcccagttctatgttgaccagacatgatacatgacctctcatgtctagaaaggttttcaaaacgactccccaatcgctgaagagcacggacctacaacatttttcaaatgtcattttttgcaggaagcatagacttgactttttttaaagaatattttagtcgaacacagcaagtatcatattacaaccagctaaagagtaacaaatattgtgcacacaaacaaaattgctctagggaagagttaggaagcatggtctctagaattttttataacataaacaaagaaagtctctaggcgatgtttgatactacccttgcccattgctcattagaacttacaccaactgctaaactttaaataatgtgcatatatacagacctgtgatcgtattcttctcctcctttcaaggaaatttgatctatgctccaaaagatcacgatacctggcttctcttgcccgagatgtttccacctcataatcttggatgctgaacaatgagcttgacagattggatgaagaataaccagaggcatttggggagactgcagaagtactttcagatgccaatgtcctattttgatccccccaagcccgcatcccactaccagaattggtatctctatcttctcctacttgttgtacaggacaaaaggatatgtcagataatgatgatcgacgaagaactctatcacgaagtcttccgacacttagagttctgctgaaccgaacatttctctcgataggttctcgagctacagcatgtctatcagacagtcttactccagcactatccatttcagaatgatttctaggcgagcacaagtttaaatcagcccccactattgaaccgctactgctagtattcatgacattatcttcggtaaaagaagttgttcggtcatctcctaggttttcagaaaaaccaggttgagtattcaaatgtaaactacttgaagtgtcttgacaacaaagtgttggcgtaccttgctgattttgatcagtatcaacaacaacaacattgggagaacccctaggtagatgagcgtcctcttcattgttcatcaatccaagacttgtggaagatacaggataagacctggatgatcctaaactgttggccctgctcagcctgaagcttatatttccaggaatgaaactaaaacgagaaagaaaacgacttgataggttttgggaatagaagatgctggagcggagctactaccgtttgtagaagcagaagtattagcatttgaagatatacatggtatttcaccagaccgcccaaccttaacctttctgtaacactcaattttggattgatttgactctatcccactcccactaaggttgttcgtggaaccattttctttgttctgatgatcacaaacctgaaccaggagccacacattattatcttggttcatttcataaaacgaaagttcgaatttaggtcaaagtacaatttaaaaaagaaagaaaatggagagtagacctgatcgtcattgtcgctgtcgtgagatcgcgacgtggtaccgaggcaggaggagtgtaatactctgtgcgctttagatcgaacccttcgagcaccggaggaagacgatgacgaagaggatgaagaagaagcagacgcagaagctttgctaccgacggttcccatctgaaatcaaatttgtggtgcctcagattacattacgaaggcacacattttggatctatgaggaggagcaatgggtgaatttcgatatgcaatcgaggagaaaggaaagtagcgagtcaagtagagagagagagagagagagagagtggatggagagacaagaaaggatggaatggcgttttctcagcctgtatttctgggacttcaaaatcacttcactccctccctccctctccctcctttacagtctacatcactcattttgggcttctcttccagaacgcaagcccaatcctttgacttttaagagtttagcataaataaataagggctatttgaaaaaaagatggcattatgtaacaaatcaaattaaaaatttggtttttttctaaaaaaaaattatataaaagattaaaaagaaatttaaatttaagattcataaaaa

SEQ ID NO: 296171 - DNA, 4313 bp, Cannabis indica
atatatatatatatatatctggatatactactttgatacagtgagtaatacccaactatttgggtttaggatatggtatggcattggctacaatattaaatcctacctcctacctacctcctgtcaattttacccaatcctacctcctgattaatgcatatactatcaacacacacacacatattggtatcagtattgcatgtgggcatgcttttgctgttgtcccaaacctattcttttttgcctatagctgagctagatatattgaatattgatatgatgatagacttagaaaatataataaagtttaatcatcttctttgaggtttgaggttccattttcatggggaccaacctagaaatatgctggagttttttcaccgtcattatgtatgagatttgactcctcattgagatatgcttagtaatatgctagagtttcaaaattttaacagtcagtgggaggacaagttttgtaaatatatatgaactattattataactgcgccacataatttattttatttaatgtcagactaatgctttcaactttgatattaatttaaaaaagctttgatatcatttttaaggatttttcgctaatcaaagtttctcactgttcaggttgggatggctgccaatttgagggactttgtgctaacaaattgttcagggaaagaggtaggtaatacagtacttctcaaatatttgcttacatgttatattgtgatatatttgcttgcagacaaatgaacaatttccatagctttagttaattgcttattactattattaattctaataatattattattagtagtagtagtagctgtaaggttttgatatctaagtttcgtacataagcaattctattgcataacaaagtaagctttcaaattatactgatcttatactgcattttgtactgtcattattctgttttgtaattattattgttaaatccaaaaatattgtcttgactcgatgttcaatggattccataggtaaaaggatctgaagtattaactcatgggagtgtccctgttggatttgcctcaaaccccacagaaactgtaaggattgactccctcaccacttgcatcagcagtttgcatttacttaaatcctgttttttacctgacaaaaaaaggaaaaaggaaaatcctgtttttcattatgagcctttttcattttcttttttctgctgatttggttggcattaaccacacctaatgcaccatataaggaaatattataggaggtccgaggttagaaattatttctgggacatttattttaaggactttttttttttgatgaaacatacacttaatgaaattagatgacgtaatcttagtacttttgctatgttcatttagctgaattgttgacactctttcttaatgtatgtgtaaaaaaataatgtagatattttttcttattttctctttcttttgctatgagcagattaattaaaaaaaatcttatagtggcaatgcactttaattattattatttatttttcgtggggagctggaaatctgataagccaccagattaatttaaactataggtttagctgttaactctcttaaattttaaataaatgctgatgtatattggtggctgagttgtattagtcctaggggctgatgtggcaattattttaggacaccttgaagtatacaaggggagagggtctcatagaaaggacatggagaaaattgataagagttgagactcattgtggagagccccaatcctctcgtatagattagaataggagagaacaagcctcttgaaatcttgtgattggtaattttatccatcaattaaataaagtttctgcaaagcatttcagctaacctacagaaattagttctatccactttgtatggtcaattataggagacttggatcaggaatgtatatgtattaggggaaaaaatgatcaaggacggaacatataataacatatgccttgcaggaatcttgaattctgaatcaagcattaatcttgcattaatgttccttttgatgctacatgttctggtgctagtttttgattacttcctccagtaaggaataatttagactctaatggtctgcttgtaacttccaggttaattatgtttctgctcatgacaatgagacactctttgacattatcagcctgaaggtacaatcattctatttattactgctttgtttttatacatgtactttgtctctaaccacagttgtttatatgtagactccaatggaaatctctgtcaacgagagatgctggataaatcatttggcaacaagtataatagcactgtcacaggttttaactactattgctgagaacattttacttaaatcttcattatcttcagttacagcaattatagtaaaatttttacctaaagaagtatcctaagaattttattgtacagggaataccatttttccacgcaggtgatgagttgctccgctcaaaatcaatggatcgtgattcatacaactctggtgattggtttaacaggtccattgtttattcttattcagttactctctctagtttttgatcccataaataggaatattcattttttatattagcattctttatctactttagattggatgtttattgatttttgtgctcaggctcgactttacatacaactccaacaactggggagttgggcttcctccaaaacagaagaacgagaaaagctggccactgtaagcactcatatattctacataataatttcatttcctaaaagaaagatgattattataataactgaaggcatgacttctgatatttattactgtatccactatatttacttcaacttcagaggaccctttcagataaatacatacataagttatatctgttgattttaatctgagacttgtatctattttcagaattaaacctagattggcagatccatcattcaaacctcagagaagtcacatcctcgttgctgtggagaatttctcaaatttgttacgtattaggtactcttcaccgctatttcgtctgaggacagccactgctatccaggtgagaaccgtggttataatgtttggaattgataaattttgaataacaatttatcccattcttgtcttcatagtatcttttttggtttccttccaaacttcatggtatcttttatggttgggttttccactaagaaaatgtaaggtgtttggtaagatattaatgcaatgtcaatttacacattataatatctatctaatgtttttaggagcgagtacgcttccacaacactggtccatcctctattcctggggtcatagtaatgagcatcgaagatggtcatgaaagtcaacatgggttatctcaactagatccaatgtgagtaaaattgagttttcagtcgttttaccagacgttaactttaggatttagagttataatgctgcaattgtctttttcttttttgggtctcagctactcatatattgtggtcgtgatcaatgcacgtccgactgaggtgtcattcaccagtccagcgctaagagctaaacattttgaattacatcccgtacaggtaaatcagttttttttcttaaacaaaactagaatgagctagtgatattgctttttgggcccaattgttatgttatattctgaaacttgtggttctcctattttgagttgcctatataagagtagtttgaatgttgattaaaccatggaaccttaaaatgaagtcatagtaaatggttgcaattttaaattattgaaatctatagaagttcaaagaattgtagtttgatttaaagctatttttgtctaatgatcatagaacactattttatgaccattttgagtgactcattgacagtttctgctatatttatgtattttttttcatatgaaaatatgctgcagttgatgtccactgatgaagtaatcaaggcttctacttatgaagagtccacaggatgcttcgttgtcccctcaagaagaacatctgtctttgttgaacctcggaaattttgagtactcttttgttttgaaacttgtctaaggcaataatttgagcaccctgataagacccgagatcttccgctcaagaacacaacaaaacagtagcaataataggagtagaacaatagcaaaataatagaaaatgtgtattgaaagtatgagaaactcaattacaaagtaagggagcccttaggcccctttgaagtaggggtgttcatccgatccaattcgcacttttttgctcaaacaacatccaatccgcactaagtgcggatttcatattttggat

SEQ ID NO: 296172 - DNA, 6230 bp, Cannabis indica
atatatagagagatcaatataaaatatgtataaaatacgtataaataatcacatctaaagagcacacaccaatgtagctgcaatagctaaaaaaaattcaaaaatcaaaatctcaaaaataaatttacctaattaaaaaaaaattaaacgtacatgtattgcacttaacatcacttaattaaacctaattaaaaagaaaactaattatatgtgcattgcacgtaacatcaacctaatacatatcaaatgtggctatatataatagaaagtactattttcttaggaaaaaacatattacatttcaaatttaaactcacttcacatatctctttcttatcttttatcttatattaaatgtggttgttgaaccaaaaaattcactgtatataactttttgaaatatttaagctaatctaagaaaattctccacaataaacttggaaagtatataatcaaaaaaacaggggtagtcaaaccatacaagggggcgagcagacacaatgaggagccaaggcaggagacgagctccccatgcaaggagctcctcgtacgcaccaacgagagcttcccgctcccttctttcttgtgcgcaccagtaggagctcccctgtccccctctcctcgcatgcccaacgagaactccctgctccctctctcctcttgcacgtcgaatgggaggtccctgctccctcatgatctctctaactctctatcactatctctctattccctcactcaatcactctccttcactctcctcatttagacaaggagactcacatgggcctaacacttagccaagttttttaagtgttagcttcacatcatgaatgcgagctataaacggagggatgtcaagaaatgaaaaataaaagataaagtcattaaagtatgcatacctctaatgaagaattggttgtacgacaagtacaagtagtggagacacaatttatctcactcgaggtactaactgacacccgatcattacttctccactatccatttgacatgctgatcttcatggtacaaaaagaattctatcccctaacttttgggaccacgtgtcttttagagcttgatcaatagctcaagtataaatacatttgaaatattgtaaaagggctaaaaattcttgagacaagagcttttaacctaataatacaagatactcgtttttaccattgttgatctacgaatttttcttaagtttcattgttacttcatctactttcttaatctcctatatacatacattgagtttctagtcactaagatcgttaacgaattctcactttcaatagtttggcgctgtttgtgggaaagacaagtccatatctacaccttttcttgtgtattaaccaaccaccatgcgtcgacgtttgcaacatctccaagaaaatggagttcacttaaatgacaaccaactgctgaccatcatgagagaacttccacctcccgttggtgaagaagaccaaagggagaataaccaaagcgtgaaccaccaaaataatgctcaaaacgagcccccaacacaacatgacttttgatagctaaccccatcaatggaagcattcaaccactaagaaggacatctttggagcgacacccttcaccatttgtgccacatgagcctgacacttcaagatgtaggaccgaggaaggagaagcgagtgtactcggtaacctcaagctcccaaaatcaccactatgaagaggagataaacgacttccgctggaagaatgaatgacttgaaactacagtggttgtcatgcaaaaattgttgactggcatactcaaaggcaaaactcaaacatcaaatttttggtatgaaagctaccggtggaagaatggggtcccaaccacatatgttgttggaggagactccatgtcatccactaatagcaccccagaaggtcaaggaggaaagggcccaccgcgagacaaaaatcatatggttcagtcgagacaactcaagcctacccaccatgagaaaattgcattgaggaaaacactccattaccttataaagagacttcacccaaagggtctcgttctaggggtaccttgcctatgatcccctcccaagagaaaagaaaatctcaagccttatcctttagccttggtgggaagccacgtgttaataggacaagagcaataccttttgcgggccctatgcaaaccataaagaggacctaagctccactcactaactcccgagaaaggattagcgaaaggatgaaggagctgaaagtggatatgcgagatctacgttgaaagatagataccgcctcgaagggatgcttggatgatgatgagtttgatgaagaaaccccgtactcaagggagattcaagttcaagaaaccctgagggtcacctttctctacaagcatcaatgtgtttcccttgcctgccaagtttaatatgcctacaaggaattacacagggaaagaagatcccttggctcactttaattattttaaaatccatagggaaagaagatccattgttggatgttcctggcaaccttgtctgaaaccgcacaatagtggtttttcaaactagctaccgaaaggtttgattcgtggaactctttcacaagagagttatacacacaattcttgtcttcccaaaaaatgccttatatactggaggacttagtggaggtcaaacaaaggccaggggaacctctgaaagactatttccaaagactatctcaatcatttctccatcttcttccatctcgcattatcttggtactactagttttttaatgggaaccaagttgaggtcattataatcagattgcgacggtagtttaaccaatgagtttgcatcaaaattttgttctcttaaaatttattcaattttaaaataattgaattttcctaagttttttcaaactttttctaagtacttgaccattttcattccctttgcttagtattctctgaggacatgattcacaatcagttgcaaatcacttaggcaatatgaatttccttgacattaactaattctgctactctcaaacttgcaagaagttctttgtattcagccttgtttaaagcacggaattgaaactttaaggcatagtgaaacctaaagtcctctggtgaaaccaatgttatacctgccctgagccacaatcatttgaggaatcatccacaattaacttccaggtgccttgatcaggaggttcacttatgttcttatcgatatctatcccttcaattagaaaatttaataatgcttgatttttgatggctgctcacgggttataagttatatcaaattgtcctaatttaattgaccactttatgagtcgtcctgaggcatcgagttttaacaaaacttgccttaagggatgattagttaacacatgaataggatgtgcttgaaaatatggtcttaattttcttaaggcatgaataagactcaatgcgagtttttcaagaggcatataccttattcctgcccccaattaacattttctctcatagtatagtggtaattaggccttttccttttctcgcactagtgttgcacttattgcatgctccaagattgataaatacagatataaagtttcacctgttattggtttcgaaagtactggcgatgtggagagatgttcttttatctcctggaatgccttctcacattcttctgtgtaatcaaatcatttatttccttgcaatatattaaaaaatggtatacatttattagttgactttgagatgaaacagttcaacactgccatctttccagttaaggattgaacttcttttgacttctttggagagggcatatcgagcaaagcctttatttcctctgtattggcttcgattcccctcacatttactataaaaccaaggaacaatccaaaagaaacctcaaaagagcatttctttaggtttaatttcatgttgtatctccttaagattgaaaaacattctgtaaggtcaatcacatgatcactgtttttgatcgacttcacgagcatatcatccacgcatacgtctatgttttgacctattttatttctaaacatgttatttatgaagcgttgatatgtggtccataaaggacatgagctcatgtcctgcaatggcatccatgagctaatcaattttttgtaatgggaaacaatcttttagacatgctttatttaggtcagaaaaatcaatacaagttctccatgtcccattcagttttagcactaacactgggtttgaaacccactgtggataaaatgcttctcgtatgaagtcattggttcacaacttgtcaacctcttttttcaatgtattttgcctctttgaatcaaaaagccttctttttttattgcttcggatgatagtgagggtcgatgttaaggtgatggcttatgacatttgggtcgatcctaaccatgtcagaatggctccagaaaaattgatcctggttcgccattaataagtgcttaagtcgcaacttcaactcttcccctaaccttttaccaatttttataactttcgtggggtcattggggttgagtaatacctcctccaactcatcaatcgaccctagctaagatttttcttcacttattcttgggtccaaattttttaagattatcacaaccatcatttgacaagacttagttatttccctcaactctatattgtagcattctcgtgctaaaaacgagttaccttttacaattcctactccattctgagttggaaattttaatgacaagtgttttattgggctaatttccctcagtcctatcagtgttgggcgactcatgatcaagttaaagatcttattcttctttctcaatttctaagattatcacaatcatcatttgacaatacttagttcttttcctcaactctatattgtagcattctcaagctaaaaacgagtcaccttttacagttcctactccattatgaattgggaatggcaagtgttttattgggctaatttccctcagtcctatcagtgttgggcaactcatgatcaagttaaagatcgaggaaaggtcaaccaccaagaactcttgcattagagttgctgacaagggtgagtctcccattgtcacagggagctcaactgtccctaaacttgcgatgctatcctctgtgaatttgcataaattaaccatgcatggttttagagttataccttctaatcccattttctttaaggtctctttgtacagggtgttgacccattatccaccagaacttgcttcactctcttattcacaagctaaatagttatcactagtggatcttcatggggaaatcttacgtgcatcgcgttgtcgtcagtgaaagttattgggggttctacagtctttgttcgttttgctaattctggtgcaaaagttaaagattggtttttgatctggtttatatatctcttttgtccagtgtcactcgatcccgcaaggtggctccctaaaaattaccaagatgtcctcaccctctataggtggttgctggacattttggttttgattctggttatgggattggtttttttcattcattttattcttcacgtattttctgaagtaacctctggaacaaactttcaatttcatcttttagttgtagatactcctcagtggtgtgaccaatgtctttatgaaagcgacaatatttattttgatcctacttattcctcgcatttctcatgggttcaggtttgcaaaatgcaaccttgttctcatttgcgaggaatatattttcctatgtttcgttcagctcgatatacacggtataaattgggatatacttcttagattttttctttttcttcttgtgttttgatgagcctttggactcgtcctttctttttccatgcaattcatggatcttgcctttggcattgcttgagctgggtttatttctcaagccatcttttaatatcttcaacgtagaccgagcttcctctttcctaacatagatgcgagccctttcattaaatttatttattgattttactaggcgtccttgcaaatcattccaaagttttccaccgacagtagacaaatcagtggttatcctagcctggagtgttgtcaatagaatactatcattcaagttttaaacctttgctgttgtcgtgctaaagggacttagaaatgccttcaaagattctccatgttgttatttggttgtaacgcccttacttatgtaaaataagatgccataaataaactggcgttaagat

SEQ ID NO: 296173 - DNA, 953 bp, Cannabis indica
ttgtcttttaataattttagtgtgacgagtctagtgcattgtctacgaactcgtaatatggcaactcacacattggttaagtatgctttattgattactgttagcaaattttggtggcccgattatcctctttatattcaatctcttgtattgcatgaaacaaataatgaatgagtacatgtttttgtgtcctcctccccttcctagaggtcttcttttgttggtgggctgggaccgtttcaaaagaaaaggtcatgagtttttaaattaagagacacatatcatatggcagttaatgggatagaaaggagacacaattggtgacagaagatttcattccgagaatggctagcgatgaccatatccttccctttctttttctttttttttttttctattaatttgttgtagattggtaaagacatttttttgggatctgtcggcaactaatgcaaatttttctttgagtttgctgttaaattagtacaaactactttgtttgggatatgttgtacaaatagtggattgtgcggatattttttaagtacttgttatatgttggggtagattacttttgttttggatctgttgtacagtataaggggtatttacatatttggaaaaataaagttagtttacactaatatggtaaggaaatttaataaaaaaaaatatattatttgatataaaaacataacatatatggaatgtacaactttaaattcacataaaaaaatattaaaattttcttcatattttttttaaaataaaacaaatgaaactacagtgatcgtcgaagttgtcactggtgccagaaaactcgctggagtttgctgttggcactgaaaaaattgccggagtagctgtcgacattagaaaagtcgccggagttactaacagcaccagaaaattcgtcaaaattagcattgtcgccgaaaaaatcatcgaaaaaa

SEQ ID NO: 296174 - DNA, 1250 bp, Cannabis indica
gtattctgtaaactcgtggagtagtacttttacaattgctacataagcagccatttttctccacgtgtttagaattctcctgatacctggttgaccactaactgagaatcactgaagacttctaccctcgtagcccctacggctttggccagtcttagtcctgcaattagtgcttcgtattcggcctcgttgttggaagcttgaaatgtgaagcgtagggcagtctagagtcgaagcgcgtctggcgatatcattgttatcccgccaccggatccattttcattcgacgccccatcgaggaacagtttccacgctagcatctgctaggctagcatattggagttggcttatgcttcattacattttgttataaagtctgtcagggcttatccttttatggagatacgcgggatatattgtatatcgaactggctcaattccatggcctattgaaggagttttcctgaggcttcaggtttctgtatgacttgtcgaagcgagtgatttgaaagtatcttgatgggatgggtctggaagaaggtcttagtttccttaaagctatcaggaggtagaaaactagtttctcgattacgggatactaagtttcggaccttgtcatgcgcttgctgacacactgtactgggtgctggattttatccttttcttagaccaaggctgcactgacagcattctcagagacgacgaagtataataaaaagtcctctttgcgaaccgcttttgacagtaccagtggtttggccatatgttcttttagttttttgaatgcctcctcgcattctttagtccacttgaattttggacattttttcaaaatattgaagaaagggatgcacttatcggtcgaccgggaaatgaatcgacttaaggcgaccaccttcccggtcaaggttgatatatccttgtgtttctttggggaaggcatgctcaataaggcctgtatttttttcgggtttgcctctatcccacattgaataacgataaatcccagaaattttctgaatttgacgtcgaaggtacacttcttgggattaagcttcatcccataccttcaaaccacttcgaagcactccgtgaggtcatctacatggcccatgcatattttagatataactagcatgttgtctacgtatacctccatatttcttcccaggaggcctttaaaacattcggttaaccattctctgataagtggtacaagcattttttaatctgaaaggcatgaccaggta

SEQ ID NO: 296175 - DNA, 2048 bp, Cannabis indica
ccatataattaaatcctaaaccaattaactaaggcccttattttgccaaagccaatggaaggggatgatttgtatctttacttggcagtgtctgaacataccataaatatcgctttagtgcaagaagaaggaaaagtctagctaccggtgtactatgtcagcaagagattactgaatccggaatccaatatccgttgattgaaaactgaccttttacttaatagtcgcctcacacaagcttagaccttacttttaagctcacaccataaaagtattaacaaatcaccctctccaccaagttcctcaaaagtcggaagcttccggtagattgttaaaatggacagtggaacttagtcaatttgatatctagtatcaaccgtgagtgtcaatcaaaggacaagccctagccgactttgtaatggaatgttttgggttaggagacctcctagatgagtcatttctagagctacctacctaggaagtgtatgttgacagggcctccaatgaaaagggagtcagagtgggagctatattaatttccctgcaagggcatcaactgcaaagcgggctctgtcttaagtttcttgcgtctaacaacgaagctgagcacaaagccatgctagcagaattatgaatggccaaagaagttggagctcagcataattaagtgcacattgatttctaattggtggtgaaataaatatcgggagaatatcaaactaaaggcaaaaagatgactgcttatgtcatgatgtctcgagaacttcttcaaggattcaagggcgatcatcctcgacgcctactaagaagaagtggagtgagagagatccagaatgggagaatcggcgtggtctagccagggagatttgggaaggatgtggtgatggtgtcgtgcaatgagatctaggcaatggagaattggcatggtctgagcgagagaaagttggtggtggtttgggcgagggagaacgatcatggttctctggtgtgaggctgagtgaacaacgaaagaaaaaaaaaaaaaaagaaagaaacaaaagagattttttttattcttttttctaatttagaaatatttaaaaatttaaaaattatctttttaattattaatattaggcagaattataaaattttgtgacgtgtacatttatgtacatagtgacaggataaaagaagtacaaaataaaacgattgtgaaagttcagtaatttaacattaattttttcaatctagaaaattaattgtgtcaaattttaaaattcatgaaattggactgcaaattaactttaaaaaaaataaaaggaaaggaggttataattttagacaaatattagagggaggcaacttgccaactttaaattaatgattaatcttaccaatcatgatcatgaaagaacgtgctttttgacacttctaatttattaataaactttacatttaaaaattaaaatatactattagtagtaataactttggggacatatctagtagcacaacacaccaaggcatgtcaaaataaaaataaaaatgacatatttctagaaaaaatacaagactaatatacttatttaatttaatggattaagataaaattatgtcaattttgttggagtttgacatacattgaatctcaactaaattgtttgattgaacccaatttcaagtcactttggacatcccgatcaattggtctattattttaataggagtccatagttttttttttcttttgtaatacaactttttagaaaccattgctttcaactttggctattggaggttggggaccaataccatgacaggtcatcttaacccaatttggattacatatatgtatgtttcatgaaataaaaaaagatctaatcatagatttgtaacctcttttaataatataagaaaaatataaaaggtaaatattatatatgcacgtgaacaagtgggaattccaccactaattaaaaagcgtttgtcacgggttcaagcaagtagcacgtgactaagcttatggcgtttctttgttttttgtttattttttatatttactaaaa

SEQ ID NO: 296176 - DNA, 2469 bp, Cannabis indica
gctccgcgagaaccgccatctaaaataagagatgtatagcaagtgatgtgtgagcattctaaacattatatacaccacatgtgtatagcaagtaaatcaccaaatttgaacaaaattttacacattttcccaaaagcttatttctttctaccacaagcccttacggaaaatgaaggaatagaaataattttggatttatcaagcctaaagagaatttctagcaatatgctctcctgatagtgtgtcccaatatgaaacacttaggtctctatttatagtgtaggtgaattacatttcaatctctcacccaaatgactattaccagtcaaaatatggtcagaaatgggatacaatgcgttggcttgaatatagaaaacatcctcacttaagaggtgaaaaacgttctttaaaaatatgtattcaagtgacatgttgcataggatgaattatgcacgccatttttgaaatctcgtaacactccttaagtattcccatatgcatgtttaggcgacatatggcctgatgtgttctaacaaagaacaatgaagatcttcgtaactcttcttcatgctaactctctcacaaatattctaacacttattttaataatataaatattataagcgttttataatagatatattatcacttatattaatctcctaataattttataataactcatttatttatacaatttaagtaaatgtatttcatagattataaatgctatttcagattttgtaactttccttttgttacttttttagtgtttaattaaattttataatataatttaatgaccaatcctacataaatatatatatgccacatttcaatattttaatcaatttaatattataccaaataatataacatggctcgcttgggaaagaaattgtgctaccacaaaatatagaggccttgccaaggccgccttggtttttaaaatttggttgttttaataaggctatttttgaaaaacaagcattgaggttgtacgccaacatctttccctctccacaatgtttctaacaggcatttcctatccccattggtcattcttggaggctaacgtgacttagtaatgcctcttttatttggaagattatttcttgaggttgggaattatggagatcggctcaagatggcatactcgttggggtaacatttctacctataataaagtttatatgcccagagaagatgttctttgattgtgtttattcactgtgtgatagtattagaattattgataaggtgtatggagttccatctcaaaactaattgttcatgaagagtaactcatacatcttatatatggtgttatatttctacaccttaacaatgtcaatggatcacaagtagttctttttgacttgtctttttagaccggcgacacttttagcttataacgaatcacaagcggatattttttaacttgtctttttggactggtgacacttttgattcactattccaaaattacaaacctttttttttaatcatctttttggaccaattattgtatttggatcgaatactcattatagttttgtttagctctgatgctatcttagaatttgacaaggtacgtgcgattttatctcaaaactaattgacaataaaataagtagctgattatattatatatgtggattttgtttcagtactcgcttggtggaagtgaagttgatgaggctatcctttcaattccaagacaagtgcagctctcttttgataatcttgtttgaaattatggagagattggttattatacgatacacaatggttattggtttctttgtctccataaaggtgttggtcagtcttccacttctcaggggccttcgaagtggtggacgatgatgtggagtctatgcttacctcaaaagtcaagcccacaattggttggcttgtctgactcagcttgctcaaataggaattcccacttccagtttgtgtccttactggcttaagggttttgataagatgttgtttagcacgctctttggggttgtgagaagctggttgctatacatagtactttgactcaactaaatgagatacttcctgaatcctgaggcagattttgaaaaaataattatggtgttctttaggatctagtaaaaaggaaacaaacgggtgagtgaaaatattgtaattgatgattttcaagttgtcaatgggccttttaaggacatctagacatgttatagagttaataatgactcagggcaagcagggagtgattgacatgcgatttgttctcctactggtggtaagtagatcgcacctcccactggtattatttaagtgaatatttgtgcaatttgtgatgtttctaactgcgagaatggattgggaatggtggctcctgcttcattaggagaacaaatcgcatgtcaattgggatatatgcttatttaagtagtgttgtgaaatactatctcaaaaaaaaaaaaaaaa

SEQ ID NO: 296177 - DNA, 2627 bp, Cannabis indica
ttttttttttttgagataagtaaaatagtgagttgaataagacaaaattttggttgtaaacatattattacttgaggataatataattcattttattattattattttagtcggttttaattttttttactaaatcaattttaagatttttttaataaaaaggaaaatataatatttgaacttaaagaaaacaaattaggaaagttgaggggcggttgggatttttttaaaactgttttagatatatatttatatttaatattttaaaatatattttaattagaacgttacagttaaaatatgcttataaataagccattcataagtagtactcgaaaactctttattttctgcaaaacttattcttagttcgaacacattaatttaataggttttcataatccttaacatcctagctagctcccacttacttgaatagcatcttagctagtttctcttcacttcaataacatcattttcagatcaactaccaacacagaagatagtaaaaacaaacaagcatacaaagtaaataatcaaatcttaaaactttaagctgatcttaatatatacatattgtttttgtgttgtaatttcattattttttctattgttttcttgttatttgtatacttttttttatgtgattttcttgtttcatgttatttttataaaacgctatataattctaattaaaaactattaaattgaaacaacaattttgtaaaaatgtaatatatatatatatatatttggctgtaaaaatatgaaaattttgctaaaatggtattttgtataaatttccccatattctttatattatatatcataactcaaatatagatattaatttttattatctttcttgaataataatatgtaaaagcatcacttaattaattttaatttgcttctaaattatacagatggagattatggatatgtcattttgctcctacaaccataatatgaacaccatttgcaaattttgggctgttggacaatgtaaaaaaggcgaagcatgtgaatacagacattcttggggatctaatggttttcaggaattagcttcattacccaaaactttaactaaggtatacatacaaattatttataattaattaactaattcaaatattaattgagtctaccatgaaatatgaaatgaatatactaatttaatgaatatatatttttttaatataggtacctaggaagctacaaattgatgaagtgagttggtttcctccaccacaaaatttcattaaaattaatactgatggcgctgcaaaaggtcgttccaacgaagcaagttgtggaggcgtatttcgagactgcaatggcacgattctaggagcatttagttcatttcttgggaataaaacttcactcgaagcagaactctatggagtgattaaagcaatcaacattgcctgtgctaaccaatggcattgtgtatggttagaagtggactcgattctcactttgtcaatgatagccaataacaaaacagatgttccaatcacaatcagagaagaatggttgaagactttacagcaaattcaaacaatgaatttaatatattcacatatataccgagaaggaaatcaagttgccgatctgctggccaatcacggttttttttccagagacgaattttcgtggttttcagaagctcctaactttattataaaagaagctttaagggatatcaatggtcctgttagatatagagttaaggcataaagaattttgaatgtaattcgtatgtaaattttatattttgttgttcagtatattataatgtaataatacaacatattttcttaaaagaaaaatgatatgaatgaaattattaaaactattttaaatcatgaacagttctttacatgtagaaaagttatagtatggtatagttcacttaattggctgggttgaaacaagtttagtatgattagatcataggaattagagttatgtgctatttagtagtggtgggactatagggatgattaggcataattttggtagaattgggcatgaaaaacactcctctgtttagagcgaacatattccaattaagacttctaaatgagataaagcacaaacaagaatgttgttgtattagtactattcacattcattcacctaactacttagcttaagagtgtgaaaatcgaaattaagtaattcccaagtgcaaagattcatgcaaatttagattgagacttgttcatgactgtttcaccacaaacaaggcagaggcataatgacacaactaatcagaagacaatacttgagtgcataaagcatgtaaaatggcacaatcaacttctacacagagctgcagtacaagcatattatattaattaatactcataaatggccaattcaaaatagtttctcaatttgtttcatcccccgagaaatccttcttctctcatattattcaacaattaatacagatgaatgacaacagtactactactcaaactactccttgaatctcatcagaagggggatgagatgaaagaacattatctgggtaagcctagatagcaatggagatgcttaatgtggtcaacaatatatgtagtatcaatagacttcgacatgccactgcttgt

SEQ ID NO: 296178 - DNA, 5587 bp, Cannabis indica
aacatacttgtgagtagatctaagatcctggtaaaataaattccaacacttgtcacgtgtcaaatatcaatgtccatgtcatcaggggaaattttcaggtaagcaagatgtatttagttgtagagatgctgaaatcattttgggaattcctctttcaaactttaatgatgaagactgatggtattgggcaaaggaatttaatgggttttattcgattaagagtgtgtataaatggttacaagaattgaagcttgtggcttttggtgatgataatactcagttttggaagaatatttgacagttgaaggtcgcttctaaagttaaagatattatttggagggcagcgtcaaattgcttgtcgactatggtcagtttaaggagaaagaaagtggaggttagtcttaattgtcctttttgtaatatttatattgaaactaccttccattgctttgtttcatatgagtattcttggagttattggttgcctttagggattgatgtgccaagaagggagtttgagtcttttcgtgggtggttggaggaagtatgtaagtgggtggatttggaggggttgggaagggggactattttatgttggatgttgtggaaaaccaaaaacgaagtggtgtgggatggtaagaatagaggggtggcagaggtagtgttgtttgctactatacaccttaatcaatggattgcatgtcaagattagagaaatattccccttctaagccctttatttactggtgagggatgtgagtgctagactaaacctgatttaaattcaattaagattaatgtgaatgggacattattttcaaaggaaggacaattttggttgtggtttcttagctcgtgatgttttatgtgctttgctttcggctggtgtgtcttgtaaggtaggggtggtctctcttgagctagctgaggtagattctgagttggttgaagtggtttcgttactcaatggtaattgtgtaatcagacaaccttgtggctattcagataattcaattctatagttatgtcgcctggttttgggattgtagttgaagagtgtaagttgttgatgaaatttttgagtaatatttattacattttgtaaaatagtctactaatttagcactgcatttgcttgcacgacagttatattgctatgctgattgtgagtttagtgtggagaatgccaatgtgggaaatatacctgttgaacttgtctttatcattatgagtatttgctctaagtttaataaagctaaaattttattaaaaaaaatgtgaactattcatttgttttaatttttaaagaaacaaagtgtttaaatcgaatgtggctgtgcatggattagcagtgtatgtccttcgaatggataaataacttatgtggttagacaattttccttattgtctttgtgataattaggtttttttgtttttgttgtcaaacagtctatttttattcattcatatattattattaaaaaaaaaagttaaatggaataatttatttttgcaaggaaatccaataaattctagagacaagtagtacggaattattgcaaatgctcagtgatgaataaactcttgtggtgcacgtggcaaaacaatagctgaagtggacttcccctgcgataccagcaaagtcaagagaccaatccaaaccacagcttaattcaactgtattgttttacttatcccgacccaaccacagcattgccttcctcccaattgtctctactctctaccttttattatccttttttctttgtcgttttttgttttcttggtgattagtccatttctctctctgttacctcaattttcagtcaaaccccaaaaggcatttcgatttcgacggtgttcggttcggcatgggtgtgccgagcgacgacgtcgttttgatccaccaaggaaagaaccctggagaaccttacatcgtcaccgtcaattgccccgataagaccggccttggatgcgatatttgcagtttattctggattttggcctttatatttctaaaggaggtatttatgtgtttttcattctgattctattacagtacgcacctgggaaatgtatataataatttttgtcaaaaactctaactatgcagctatttcctctaatttatgtatgtattttaagggtcgcttcactttcatgaatattccgtaatatcctcatacttaatctaaaagagtttctaggttatggtagtttcttgaaattcattgcacactttatgcttttcaatgggtattgtaatcactaatttatggagagttttttgaggattcaaggcttttatctatcatcttcaaccccttttatttataagatatcgaatgcaatgtgttaatctttgtgatggattttaagctctagcttgtctagaggatgattttgtgtttaatttcgtcgcctgcttctatccttaggattcaattagggatataattgaattgtggtaattgactgataattgtcgtggttcatgagagtttgcaaagaagattgtatatgctagttgtttttcctatgttgacgcttgttttcttttcattacgttaatggttcagatatttcaactgatgggatatggtgctacatagtattgtgggttgttcctcattccagctcagtcaaggtgaaatggtcaaatttgaagaataggctgcaatcagaatgcccatcgtgcctgcctaccttttattttaatcaaccatccacctctttgttgccttctccggtgtatctattgaagttcttttgcatagatcggagaggattattgaatggtaaatagcctttctcaatataatcccatttttctttgattcaaatgaagaacattaggaaaagaagctggctttttatttttttcaagtatatctgtcgttctcaattatcaagtcctaatatcattatgatttctctagatgtcacacaagttctatgtgagcttgagcttactatccagagggtgaaagtaacaacaattcaagatgacagggtgttggacctattctttgtatcagataatcggtaaattttgttttcatgcttgatgctggatgaatcatgaatgtgctatagctctctggtttcatctttattttaaggaattggccaacctttcctgccctgccccctgccatttctaggcggttcatgttttatcaaacccaaaaacaaatgttttgagcttttctctaggtttgcatatcaacgttgatttctgaataaaaaatcttaccacgaaagtggtgtatggaccagaaatgacggcttttgtaaaatattgctctaaaattcatcttttgaactattctatcagttccataaatttaacaatttgaagaaaacatcgtttgatatcaaatgcatttgatgaagtacaatgatttcctaggaaaattctgaggttaaatttctttcatgtctctgatgtttattgtatcacattgcagggaccttctacacactaaagaccggcaagatgagactttagaacaattgcatgctgtattgggtgaatcgtgtatcacctgtgaacttcaattggcaggccccgagtacgaacgacatcaaggaatttcttctctttctcccgtagtagctgaagaactttttagatgtgaattatcagatagagaaatccattctcaagctttgagtccagacatgactaagttgaagaatgccaatgtaacagtggacaattcactaagtccagctcatacattactccaaattcattgtgctgatcacaaggggctcctctatgacatcatgcgaactttgaaagacagcagtatccaggtaaatattttccttgtttcttaaagaatatagttcagataattcagtgtccaagcagtatgtggaatggctacaactgctattttcaagttgacgagttttacctcgttggattgtgtcccagtcccacctattcagttcaagggatagaggatcaacagaaattcaaaatactatgcaaataattcaagcaaccacccaccttttcagctagttatgggaattaggatgtgacgaaatgattgccactgatcaccatgttaatcaaaaaaacatagcaaactaccacctgcactaataaaattagaggcctgataatctaatgtcctaggttatgtcgttttgtaagctttaatgtgctgcaatgtcgtttccctccagcatttagattcaacctttttttccctttttagtgattattgttgtcaatatgtaaattgaccctttccagttccgaccaaaatataatcaattggtcaatatcataatgagatcgcggtaactgaattccttcaacgcatgaaggttgtggtttacagagaaattaaataacagtgaagaaaacaagattagatgcggtcaacttgaatagacctttattgtttgctttctcgcccattctctctattagtaggcctaatttgctcccaaatctcataaatctagatcattcttttatttcctaataatatggttaaggtatgctgatatgtattcttttcttctttcttttcttttctttcgttttttagataacttatggtcggttatcaccttctactaaaggctatcgtgatttagacctttttattcagcaaattggtgggaaaaagattttagatcttgagaagcaggatgcattgtgttctcacttgaaagcagaaatgcttcatccattgcgcgtgatcattgcgagcagagggccagatactgaactcttggttgctaatccagttgagctatctggaaatggaaggccacaagttttctatgatgtcacacttgctctaaaatctcttgggatctgcattttctcggtaagggagacaagggaaaatcaaacaaacatattttgggaactccccagtaacacatagtagagtttttataaaaagtgcaatgtgccccaaatggtcaaattttataaaaagttggtgttaatatattaaggattatgtccatttctttatgttatctgcgaagctaatagattttcattggttacatagtacatattatttgttgatttagaattatgtagtttgtaatgctttctctcacatcttcaggctgaaattcgaaggcattcggcatcagatcgtgaatgggaggtgtatagctttctattggacgagagctgtagtaaatttcaattgtcgaatatggtggctaggaatcagattgtagatagagttagaagaacactgatgggatggtgagtgagcttgtgttaatttggatggtgaatatgtttccattaagatatctagctatttggctcacattataggaatctatattctccattattgtctttaagatgaggttgtatgcttgtctacttttaatgcattgtgtggtttttcagtttttttttttccggttttggctgtaatttatgtgatgtaattagtagctactagtttctcaactgtgcatgtagtattaggctaatagccaatgggaaatttgaatttctatccatgttttatacccaaattaattctctaaactaatatttatcatattgaaaaaataggattac

SEQ ID NO: 296179 - DNA, 1118 bp, Cannabis indica
atatctaatgaggatcgaaacttggaggaaagtggtatgtcagttgtgatatgcctatgtgattgaactatttatcattgtgtgaggcaagtttatttattttgcagaagatgtagaagaaaagttgtctcattcagctggtgaagaagaacaggaggaagaggatactgaaagtgaagacgatgatggaactccatgtgtagtccttgaaggcgggctgaagataccagagaaaatttttgaccaactctttgactatcagcgagtgggggtgcaatggctatgggaattgcattgccaaagagcaggaggaattattggagacgagatgggccttggaaagaccatccaggtcttgtcatttcttggtgctttgcatttcagtggcatgtataaaccgagcataattgtctgcccggtcacacttttgcgacagtggaaaagagaggcttgcaaatggtatccaaaatttaaggtggaaatacttcatgattctgctcaggatctaaataatagaaaaaaacgatctgactcttatgaaagtgattatgatagtgaaggttcattggacagtgattatgaggtaaaattatcgtccaaaaccactaagaaatgggattcattgattaatagtgttttgaggtcagaatctggattgcttattaccacttacgagcaactccgtatactaggggagaaattacttgacatagagtggggatatgcagttttagatgaaggccaccgtattcggaatccaaacgcagaagttactctggcttgcaaacagctccagacagttcaccgtgtaataatgacaggtgcaccaattcagaacaaactggctgagttgtggtctttgtttgattttgttttcccgggaaagttgggtgtcttgcctgtgtttgaagctgagtttgctgtccctatatctgtgggaggttatgcaaatgcttcaccactacaagtatccacagcatacaggtaacacattgcaatatctctgaaactaagcatagttgtgaactattcattttatggggttgttagtgtgctgtggttgtgaactataaatcttgagttgaaaacttgtgatacaggtgtgctgtggttctgcg

SEQ ID NO: 296180 - DNA, 3854 bp, Cannabis indica
attgattgagctgagatttgcaatatcatattttcttaaaattcaactcacatatcttttttttattggcatatttaattttctttttttttaaaaaaaataaaaatttaatgatttagactaatcgaaaattgtaacttaacaatttacttaatacttattaacaaaagttctagttgtagaattataacttaagtattttaataaaaaaaataaatttaaagtatttatttataattaaaaattaaacgtaagtaaacctatttatcttgtgataaatttgcattacaaaacttttggcatttgaacaaaaaaaaaaaaggaaaacgacatgtgattgagatcgagtagaagccattaaactcgccacctcagcgcccgcatcacgtgtatttctcctcctcctgctccactgccactggtaggtagcaggaggattactgcaactctaatcactctctctctcatacttcaacaatggccatctcactctcattctccccgtctttctctctcctctccgcttccaaaacctacaattcacctctctcttcaccccccgctacgtctccattatctcgtttgcacctccgaccaagaattcccttgctccgttgtcaattcaagaacgacaccgtttcggtgcttcccggcgttggggaagacctgcctttggattatggcgaacgctttcccaagccggatcctagcgttcgcagaagagctggtgtgttgctccacccgacctcgtttcatggacctcacggaattggcgatcttggagatgaggcatttcgttttattgactggcttcaccaagctggttgctccgtttggcaggtgtgtgaacttccttcatactaatctgtttggctgccgagaacatttactattttatgttatgtttaactgtttaagcagttttccgaaaaaaaaaactgtttaagcagaaatccgattttgttcgagactcaagtgctttatatgagcttgaactgtaacgaaagcaactgaattttcaatttccatcttaacagacaacactatttcgttgctgagatattggtttaatgtaactgtagttggacattatagacgttatgccgtgattggttccttgaaataatgatttcctttttttcccttatggataaaagctcacttttagtttaatatttttggagtttggttgttagtttatggttaaatgtatattcttgtttcaggttcttcctcttgttcctccagggaggagggcgaacgaagaggggtccccttactcaggccaggtaacatgaagtgttgtaattggcttcttctttaaaacataagattgattcgtttggcaaactgaaaattctaacaattttgaaattcaccaatattgaccaagctaacatactctagaagactccaaattgttcttaataatcctttggtgtttgggttgtactagtccttttgtatctgttgcactgcacacttgtggatgattgtctttgatgatcaatattcaggatgcaaattgtggtaacactctcttgatatctcttgaagagcttgttaaggatggcttgttaaaaagggatgagctaccaaaaccagtgtgagaatttttaattattttcttgaccctgttacaattagaacaatatgtttccagatgcatttctcttactaaaattatgcactcattcatgcagtgaggctgcacgtgtgaactttataactgtggctgagatgaaggaatctttaattacaaaggtcagctataactcaaacatcttatattatatttcttgcggaagtcacgaagttccctgaatgaataagtttaattgttattatacaattggccagtttctgtctgattgtatatattatcaatgttttgagatgatcttttctaagtgatgcttccagattaattaggagattggagcctgtcacaataaggacttgttttacttagaaacttttgttccatcgtcggttgactttctgtgttaattgattgtgggggcaaggaggttcaagatggttagagtttcttaatgtaatatcactgcctacttatgtaatctgataggaacccctgcacaaatctatctcaatagcacaaacattagggaaataatagaccagaattgtaatctctcccacaaagggttacagcccttactaacttctccacaaccgacaaatgaacgccctccctctgtttattctattccttatggtgtagcataacccccagccacactcttaacataaccctctaactaattttctaactaagtccctgctattacttactgctattgacttggtgagggaaggtctatcataatcgcacatcaactaagagtataggagttttagtatttcatttcttgtttgggagcttatttgtttgcaccacaccctgttagtttagtaactggttattagattacgaaattcactgtatactgtgttttcttaggctgctgagagacttattcagagcgaaggcgatcttaaaaatcagcttgaagattttcgtaatgatcctgatatatcaagtaagatttttacattttagtatcctttatctcgttttaccttctaactccaagaatgcacttgcatagatgtagaatcttattcgctcatcttttaagttatctactattcttacgtcgacattgacctttgtttgttaatattgcaggctggcttgaagatgcagcttactttgctgcaattgacaacatccaaaatacttttagttggtatctgtggcctgaacctttaaaaaaccgccatcttacagccttggaggacatctaccagaatgaaaagaattttgtaagattaggatgactcttgatttttttttacaggtttatatttctttactttattgatgcttgaaatttgtttgctactagctcaagcatctgacttttacagattgatgtattcattgctcaacaattcttattccaaagacaatggcagaaagttcggaagtatgctcagagtaagggaattagcattatgggagatatgcccatttatgttggttatcatagtgctgacgtttgggccaataggaaacaatttttgcttgtaagtagtttgtaagttgatgatgatggtgtgtagcatgcagtgtcataatcaaaatcatggtaaagtatcatatactaagtcaaataggtaccacatatctgtcttgcagaacagaaaggggtttcctcttctagttagtggtgttcctcctgatgccttcagtgaaactggtcagctgtgggacaggtatattattctagacacttaccaagaatatacatgaattcttagaaatggtttgtggttaaattctttaaaattggaaagccaaatttcaatgtgcatactcatctgaagtgtatgtaatttagattgttgtctattctaacctttgtgtgcatgtcctaagttttactatggacatatacttcacttcgagattgtaaagtaatcttaagaaaggcattgatttaaattccatctagcttttatatatgagttatacgtgtgtgaattatccagaaccaactcgggattattaaataattaaagaaaaatacttgatattgttgctgtcggcttgctatacagattgctaattaaataattttaactcaaagccctctttataattggaaagcgatggagaaagatggattttcatggtggatacgtcgcttacgccgtgctcaggatctatatgatgaattcaggatagaccacttcaggggatttgctggtttctgggccgttccttctggttaggctctcaatatatttggtctggccttttgttt

SEQ ID NO: 296181 - DNA, 3205 bp, Cannabis indica
gaatggaaatgcacattcaaatcatagaacttaaggccttacctcaaggaattattagagccagtatcaagaatatttgtatttaaagccacatcaaataaatttgcctttacagctgctgcagcaatgtatgaagggcaactgaccaaaaaacaaaaaacaaaacacattcattcattgtaaaagtcaccataatcagaagcaaggcctctggcaagcaaactatttaagtatatgccaagaggcccagaaaataatttaaagccacgaagttccatggtttgtagcattcacatccctacagccttattgaaacaattgcatcagtaaatcatatgaaacaagctggtggaaaaatacagctacatctctataacaagcaaaaaaaaatcgccaaaatcaaatgacatggttatgatgctcttagtgacctttttttatatttgtttgatcttaaatcaaacaatgttctaggtgaacttaactactatccttccacagtgaacattatgtttttaattacagtcattggtaaaacagctagcatatggtgttcactttcaaaatgctcaatcaaattcaccccgaacttcatgcaaaaaagagttatatataagttctacagctaaaatgagattaaatgaaaacaaggagaaaatacaacataaaaagaaagaaaaagcagtaatatatgaactagtttaccatttcaacatctttgccaagatgttgacacctatggccattatagcagcactaccaggattaggagataatttcctgaccagagtgcagatgatctcaacaaccctgggcaaaagataagagagaagaacattaacgtagcaagaaactaacataacacagtacataggaaaaaaaaacagtacttaccacactcgactttccaattgcccactcaaagcagtttcttgagcatgaaatgagttgccaatgtccattaaagcaaaacacacagcctagagcaaaaaggaaaaaatataaataaaaaagcaaggtaaactaagaaatttatacaaaataaataaataaatcaaacaagcctatcaagaaaaggaactcttgataaaatattaatcaaaacacaacatattgaagattcccatttgtgtcaattccaaagagcagaaaatagttaacagaccttaatccctacatacggtaaaataaaatccaaaagaaaatgcatgaacaaccaagaagtaaactaatcacatgtcacaagttttaacaaaaatccagtagggaacaagtaaattaagaaacactggattttatcacctcattagaagatatcatctgattaagcagatcaagagtaagtagagcttcctcattgccatccaaataaagcccctgggctagacgcagcagcaggacaagcaccccagaatgtgtatactggaccaaagatgcatccattagcacaaaaaagagtaacattaaaagctcaggataaatattcattagattagaacgtgcgtaagttcctgatccctgaaaagtagtttcctatcatcatgaatcatagcactcaaaattatctaagctatgttttatccagggtgtaccctacaaaagaacaagacacaatttgtccataattcgtcatcaataagacaatttttccatttattgatttcactttcattttaaaaaggattgccaataaatcttcatcagcaacaatctaccaacttccaaagacagaatgcaactcttactacaaatgtataagataagagcacaaacaagtggaggaaaagatttctttcgtaccacattgaatatgtttccaccatgccaaatttgacacatttccacgataccaaattcaatactcattcagtagaaaacacaaaaatacatatcatctcattaaaaaccagcatttgatgctagaagaaagaaatagaaaaacagattagagaatgcagttgcaccattacctcccatcgtacaagtgcagtatttggaccaattaatttcaaaatatgtccacgagtgctactagggatcagcagaccttcaataccagggacatgcaatggagcacgtgtttcaacaatttgggatgtggcatccaccaaggaatcatctgtaatctcaaacaaggatgaaatgcccactgacttatcaagaaagttatacctgttcacatgaaggacacaaaatttgcaagaattacgtgacaattgaataagaagacacatctttatattatttcgaaagtatcaaaaaccattagtacaaacattaccaaaagaaaaccaattgatgaaccaatctaatcaaaaccaatgagattactagaaaaagctaataaaggaacttacacacattctgctggccaagttccttcagatagggatgataagaggcgaataagttccacaatccgaaaggggaattcaccttctaggctacaaagaagacaccgaataggaccatcaacaaaactttctctgtcccaaaactgaatgcaaagtgattcctgaaaaattaaagagcatcaacatccaattagaaactacgaaggaaaagaaaaatatcaaatttaatagtatcaccaatgaaaattcaacaaaataatcaatgaatgaccctgaaacacaatcatcatgcagccaaacctctccccggtaaactttgcagagaatatccagtatcaaattaagagtactgtcttccagctgcaacatagacaacagaaaatattaaaacaaactaaaataaacaccttcagctcattcaagatacttaaagtaactacctgaatattgatctcataagatgcaataaatgcagaaataaatgttctcaatacacctcgataaccagcaacaggtccctaaggaaagaaacaaagtaaaaaaaatatcagacttcaaactaatatcaaactgcttaatagaaactcaagtgaggaactaaggttgtgtttggttgggaggaatgaaaacatatggataggaatggaaataggaatgaaataaaatttaaatgctaaaaaaaaattaaattttttctcatattgcattagaatagtctttccttccatttcaaaataaaatagtcattccactaaaatgatggaaaaatcattccattggaatgacattccaatattataaaatgcaactaaaaaaaggaatgaaatgaaatttgattcctttccatttca

SEQ ID NO: 296182 - DNA, 1723 bp, Cannabis indica
ttttagttatgatgctaaacatgcacttattattttgtgtttacgtacatagatagtttacaatccaaatttatttatttgacaatatatgttgttgttatttagaatttcttcccaccaattagtgcaaaaagaatattcttacttcaaaattactctatattttatatttgatactttatttttatttttcagccttgcagctctttgttgttgctgtactatggatgagtgttgctgtgatcctatgttatattgctctggctaagtacaacataaatatgcatcataatattatgaatgtaatattattttgtgaaattgtagattttagtttaaataaatgtacttagtttgataaacaaagaattgttaaataattgtgtgtgcatgtcattacataaatatatattttatggaaagagatgcactttgtagtttctcaaatcaataaatgtgacacatattctactaatgatttaaaatgtaatatgcttttattttcttccatctaacttgtttatatggagctcttaatgttgccaatcgaatacatacttggaatattttggataaatttggccaaaataatcatgttgacctgtgagtcattgtaggagactttaatgtttttctttcaaataatgataaaattggtagaaattctgatagaggtccttcgagtgaatttaagaaatttattgactcttaacttcatcccctttagaatttgtaggctcgtgttacacttgaacaataatagtttatattatagaaatatataggaacgacttgattagtgcattgttaagggaacttggtctaatactttttccagtgctcaattcactcatgctgatttttttggttcggatcatagggccttaattttaaaatcctgttgactcaaattcgtcatttgggtaaggccaaaagatttttatttaaaaatggctggctctctaacaccaactggcagcaggttttttaatcttgttggggaaacacttctaatgagccatgctccattgacatgcttgttatgatctagtcttaatgcgcccataaactcgttgagtagaatcacaattcaagcttccaatttaagaaggaaattaactcccttgagaaaaaaatcgatatggtcaaggctaacactcattgggatgacaaatgtgtggtcgggatcaaaactctaaaaacccaattagatagacttctttaccaagagaagatttactagaagcaaaagagccagagtcaaatggctcttaaatggagataaaaacacaaaattctttcataagtttgcttcgcaaagaaaaaagctaaccaaattaaggagcttgagaatgctagtggtaaagtgttatccaataagagagaatcactactgtgattaaggaatttcaagacttttttcacctcgagttgccctctccaccaagatgtggaaaccatgctgaacaatattcatgtccatctagatgaggtggagcaggagatattgcaagaggctttcacgatggatgaagttcacactatgacaaaaataatagacacttaaaatcatcctaattattaagcaccaaaattttagaattgggattagttgtaataaactaagcacttatgaaggttatgccgcgaattactcttgttttaattgttttattttattgttttattttgttgttttacttacggttattttataaaaaga

SEQ ID NO: 296183 - DNA, 839 bp, Cannabis indica
ctggccgccttgggattcgatgagtatgcgggccctttgaagaggtacttgcataggtatagagagctagaagtagagaagtcctcctcctctattaatattaataataataataataataataataatttgatggtgataagattgaacgaccaaaatattcctgcgtttcatcactatgtctctccaaacgacgacgatgcattattgtgaattaatttgtatcacttgaacaattaatttcatgctattacttgaaaaatgatgctaagtataaacatgcttaaaaaagttaccttctatttcttttattattattattattattattatacaattataaaatttaattatttaatatattaaataataatataatattattttaataatttttagaattgtttgtatatataccatttgaatattgttctcatcaaatgttttataaagagctaaaaaaatagctaatgacttaaaattgatcttaaatgctctaaaagtttagctattatagcacatctaaattctaaaaaatatgtctatgtataattcaataaattgtggtgagctaaatatattttatgttttttttctctcactctttaattaattgtttcttaattttttttttattttgttttaattattttttaatttctaattaataaatatatgtaaaaatatttaaataatgtaaagaaatatagagaaactgatgtatgatacaatataaaagtataaaaagtgtaaagtaaatttaggtaaagttttaaaagaatagagtagaaaaacgtatgtaaagtgctcctaaaataaaaaagtgttaaaaaataata

SEQ ID NO: 296184 - DNA, 9452 bp, Cannabis indica
actagccatcaatggcatcaccatatatactatcagcaagctgccatacttgaagagtattatcgtcggctacacttgaaatgacccatggctcttctttgttccaagagaaatctgatatcttcgcagtatgaccaccatgagagaacaagagctccggaggcccatcatcaccatctccttccagttgctcatctccaatcctgagggcaacataacacaaatttagttggaaggataggggagaagagatacgagtgtctatagtgatttctctgtgaatacgattgaatgcaaggtattagcttataatatcatagtccgtacctgttaaggtcccaaatcataagcctcctgtcatcagccgaagatgccaacactgcctcatgattaggatcccattcaacctgaaatacctcctctctggaaataaagaaattggcatgagtaatagttgtttttccttacactcaaaaacagaccaacaggacattcaaaactaacacagtaagtcaatataaagataaaaaagacaggacactcagtggttttgaattgaaactatgcaggagaataataaagagtcgactgaggcaaacaaacatacgtgtgactactcaaaacatgcaatggctctgttatcttccgcatatcaaacagaccaacagttgtgtctgaagatgctgtggccaagatccactcattgaatggactgaaagaaagatagttcacctgagaccatccacaaaacaaaaaacaaaaatgtgaggaaaaatataaaaatttaatttttccaaaaatattgtcactactatgaaaaggtagaatccatggattatcacaatacagatttttacgtgaatttccccttctttgttaccgtgaaccccaaatcaattataagtagtacttcttgttttatctattgaaaataatcatcttacttttctgaccccttatcccatacattgtacacataaaaatgcttaatagtcaaaacaaaaaggaaaacatgacatagcaaaaatcactttgaaagttgaatcatataaatttgtaaggtatctccttttatatctttctatatgtgtaacctctttctcgtgagctttgacagtctgctggctctgatttgtgcgcaagtcccatatgatcaatttacagtcatcgccaactgacccaaataaattaccattcttcaaatgccatgagacatctccaaccacactttcgtgaccctgaagaaaaatttacaagagtcatgattaacaaatgtcacggcaactaatatccaatgttagattccctagattacctaccgtataaacatgcagtggatcaagcactttgtcttcagctacagcagacacatcccataaacatatcttacaatcgtgggaaccactcaatatgtaaccctccttattggggttccaagataacccatacccttctttgtcgtgaccccttaacctcaaatcaggatcaaagtcacccccttcgggtttcaattcctgtttggtacaatcaaacacaaccacctcagaaccactcgtcttcgcgccaataatagacggtttttgcggcataaatcgtgctttattcacctctccatcaacttgtatcttctgagttatctccacctacacaaaagaaaacatgtatattttgaaatccactgagacatttccacaaacagttgataccataccataccatgctattccttttttaataataataaagaaagaaagtagttccttccttacaattgcaaatccattacatgaaaacaaaacaatgacaacaggggaaaaaaaacgcaccttgggaataatggagttggcgtcgttaacgtcaaaaacattgtccttgatattggtcgggagaaaaacatcggcgaccaaaagaaagttggggatgccctcggaagtgtgagtcccaagaacaagtttgtgggcggcgagagatgggtcggttttgtggggtcgtggggacgaaggggaccaatgaactgtgagagatggccattcaagagggttagagatgatgagatcgtacaagaacggagagttcttcttccacacactgtactcctcctccacctgttgctgccctgcgtcttgctcgtccgccatggctgcgacttttaggagctttttctttcttcttctttccttcctttctgattttcccgccaaaattgtggcgccaaaagagttgcatacactagagagtagagagccctcttcaatatataataggtttgatcagtatatgtatatggaccttttatttattattttattattttttttaatggaagagcatggacttcaaaattgggtaacacaccacatattttgaaatggaaatcataatacaactgaaatagattttttttttgttatattcttacaaattatttttatttatatttttataattttgtattgttttaatgttattttcatattatcgcaatattatatcatatttttacaatatgaatactttttataagaagaatatctataaaaatataaaaaaaattcagaattctataaaatatgtaaattttttattattttaaaatatttttaaaataattccattttaagaacagctcatcatataattgaacttacttagcaaataaatgtggtagagaaatggagattttttatatttatatgcctatataacaaaataatcttacttataacaatagacaaaaaaaaaaaatattgcgtacactccattatagatcatttgaaatgttctaaacctttgcaaaaaaaaaaaattcgagctagtgaacgaagtaatacttgttggtggtagtgtcaatatttttaagcgattattgattttatttatttgttctgagttaatctaaatttaaagtgagtgggtgttatacaatcatatatgcatggattagtaaatgtatatatgacatcagtttctaataaagccattacgttatgttattaaagaggaagagagacagtgtggaagagaagttgaaaggagagtggaagtagaagccatggttgagcttgattttccaaaaaatctgaacgtaattgctgccatttctgggtctctcgattcggctaaacggttctccactttgactaatctcagcccaaaatccacacctttgagcttcaaaccgattactccgatctctggttatccagcgacgtcattttctagcaatctctcttgcgcttcgcgatcggaacattcaatggctagccaatcccactccggatctgttcacaacttcaatggttaagtttagaattgttatgagtgactccaatggagtcggtgaatcccgaagctccatcaccgatgacgaaggaccgaaggccaagcactgagaagatttgagttcgtcgtcagttgccatcggcggttgcataaatgaatagtggctgaagtggtagtccgcttttcatgcgtgatggtgacttggcgagaaactatcgcttaattagtaactgctttcattattattattattatttttattacttaactaaaatatcttgataaagttattttatttaatcttactatataattgtttttctattttcctaaagctttataaattaaatatttttaaaaataaattattatttatatacattatttttgttataactagtttttaaaattttattatttcaatagtataaaaaatattgtattgattttttactcattttgatttactcatattattaatttagaaatcatatccatttaatgaattattttttggacagttttactaaatttgtaatttttttttttcaaaactatattttttttaccttattttattttatttcgtacttaaaagagagtgatatagtattctaacaagttcttagtttgtcagtgtatttttgttgtgttatgtttattgtgttatttattttttaagtgtatagatatatatttagagactttaaaaattattggaagatcagtgaatatcacagataagtctttcttcttattttaattgtgatattgaaattttggtttttgagtttagttttttataagttaaatccttccctcatttatctttttttggtattttgtaggttgtttatctatacttcaaaggtggaaatttcacacattgcagaagatctaaacttattggttacttcttagtcattcaagcaggagcattagccttagtggtagtgctggattggtttcacacgtcgctcttcctcttagttatgtggagtctgattatttagctttgatttctgcttttcagaagcgctctttctttagtactgagctacgttttttagattttctgtaatgagctaggtttttcagtttttttgctagtttgctttccagttttcctaaggcatccctattcatgtctgtttcacatgaattagttgtgcatgcacttagggtggatggtgaattagcttagactgagaatttttcatcttttcttattgatttgtattaaactctagttcttgttaataagagtttaatttcaaaaaaaaaaaaatattgcatgtgttcaccctcctattgaaaaataggaaactaaaacctattaaacctaaaaagataaccgtccaaaaatttcaagcaaccactgtaaacttaaaacgatacacatcacacccctatcgaactataaataatcatctgagaacaaaaaaatcaaaagaaaccttcaattgttccgagttctgccatcaaaactctcaaaaatgtcgatcaaagttgttgagataattcaccattgaagctattcaaagcttcgatcatcaaaattcaaaacaaacactatcgttgcttgaagaaaaaaaaatcttctatcagagaacattactttggatcgttccaagctccaccattgatgttgtccaaaattgtgacttgaaattactaagccaaatcaccattgaagttactcaagctactcaaaccatcgatcatgagattcagaataaactcaatcgctcctcacaaagaaaaaaaaaactttcgaatagagaacaaaaagatttcctatatttccttcgatcgtttgaagtttcaccaatcaagctctccaaaataatcgattgaagctcctgatacaattcaccattcaatctactcaaaaacattcatcattagattaaagatctctaaaataattgattaaagttcctgatacaattcaccattcaatctactcttaaacattcatcattcgattaatcacagaattctgaaagaaaaaaaaaaactcaccattaaagttgtgtgatatcacctttaagctctatacaagttttatccgtgtctctcgaaggtagacacatggcataaccagaaggtaatcaccatctaaaactgggcctacgccttcccgcttgtggaagcccaagccaaacttggaatgggcccaagcccaatgaagactaagagcttctcctctgagatgtaacattctttcaagactcaaaaaccgccctagtcttccgggacatggaaggaacaaaggccttcgaatgaagataagggtacacctggaggcagaccacacgagatgctcctggaagcctaccacatgatgactctcaaaatcctaccacggaccaggagccagatgtctactgcagggtgagtaccgaatgtgtaccgccaaacaagaggtggatgtctcccctaagatggcgtgtccaccattctgacacgtgatcagatattgtctcccgtgtcatagcatagtagtgcgcgcatcaccatacaccccttttgtttgatggctcccctgaaatctttgtctgtcaggcgtgatctccgtgcaacacatgtcctgcaccaaacgagcttctcatcagtacgtaactatcgccccatgagctagatatccttagcgagcctcgtagtcatgtatttgtatattttacctcattagtgggttggcttttacaataaaacccgaatgggtcgcgtgtatgctcgaattcgatataaaccctactatcccttcatgcaaaggggatggaatttcagtagaagctctactattttactctaagctttcttcttcaccaaacgaaacctagagaaactaccttatagccagggttagggttccttattgtgaaactcatttgtaatacatttcaaagtctaaaagaccaatatgtttaataattttagtatgcaagtatacacaatcgaatcaagtaataaaatgatgaaacagagtatcgtttctacgagaattgattataaattactaattaattaattctttgcttctattcgattaataattttttttaataaagagagattattatgatccccaactatcctttattttgcttcctaatgtaattacccaatttctcttcttcttgttcaattgacaagatgaattaagtagtctataatctggttaagagttacaaacccaatctatgtgaaaactctatattcctatggtaaagtttaatcacaaaaaaaaagtattaagcgaagcaactcataaaatcatacgaataatcatagcatattctaattttacttttcaaaattttgatttgaatgcatagataacaattatagatggccagtcaataattacaaaattaaaatagattgtatggaattgaattaattaagagaaaaagaagcaattgaataactacattaatcgataaaataaatttaaatggttcacataataattcttaaaagaaaattaactactagaagtcattctaaaataatagaaattcaattaaaaacataaaagataaagataaaggagatagaacactgtttggagtcctccaatggtatcttctgctcttagccttccttttatgcttcaaattggtttatatttttcaatggtatcaaaacttaaccattagccccctttaaatgctgaaaaaattcgagttgcccttttttcaccaaagtcgcagcattgctttaaaagccacgtctttccaagcgattttcctagtttccattttctctgcagattcttggtttcccatttttttcttcttcagaaaacaagcaatgtcgcggccttccttgctaagtcgcaaccttgatgagcatattcctctttttttgttcatttttcattttatttttagaaagtgcccactcttgactttagaccatgaatttttgagttgaaaatgtaaactttgacccatttgaggctataagaaacccaactaagcttctagaaggttcctttctccttaaaattactcaatttttgtctcaaaaggcttgaagaacactaaaattacaaataacagagatatccaaatatttctcttgaaaaacataacaaaaacaaaaccaaacataaaactaaaaagtaaagtaataaaaatactaaacacataataaaattgactctgaaaatgcataaaaataaatctgacaaatttccctaaacttaacctttactcgccctcgtatgaagaccaagttaaactaacgaaaaaaacaacaacgaacacacaaagtaagccacaattgctatctataatacattgcctttcccatgaaatctcaattgtaatattttagccaaattttcagctcaagactagagtatggtgttatcaactatcaaataccgctgtcattagaggagaattgtctggatcctccacaaatgccttacccttcctttagatgtaggcaaggggcgagtaggtcccttaggagcctggactctagacccgatctagagagaagcatcactaactaaacctcaactaaccaagcccaggaggaggaccatctccttccgctccagattctgtgcaatgcgataaaaaggtacctcatcattggagtcaagagcctgcccatcaccaaggtagggcctatctacagctgatgctcctacaactctaggaacaggaggatacaagccatatttctggaagttagcctcactggtcaacctaaatatgtttctagtctcttttgagagagataagttgtggtttgccctatcccttatttgcaatgtggggatggagcacttgaagaatggaaccctttggaatcaccgatgtcagacccccttgacatcccaagcaatgaagtatttttttgcatactcattggcctttgacataggtgaactgtgggtatcacctaaccactagtggccaacttggctaaagtataaatatccaaaccgatgttgctggaaaacagaccccaaatcaaagtaatatatgatctcataaggagtaggctgaggccagcctagctccttacacaaaacaaacatcactgacatgtacttgatacctttcggggtgatttgcgttggacatatcttgaaataagcagcaacatcacggaagtatgagtggcaaggtaaaatagctccatgttcaatgtggtactcaaaccacgccatccagttgagggccaatctatgtgctagttgatcccataggtgcatcttgtaatgaatgtcacctactggtccattggcctataacctctcaaatatgtcaacggagataggaaatataggggagatccacctgcctccctgagatttttcatctagtatctcaggcataaacgattgttccatgacatgatccagaccaaggtctgaaggcttaccaagcttgtagtaggtgaccattggtgtcatagtgagccaagggacaattttggaggacaaaacaagtcatgtacctcttcctcctcaccggagcgacctcttcaagattaaattcggtatcaggactctcagccccttggtcaatctcttgctcaacattagcacggggctgagtagtctcctctgccatcctaacttggccccttgtggcaaccctggccacatgaggatcatatggaggtgccttacgaagggtgtgtttcgttctggtcataaatacgaagtaaataaaggacctatgcgactgtcacctaccttattcaacacccagtgcgacctgcatggaggaaataaggggaggtgagcaacctgtcaaagctacaaacacattcaagtcagcagtacccaaatgtaacttcctggcacaacacaatgtacaaggccaatcaacgaccaagtaccgttttaagtacacttaatgagacatatattaagtcctaagttgtatagttgactataattgactaactgcctagccttatagagagttttcaagagaaaccacgcataaggctatagttgtacatgcctctaaggctatcacaagaccttagtcgaggtcaaacgagggaaaaaaattggctgcccaattagagccttggccttggccggctaaggttttaggatttagtaactggccaaaccccaagacctagcctagtggccaaccaagaaccctagttctaggcataggccg

SEQ ID NO: 296185 - DNA, 3450 bp, Cannabis indica
aaaaaaaaaagaaaagaaacaacaaacaaaaataagcgataatcatatatatattaatttcaaaccgtaaagattcaaaagctagacaaacgcatatgcataatcatacataatgtgtgtatatatatacaatatattcgtaggaactgaagtcaaaatgttacggtacaatcttattcaaaaaaaaataatcaaaaccgtaatttttaaaattcccaaatttcatgaacaatgaaatcatcagatcttcaattaattcagcaaaggtggctctgataccacttgttaggatttgtaaaacacttaagaaatataaatatcacagatttaaatatattcctaaaagtgctttaatatagaaatcctaaatcataaatttatagaaccttttccaaattaaagaagaagaagatgataaaagattagcggaaacactaacctgaagtaattattggagattgcagagaaggttttgatcttccaagaatatactatttcttaggtattttctctaatggggaatgagagaatacaaaaaccctagtatttcttgtgaaccactactgatttatagactatcttagaatgaattttgggtatttataatttgacccctcaataaattaagttatggtatctagacattattttcatgacaatttaatatcttttgatacccataacataattagacacttaattttgtatcaaattttataatatcatatacattatacacatgtgttgaccagaaaattttaatataacaatggacaatgggataagttacattgagatggaaactctcccccctttgttatagccgcatttgcagctttttcctgtagactttgtggccatcttggttattcctcgatatggtgttgagaagcctatggggcacatgagttattttaacagtttccgccttttagcgtctcttctagtggaatagtgttaaattctagcgagatttgcatatagtccgtgatttgtttttgactcttggtcattttcccctgccgtgttacctctgctattaattgcctgcctctgcgcctttctcacttttctattttaccccttgaaacaactgtgcagtttgatcttattgtttaatattttaactgaattgccctcacccacgctcgaggcaattttgactagcgagttatttgcatgtttcaatgaatcaaccctggttgtatcatatctcttgagatttctgtctttttttgggtaattgaagcatctcgactgattattattagatgaaaaatatcaaacccttgtgttgagttcattttgtttaagcatttgatcctgataatggtggacaccctgcacttttagaaattgagaggacacaaggtagagtcataattggcaacatgccggcaagtcaaatgttattgatgtgacggctgtcaatagatgctagatgagaaaagtaatctaaattttgtgagtagaatttcttcgaagaaaataatttccacccgcttgagacgttgctttttgggccattgcctaagaaaagcaattgaggcgaagttgctgcgtttagaaattattctgtcattgaaatattatttttcttttaaggcaaattatcttgtgcctttgtgttttcatcatgatgtatgggaatctcgtgcatttgtgtatgaatgtagtgaaatgtgcttggtggccagcagtgaatatgtgaattgtactgattgaaaccttgatagagacatgtcgttgatgctatgatattatctttcatgtaaaatttttgtattaattattagtggtttgttcattcatcattacattcataataaataaataataataaataaataaatcttgtcttgcttgcatcttaacattggaatcaattcttgcgtttattgcactaatcacagtatctatgaaagtctgttttgcattcagtgcccgatgcaaatgcgtgatatcgatgtctgcgaaccatggcatagatatatacatatgaatatttagatatgagaaatgttaaaaggcacatctagtgcgtggcactgtccaaataatcatatccctatttggtataatttttttttcaatgaaaatcccctatttggtataattaaatatttagtcttgtataatttaataaaattattattgcttactagctaattataagttgccacttttaaatgttactatatatactattggtgcccaattaaatagtaatgctcatatagatatatatttataatgatatacttttggcatttgctttgagtcattactttctcctgatctgaaagaaaagatatggcaaaaatgaaacaccctaaataatcaaaaacacgtaatttctttcgttaggctcacatttctgcttcatcgactaaaatttagacacgacagaggaattagatttttatttttttttgctagaacgataggaaattagaatttccaagcatgattagacagacaatatactctagggagtatggaaattgtagtagcttttcaatgcactactaccaaacgtacaattgtcacatgcgtatatctgtgaatttaagtctttaattataaagaaaagatgggtctcactgcagcagacgataagttgttctgagaccaaggcaacttggcatcactgctttttcaggaatggaaatggcattgtttgagcgatagaatctggggaacttgttcgaatctctggagggaatataatctgtgtttctcttattattcttattattaaatatatattttgggggcactaatacgattattatttctctttctgaaattcgagcatgtcacgtcagtgccaatctttttttataattattttctgatgccattgtgaagaagaaaaaattctgtctgttctccaccatcacaacaacttggttcatggaaaactatccatttttttctttcgaaaggagatacaggtgcatgcatcaactcttgtgatgctataactcgtcaattccctattactactactactacatctccaagctcgtggatgtacattttgtgaacctcccacacaagatgctatattcgaaaaggtgggttcttcaattatcgttttaattttatgtatattttttaattcgatgaattttctgtccattgagtgtgtttctttgacacattgctctcatctacagaaacacatgagctttcagacacatgaaaattgtcagcggtggaatttttgggataagaagaaaaagaagggaagattttatactaaaaacaaaacaaaattaaattttcaatagaataattggtaagagatatattttaattaaaggaagtagtgaatctgttctgattgtttcagcttgtaagttgtaatggtggggctggcttcttctgtgtatatatatatatatatatatatatatacacattattatttttttttaggttctt

SEQ ID NO: 296186 - DNA, 2102 bp, Cannabis indica
ttttatttttattatttattccatgtgtgcctcaggacaggaaataagtaaataaaaacagaagaagctttcacataaatagtaagtctttttgtaattctttcgttgtattgtaaaaagtgaccaagagtctagactctcaaatcacttgggggtagcatgtattaagtatctctttaaaattacaaaatatgaattattaataagtatgggagtagaaagcatcgcctgaaactgaagcctcaaggaatcagaagtaagttgctatcttacaatatttaaagttaataaattcattaagtcaatccatttagactgaacaatcacaaggaagttcaagcttcaaaaatagttaagccaaggttaattaactacaaaaaagttcaagcttcgagaaaaaaattaaaaaccaagaagaccaaacttttggaaccagaacctcagggatccagaagtaagtgatgtttgttaaattttgagaaacataagttgtcaaaattctaaggtccaggccattggaacaaggatcccaagaaattcaaaactaaacaatttattaaagaattaaaagtctaagtacaaaagttgaaatcctatggcccatgccgttaaaattaaaacctcaaggaattcaaaactagactgacttagcaaaaggaaattcatttaagctatgatatacttaatgagataaaaagtagaatgataaaatcagtctaagcctccagaaggttgaatatttacatacaaaaaaaggccctcgctgtaagagcacaataaattatttttgcgaatgtaaaaaagaggaacctagtccaccaaaaataaagttcaaaataaacaagagaatgattctactattttttctttggagagttgatctgaccttgcaatttccaagattttcttgaggaattcatctttctcttccctaataatatcctaactttatcaaccaattgcaaagttgacggagagtgactattagggaatgtgaaagttcttctcaatctctgccttggtttcgaacagctcctcctccacctatttcttctccccttctagtttctttagctctgcctttgcattttcgtccaagtttttaagatcgcgctttgcctgtataagcttcgtagagaagttgcctccactaccgccagtatgttcttaactttaatcttggcaccctctgcttgagattgaagagtggtctgatgcaaaacactcttttctgggttatgaactttgatgatgttctcattagttactccaactcttaatgtttatccttggcatctttcacttgagactctagcgtgttaaacctagactgagatgttgtatatttctccttgtaatcatctccacgtttttgctccttcctagcctcttccttttaacttgccacaacattattgagggacgccttgaccttttcttggactagaggttttaccaaatcattagcctgagatttgtcttcgtagccaaggttgtccttcttctggtcagacatggctcgctccctcctaagattctccagctcaagagacatcttggataccaccatggagcacctcttcgtcaacaagttcacctagaagaatcaacaacgattaaaataaaaacacaagttttaaaaaaaaacggactatcaagtgaggttaaagaaacttattccggctggttgatgtttaagacaatcaacgataaaggtcaaatcctcattagtcacagtagcccatttctctgtgccaagtatgcaatatgtagaagcggtttgatctagaaggtcagatgaagagggcattagttcactgccaaccttagtgtaacaccaaactattataggcgtgttagcgtgattcttaacatactttgcagttggtagctaatcaacgaggtaattggaaattgtgaataattaaaatttctcttatttaattaaaacatggcatattatacttataaaattccaggatcccgtttacaaaatacagttacaaaagtaatttactattcatttacaaaatatttgtcgcctagcgactaaacagcaaaaaaaaccctgatgtcctgaggatcgtacgctccaggtctaa

SEQ ID NO: 296187 - DNA, 5548 bp, Cannabis indica
agtgaaaattcataaataagacatagtataattttagaattataattgattgattaaaaccaattaacttagtctacaagcagtattatctaatttagtgaggggaccatggacctatataatcgagtttccaataagtagttaaggaatttactaagtaaattccttaacttattaattcctcctttcactactatatatttggaattgcactctcaattatatagaacactccacatgtacatagatatagatgtgttatgattgtccattattacaatcttaatagtttacaatcttaatagtcaaagatcctctatagatgatctacactgaatagggtcaaatttactgttctaccattcaatgtatttcatcctgaaaatacttagctacctataaatgatatttctataaactaatataattactaaaatgagacctcaatcatttatctcagccaagctcaaaaaaaattatcgtgtgacctctaaatacttatagaagctatggatttcatatctatgattagcactcccacttaattgaactaccatgtccttaatctgtatgtcacgagaagatccatatataagctaatccatggaacaacatcaataggtaacataaaagtatttgcaaataacttcctgtttctgttatgccagattgcccaaagaatacacagcaatcaaacaagatcatctttattcaatatcgtgaaaccaataactaaaaattcctttacatcttgatgcctattagagagataaaagttccttaaagtagaggttttccaaactttagctacactgtaacaatctagcagggcatgagtaactgtttcattgggacaattacaaaaagaaccggaaagattgggaagagtttttttcaaaaatagattgagggcaacagggaggatgtggtgataagccctctaggagaaaactttgactttcggagggagattcagggtccgaagggtagtccaccattttttgatgagggatgagttagaggaaggaggtagggaagcaccattaactaagtggtaagcggtttcaacagagaaaagacctgagggatgctgattccaaataaaaaatcatccttatttgagccaccaatcgagacctaaagaatggaagaaacactattggtgtcaaagtaaaagtcgagtttggtacggttccaatgaccatcctggttgatgaagaaactgactttatcagagggaggctgaacaccaggtttgtaccgaaggtatctgacccgtggaatccaataatcatctaaggttgagatagaattcacatcacccaccttccacaacaaacccctcctaagaaaatccctaccccaaataagactaaaccaagtaaaagagggggaatgaccatgactagccttaaggaaactgttatgtagaaaatatttggctttaagaatagcttcaagcaaggagttaggattagaatggacatgacaagcctatttagcaagcatggcttgattgtgatgaactagggatctaaaacctaacccaccaaagaatttagatgtgcaaaggtgatgccaagctttccaatggattttagatcctttccccatcgaaccccaccagaattgggccattaattttttaattttgtgacagatggatataggaagctttaaacacgacataacatacaaagggatggcctggataacatcttttaaaagcacctccttacctgctctggaaaataatttaccattctaaacattaagatgggtactaacacgctgatgaataaaatcaaagctagcttttttagaacggccaaaacattgagggacccccagatatttgttgatgaacggcttagaatccatgcccaaagtttcaaagaaatatatggagatagaagggtgcgtgttgggagaaaacaggatggaagacttcccatagttgatagtttggtcagaagcttgattatagagagtgagggcttccgtaatggcattggaggatgaaatagaagcaatggtgaagagaagagtatcatcagcaaacaacaaatgggaaataacaggtgtagttcgagcaatagagatgcctctaaagagaactaaccattcctggtgcctaagagcagcagtgaggccctcagaacaaagtaaagaaaggtaggggaaagagagtcaccttgcctaatgccacgagtagggtgcattttgtcaataatatggccattaatgttaaaatgaatggagacagaggatataccttgttgtataaggctgacaaacttcctaggaaagtggaaatgatgaagaatggcagtgagaaagtcccactcgggacgatctctttttccatatcaagcttaaggccaacccaccccaccgtaccctgttttctatggttgatagcatgaacaatttcctgagatataaagatattatcaaaaatgatatgctcagagagaaaggccccctgattgggtgaaatagtgttgccaagcacacctttaagcctattagcaatggtcttggccacaattttataaagggtagaacatagggtaataggcctaaaatatttaaggaagaggcatgcgaccttttgggaataagaacaatgatggtgctattgatggatgaaagggcagcattaccattgaggatatcaaggatattaagagtaagttcctgaccaatgacatgccatttcttttggtaaaagaacggattgagaccgtcgagaccaggggctttatctcctgagaattggaagagagcttgttgaacctcagttttagagtagggagcatcaaggaagctaatctgcttagtactcaaagaattatcaatggcagaaagaaactggcgagtagcatccctattagaagtttgagttttgaaaagattggtgaaattactacaaacctcatggaaaatgttcgaggaagaataaacttttcacccatcatcacatttaagacttctaatgtaatttccttttttcctagaagaagctttgctatggaagtatctagtgtttttgtctccagcttgaagccaatggactttggatctttgcttccagaaaacttcttgtttataaagaaggccatccaattgagattggagcctagaaacttccctaatgctatcattagaaagaggcagattggaattaatttcattgatggacttttcaagggcattaatcctataagagaggctattgcatgttgagttccactcttgaatagctttgatgcaagattgttgtttcgagaggaattgatcatgatagttagcactagaaacaggcttagcctagatccaagctcccttaacactctcaaaaaaggatgcatcagtgagcagttttcaaacataaatattttgacccgaggcacatgcatactctcaccatcaaggaaaattttaagaactctatgatcagagccatagaagccaaggtgataaagggtatcattaggatggagacattgccagcaattgctagcaactccccaatctaaccactcagataaggagtcatgtctccaagtaaagcattaccaatagggtgcaaaggagtaagagagaacttatggacaaagttctgaaaatgtaccatagcataaggaggaggaggactattgcaagatatatcattaaaagagagatagtcattaaagtcttcaaaaataagccaagggagagagggagcattataataaatcctatcaagcagagtccaagtatgaatcttatcattaatatagggagagtcgtagaaacaagaaagatgagtagttatattatcattaaaatttacaatacagtcaatatggttagaggagaaatttaaaatatttacattaacatcagagttccaaaataacaaaagacctcctcttaaacccttcctaggcacttcaaataataatcaaaagaaagccttaacctaagattatcaccatggccagcagcaagtttagactccatcacaaaaagaaaactaggcctattcttcttgacacaaagggagaggttacagaatgctcgaggactccccaaacctcgagcattccagcacaaaatacttatttttctgggtggggttgctcaacaacacccgcctgttcaagagtggagttgatagcagaagaaacctcagtaatagtaggaccacccctagccctcttgagaatgttcgtaagagaatccccaataacaacagactgaggagtaaaagcagctctcttggagccagcaataactttacccttagatttctcagagatccgatgaacatggtcaacatagggaacgacattactattctccttgtgaatagttactgcaataaaagaaacagtagaagctggcatatcacagaggacactagcaggaacttcaccacaatagccagaagcattgaagcttagattaggagcattctgcctttcaacaggtgggataagactttgattattaccaatggaaccaacatcagcaaggctattaatcggtgcagaaatagaggacccagcaccattgtcctcagtagtgagaaattgaatatcgacattagctagggattgatcaatatgaaggtgaggaaggccaagctcatcataagggatggagttagtaagatcaaatggatttcttttgaagttggattggcaagggctttgagtggaattttataagggagaggaggagggaaagcatggtcatcacacttttgaagataagtcatacatttggttaatgtgtgatcaaacatgccacagtggaagcaaatattgggaaggttttcatatttaaagttaagccatttttcacggtgggtgtttttgaaatcaacaaggatacccctggtaatgggtttggacacatctataaggacacaaactctaagaaagaaactcgaaacctagaagatggtagttttatccacttttaagaagtcaccaacctcatcccctattattttggaaagtttgaaagatttcatattgaatgggattgaatgaacttaaatcaaaaagggagaataatgaagttggttgggcaggagggtgtcaaggccttgggggttagtacatgtaaccacgctatggtcaaagtgccacaactatccctcaaggacccttcgaatgtccccttcataagcaaactccaccataaacatcccagactcatactcagagaaaataaggggggcacgagtgatccaggcatttttcatggcatcttaaaccattcaggtttaatggttcgtggggttaagacacggaatacaaggcaaaaggatctttttggttggttatccccccatcatccgcaataagatcatggacaattgcttcttttttagtaaggttgagaatttgggaaatattaagggcaagggaatccataatagtgactaagtattgacaacaactattaacgcagatttttgttaactaaatttgaacctaaccgtgacaatctcacacagaaaaaataaaagttataaaataaaaaagta

SEQ ID NO: 296188 - DNA, 3235 bp, Cannabis indica
aaaaatataattttttttttataaagaatagtatcttgtgtaattattcctaaataaattatagagaaaaattaataatgtcaaactaattatctaaacatcatactaattattcgtcaaaaatactttacctaaatatgttgttcatttatcttaaaagaataggcagctagtccatacacattgaattaatacacatgtctccttttgatccattcaaaagaaacacacatgtcaccttttgataagtgatatattttagcaagtttattgtctaaatttcaagagtttccctaattcatcttcaaaaatgctttacctaaatatgttgttaatctctttcaataatatgtacaaaaaatttcctaaaaagaaagaattcaatccactttaattggacatatattacattttaaatttgtaatttctaatatttaaaaagttagtatcaatttatacatgcattaatctctatcgattaattagacatattttatacatattaaacaaggtaattttacaaaaatttattaaatttcctaaaaagaaagaattcaatccaatttaattggacatatattacattttaaatttgtaatttctaatattcaaaaagttagtatcattttatacatgcattaatctctatcgattaattagacatattttatacatattaaacaaggtaattttacaaaaatttattaaataactcgtattattatttcaaaaataaagtagcaatttcattaaaataaaatgtcatccaataataaagataaattagcgaaaacattcctttcattataagaacaatcaactttaaaataagcagttaatactaatacataaattattttatttgtagaacgttttaaagaattatttttcatcttaaaattaacaatttacagttatttatattattcctatataaagacactatacataaagaactttaacaaatataaaattaaaagtcgaaattgaagttgaaattcaattaaaaatagtttgaataaagaaacaaaattttaacattaatcacatacattattattatttcaaaaataaagtagtattaaaagaaaatatcatccaataagaaagataaactaacggaaaaattcattctattataagaacaatcaactttaaaataaacaattattactaatacataaattattttatttgtataacgttttacagaatttaaagaattattcttcatctcaaaaaataacaatttaaagttattaatcacataaaaatactgtacgtcaacaaatataaaattaaaagtcgaaattgaagttgaaattcaattaaaaatagtttgaataaagaaacaaaatcttagcattaatcacatacattattattatttcaaaaataaagtagcaagtagcaacttcattaaaccaaaatatcatccaataataaaaataaactaacggagcattccttctatcataagcacaatcaactttaaaataaacagttattactaatacataaattatcttgtttgtagaacgttttacagaatttgaagaattattcttcatctcaaaaaataacaatttacagttatttatattatttctatataaagacactatacgtatagagttttaacaaatataaaattaaaagtcgaaattgagattgaagttcaactaaaaataatttgaataaagaaacaaaatcttagcattaatcacatacattttgttacttgattatcattatgcatcttatcttatattttttatcaaagggttttacacttttttttattccatgctttaaccaattattgatttgggtcgtatattttgaaaaattggatccggtattttctaagctactaaaattagaactttaaattcaaaatatatttaatatgactacaatacgattgtaatacgggtgatatttatttagccctatatttgtcttctttttatttatcttttgttataaaccctatatttgtctattacacatttagaactcacattttcaaaacttatatatatttctaataattgaaaagatatatatttttttaattttataatctgcaaatgttatttttgttttataagaaatacaaatattttaatcatatataaaaatatttctactaattaaatctggtttttgagccttaattttaaccttttgttttaaaaccataattgatcaaaatatagagtctcaattgagcatgttggagcaatataaattaccaccaatgtaatattatctccattctacaataaaaaaaaaagtatttgaaaataaaaacataatacttccataatgttcattgcccaaaaaaaaaaaatcataattccataataatgttttttttagggaaacaaatttccattctcttttacaaaaacacaattccaatctgatcaatgatttataaaataattataaatttataaggtagggtgaatcaaattattgaaatgaaatatgaatagagattctgtttttaatctacaaaaaatgcttaacataaattggagtattatttatattgcataaacaaatacacaattacttatgtggccttagccttacgtatcaacaatcacaaacatgatccattagggtcgcacgagacaagtttataaaatcaaatgagataatttggacttcttctgacgagaaattgaaaaaacatccgagtttttacaactcgactatgagagaaaatgaactgacttggtccgaaactctagcgtggcaataaggtaattatcttcatcattataaaaaaaatatatttaataattaaattaaaataccagaaaaggcactttccacatctctatctctctagccaatgtttccaaatcaaagtcaaatacagctacaaaaaaaagtagataaaaggaaggaaagaaaacaatagttattattatttttattaataattaaaaaaaaaatccaataaatttattttcattttcgtaaaatgtacatttttttaaaataatattttatttattttaaaacttactctttattttaagcactggtttttgttttgtgaaactaaattctttgtggcttttcgtagcacctggtatttgtagagacccgggcagaggagagagaaagagaaacaaaggaagtaagaaatccccacaattttttttggttttggttttccagttttttcttttcctttctcaggaaattttgggct

SEQ ID NO: 296189 - DNA, 2027 bp, Cannabis indica
ccgtcttatgaacgttcaggactcagtatcgtgtaggacacgacagttagggttatggtcaggggtatgggcgtcggatcataactcaggatttatgtatgtatatgattatgctcttcttattgagtctgtcgactcacagtgctatgtttatgtgtaggtaagggcaaggctaaggctaaagaaccgtgagagcgaaccggtgaagattgtacatgtcggggcggttaggcctggagcgtatgatcctcgggacagcaaggctttttgtaattagtcgctaggcgacaagtattttgtttagtcagtaaacttttgtaaaatgttttgtaatcgggatcccgagtatatttgtataaatattttatgagtttaattaaaaagaaatttagtttaattaatcacgatttccataaacctcgttgattagcaacgagctggacagtatgtttaaaaatcacgtaatacgtctatgctagttaggctgttacatgtcaaaagctataagactatagatatgagttcataagtaacttcaggattaagatcaagtctcatatgatcatcatgtgatgaatgatgaatttttgtacattaacaaagattattagaagctctagtctttcattgtgtccctagtcctatacgatcatgtattgtatacgacaccactatcctattgtgccaactacacttaaaaccctaaatagattgttttgtccaagatagcagatacgtccaagaagtcacttattaaactaacagtctttgttttacttttagaatgtccaatcttctttttggtgaaaagtgctcgcctaattcatgtaggcattactcggtgaagtgaaattggtgcccaagttgcaacgtcaacctaggcgcccatagtttgagataggctctttcgggatgtaattgatgaaaactcatgtcctaacattgttccatgttggatttaaggaatcaaggtctaaagaagttcccaaaaacctaaatttcagccattgtgttgcccatgtcagttatatgtcaagatgggagcccagtagggtctcagagatcccgtgtgaagtttcttctagagttatctccacagtctaaaacttggatgagagatgtctcttatgtatcctagtacaatggctaagaaaattgtaagtaggaagttattaggatccgaaactgatgcgagtcggcacacaaggtgtcaacctgggcacccagtacttatataggacccatgttaagccctaggatgtctagctcacatccctagtctcacggttcattgttttagggtaattgccacttttttgcttgaacttgtcaaaggataacacctagaaatgactttgatggaaattagtgcctacctgggcaccccttaattaatgttaacgcactggaatagttcctagtacataagttgaccaccttaatctcgagaggtaggggcccagagttgtttttcttcttgccacatgtcaaaaataatgcacaaatcatcaggtcaaattttggggtaaacaaaccaacttgtagacaatttttagcaggaatagatacagaaaatgtaaccagtcttgtcataacatctctagatcaagttgttagtattaaattttattctgatgaaaaatcattttgcgtactattttgtgtcattttagaaaatacaggttcaatttgttatttaataaaataaaaagtccaataattaattttatgaaatatagagttcaaaatagtattcaccctgattatatctattatctaaatttatataatctctatatatgtattttatctcattttatcatagttttttttttttgaaagtattatcatagttttttcgtgtttctacatctgtagcaagacgcaacactatttttctttgggagcatgataaacttaaaatatatactctttctttcttttcggagaataaagtaataattaggtgatatttggtaacactttattttttaaatttttaatcactaaaattaaagtaaattttt

SEQ ID NO: 296190 - DNA, 1633 bp, Cannabis indica
tgtaccacggaatacattccgtgaaagtacatcacgggacaaaatcatatctctatatatgtatattgatattgatatttattaaaaaatgacattttctcttttaaaaatgtttaggaacgggaatctgatataaacataagaatttaatttaatttaatgattattgtccaaatgattcgaagtcctttcgttggtgtgacgagttagatacccagggacagaaaacccgctcaagggaaaattgagctttgagctcggcagccatgggagatggcggcaacagaggtctcgtcagctctggaaattccaaccacaatggtggaaacagtaatagcagcaacaagcctgagtggttgcttcagtacgatttgattgggaagatcggagagggaacttatggcctggtttttcttgcccgtaccaagactcctagcaatcgcggaaaatccatcgccattaaaaaattcaagcagtccaaagacggggatggagtttcgcccaccgccattcgagaaattatggtcttggctcttcatttcttaccgaatcatctacatacttgttttcattagggtttggttatctttttttatttcgttcttcgtttcatggaagcggagcagatggttagggttttggttctgaaataatcacaaagaattttaattgtacagttattgcgggagattactcatgagaatgtcgtaaagctggtgaatgttcatatcaaccatactgatatgtctctttatctggcttttgattatgctgagcatgacctctatgtgagttgtggtatccattacttttctttattgcattaaactaggggaagtttttaccttttgctatttatttgttagtattactttttaaatttttatatttagttgaagagcgagcttctattgcagcttcatattcaaatccataaatttgcaggaaatcattagacaccatcgcgacaaggttaatcatgctattaatcagtacactgtaaagtcattgctctggcaactgcttaatggattaaattatcttcacaggtatgttttggttagtggcaaacaggtttaatttaatttaattgtaatgttcttgatctttcatcattttatgtattggaactgttgctgcagtaattggatcattcatcgtgatctgaagccttctaatatcttggtacgctacgctctttaagaagatttttcctagtcttttgtgcaaggaaaaatatgctttcactatgagatgcgtttcctacatggagtatcagttatgctagtgtgttttcacctatgtaaattgctgttgagttttacatgcttttgtgatcaggttatgggtgacggcgaggagcagggagttgttaagattgctgattttggacttgcgagagtatatcaagctccattgaagccattatctgaaaatggggtaagttttgtacaagttttctgcttgtaatacttgtgctgtttgtattaatgtcaattttctgttagtgaaagctaatgtccatttcaacatctattgtggaaaaatgaacataaaaatgtcatttactgtcctttttagataatcttattaatgggaaatcaaatatataaatttttctttgttgttattg

SEQ ID NO: 296191 - DNA, 4980 bp, Cannabis indica
tacgtatcaaaattccatagaaaaaaaatcctaagtaggctataaattaaaaaggtgtgaatctttgaataaataataataacttttaagaacggacatccttgatattcaagttttgtagttacaatacaattcctatttatgttaattatgtgggctaccattagtcttttatttcataaaaatagtaaccaataatgtaatatcttaattgggttatgccaattattaatttcaatcacaaaagaaaaacaaatagtaatttcttccaatccaaatcataaataatcttcccatccatccaaatcaaatatcttccaataaaagcatatattattgtttagggttctaaataaatctacaataagcctacgagtactttagaataatatagtcaacattttgtacgttatcggttacaatctttattatgagattctttcatacccacatataatactcttgattaaagtgatttgatgttcataaacgttgggcatctttacaatgtgtatctctaaattggcataatttaagggttttaatttttattatttcttttttataatatgtttattgtagttattataataaatattcattaagtttttgagaaattttaaatagttatcattgcaaataaaataatttaaaataattatttcatgtgtatatatattagattaatattagatgtaatgcacgtatacataattaacgatcaaatcaaagattgttttatattttcttttaactaccaaattatcaataacatccgttgtcgtccagcggttaggatatctggctttcacccaggagacccgggttcgattcccggcaacggaacttttgtcctttttcaaaattataattattattgcgtaaatagtataccataccaatcaatcagagttcgacacgtgatggactcgtaagaaagataggctgcattgtcccatcaaattaaatagctgctctcgacctcgtatcaaatcaaaaaattaaaatgaaatcgacgccgtctgtgggaatcgaacccacgaccacgtggttaaaagccacgcgctctaccggctgagctaagacggcttggtgattgtatcacttaaaacatatattattaatcattgtaaatgttatttattttaatattttcatcaatatcatctcttctctttcacgctatacacctttgaaagtccattaaatcataatttaggttaatatagcagatttgtttaaatggtaaacctttgtgtgtgaaataaaaccaaattcaactattgaagaatcaactcatcaagtagaagctaatgctgtagtgggtggtcttattaaattatatttgtttcaaaaacatttccttttcctattggacgcatagagagtataaattgacttagcatatcttgtaatttacattttctatattcatacagtaataaagtctactctgattaaataaaatattacgagaagaactatatatcggtaatgaagacaacgtactgcataattattccttccagaatctcaagagtttcaatttaattacgttagaatttaagtacttagattgtatttgcagcaaaggggggttttccttaaatgacacgtggcaggatggtggatctactatacctaaaacttggtcgttactcgttagttaactttcatttcatggccagattcaaacttgggttatgttgacataacatccaaaatagacactaattattcttctggagtttagctgttgaattttgatgtaaaattgtaatgaaagacacttgaattaagttaaattctatcgttttacagagttcctataagccaatgtttatggacagtgtagaaaatttataaacaattgagacaaaattaaattaaactcgaaaccgaaaccaaaactacctcctcctcttctcttggatttgaacaaggtggggagggagcgattcgttagtcagttttcgttaaatgagcagctagtagtttcgcaacggtaaagccgacaaaagagtcaacatcaaagagttctttcagcttttgatcacttataattctcctcttgtcagatggatccttcatgagcaagcaaaaatatagtttgaggtgacttttacaggtaaaattagaacgcataaagtaaaggtatggagtccaaaaatgcattaggtcttaatagaaacttccttacatgcaatcaaaaggggctagtagtttctagttatgagctttaatcatatgattaattcgatccatacctgaagattgttttgtttaatgtaaccccacattctctttattacttcagcacgtgataaaacactttctcctgtaccaagaaaatttaccagagcatctgaaagttgaagtggagcattaaaacctgaggttccacccttctgtcttttttccttaggttttgtttcatccgactctgaaaatgaagttaaagactggattaacaaaataatgtacacaaaaatataaaagagtagcttatgctaaataaaagtaaaaactagcatatgctaattgatcaacacttctatagtcctatttatgtcaagcagtgagtataataaacaagttaattgtaattattttctttctaaagagtgcacaaatttcggggttcaagtagacatgatgttaagaaagattgccaatgaaataactaatttaaccaaacaaaaagaaatcctatcaacggggtgaggtaagagattcatcccaaaaggatcaggatagatgtgtagaattaaaacatctcaggtttgttccaaaagtttaatttaaatcacttgaaagaacagccttgtagtctaaccttctttctcttgctttcgtttcttttccgactctcctgaatggtttggattcactacacaagagaaaaaagccaaaaaaaaaaagttaaaagatttaacacaacgtgtcttaacaatataagggactgaacgaatgctaaaaagttgctagtacttctatacaatgtgtacagaaacagagcagttaatgcttcaatatcagaaaagcaagcagagtgttgtggcataccattgtctgaatccaaagaccatatatgctttgacaatgctttattcatttggaacatattgatggaattaactccgaaaagatcagtcaggggttcatcacaaattatatttctcctatcatttgggtcttgcaaatttctctctctaatatatgtccacatttgcttcacaacctacagacaaaataatgaacatgtaaaatagtgacaccttaattaactaagaaatcaaacaatgaatgtaacatctctataaattcatagatgtacctcagtcctggccatttcagagacgcccataaatttctgaagttgtggagagagggcacatattttgctaaaaccaccaccccctcttttctttttatcatcgggaagcttctttgacctatgagttttaagacaaagcaagtagttaaagttgattaccatccgagattctttacacctttacatagaactaaattttaagatcacttgaaactattttttctacttccccaaaacaaaaagaaaaatacatcattagaattagaaagttggtaattttcaaaatagaagttcacataaatttaggaaaatccagtcaaatatattaataacatagatacataccactgatttttttctttcttccctaaatcaaatttaagatttaataactaaacaaaaccagaatttttttctttcttccctaaatgaaatttaagattaaataactaaacaaaaccagaaagaagtataggcttcgttctgtataaaatgaaaaataaaaatttaagggatgctgctactggcagaatttacaggttaacaaaaaaaatgttcattttaagaaagaaattaggtaaatatatcacctaagctaacaacttatactcaactagaatatatatttttttaagaaaaaaaaatgagttcttttaagataagaataatctggtgtcgatggcgttccacagagcagtgatagacactggattatgaggacctgttcagattgaaacagattatttctcagtgcatgttattggaatcttgatcaccatcctcacaactatatatactactcagtcatataaggcaaattaaaatgacattttggactaattcaaaaggtttccacaattggattaaacaacaaagcaaatacatttatgttagaaaatagtacattgaagaagatcataaacaatatatttaattgaagaacaaagattagaaagccgaacgttctttaatcaaatatttattgtcttcttcaattatattcaattttccaccaatctaaacaaattaaacatgaaaattaactacaaactccataatgtctatccgaatccccaaatttaaacgcgaaagttcataattagatcaactaagtaataagtaattacggaaactgaccgtcttttaacctttctgtgtttggattcttcaactggttcatcctcatcgtcttccggctcctccgtcgtcgattcaaatccgtcgccttcttccgacttgatctccgccgaatgatcatcgtccaggtgtccgacttcaatttcctctccttgttgcggtttcgcgagctcgctttgaaggaacaagtcgacctgctctctaatgaaagccttcttatcagataagtcaactccgaaatcctcctgtagcttccggcgaacgatagccgtggtcgtcgtgttgaggtcggaatttcggagaaagtcttggagccggtcgatgagctccgattccgaaaccatttctccggcgtggtcgaagagagagaggttaggattaggagggaagttaaaaggaaaagagaacaaaaatggataaaatatataaaaggaaaaaagaattctctctcttcacccgtttctcgtttttagtttttttttttgattcaagcgtttatatattac

SEQ ID NO: 296192 - DNA, 2460 bp, Cannabis indica
atatgatatataatccaattcaatataatacagtacaatacaatacgacctaatacgacgttccaaacgagctcctaaagtaataaataactaagctaaaatttaaaatttaaagtcagattaaaaaaaaattgttatataaatagctaaattaactttaaattataaataaatatttaaatttaattcttcgttaataatatttaatttataatttttgaattatttaagtaactgaatattaaatataaagtaaattatcatgtgaaattttttaattgatctaaatcattaaatttttattttttattaaaaaattaatttaaatataccattaaaaaaataatatttagataataaattgatatgataagttacagaaatataattaatttatgtattattactgtctaaaaaataaatttaggttttaacttgcaattaagagttaaatttaaatatttacacaacaaattattttaaaaaaacacaaatcaaataaactagcttataattttacattaatgccttttagcatattactattcaaagtgagcatttctctttagctcttccagctcagttgagctctattatattagctcctgtagctcatttgagatgagctattacaaatgtttttagtaattaatctttttctaatatctactataactatataggtgcattatttataaaaatgttattaataaagataaatggatgtgtaatttatatgaaggtaaagtatagaaggtataggataaattcccccaaacattttgagaccaaaatgaatcattactcacaaacccaaatatgataataaactttatcaatgcttgtgtcaaatttgaacagtacttgagtattggttccaaacctaaaaagtttggaagtttggatgtgatgaacagtactttattaattaaggtttttgcacgtgatgtggtacatattgaaaatagtacataacaacatactattatcaacaataataatcaatacaaatttatgttcatattattcaagatggaacatttaattttaattttattgttaattttataaaacttctttgatctatgcagatacaaatataagaaagtttgggtatattaaacactagtgttctttctctctacaccatagtcacactcattccatctctctaattttctaatcaagagcataacactttttataaggaattattggttaattaggctacatgcctaatgtaagagaattaattgtcctctcccaaatagcagactagtgacattttaaagcatgtttataggatcccgaacatgttactacgttatatccatcttattattattattattaagattttttatactacatattaaaatttttaactttttattttttaactgtaggataggatttttttcaaaaatactatcttttttatactgtgtattgtgttaactttatactgttgttccgcggttatatttttagttgcttcactgttgttttaattgttttgttttgttattttacaattattttataaaaagataatatttttataaaaaattctatatgataataaaattataaatttttgctaaaaattcagtatttatgtaaaaagtcctatcatatgctaataccgaataagcaattcatcattttgttagtacacctcaaatattctaacaattcatggaccatggttatatgcatgaaaatgtgtatataatattaaaagtaacgtaggaaagagtgtttcagtcaaaggaaaaaacaaagaaacaaaactgtcgattaatgtactaatcacatggttatgtattggtaatcacaaattggcctaaattaacttcacatagtaaacggtctaataatgtttttaaattttgcgtgaagctgttttatactcatatagctaatttttgagatgcataacatttactcttgcttgagattttcaaacaaacactaacaatggccgaaactgtgatttctgtgatggtacaactgctgacttctcttcctcttgaagccataataaaaggagtgaatgagcttagaaatgttgaaaggcgagtggataatttgactcgtaaactaaggtccattcgagctgtgttgcaggacgccgagaacggaagatggactagcaatcgcgaaagcgtaaaagattggttggagatgcttgaagacgactctcatgagatgactaatgtgcttgatagatggaacactctcattctcagatcccaaatcaagaaagattttaatcagaggagaaaggttagtagccctgtcttcttcttgcttttgtattttcactaaatttaattggctagctggccctgaggtgagacgagtgaggtggccgccttaggcccctccaccgctaacaaagttagtaataaaataaaggctaattaggatttttgcctcctgaattttgacatgtac

SEQ ID NO: 296193 - DNA, 2591 bp, Cannabis indica
tatatatatatatatattcttgctattctcatcatgtcaataaaattacattccagataagataagcacctacaaaataatgacatgtatttaaccccatataatgatatatattcaaccctatatgtctatgaagatctcattagtgattaagataaaaattcattgagtgattaactcaactcactatgacttttctctcaataacaagatgggggcatttggagggagccaaccatctcctttgatagtacaaaaatgatatgccaaccatgtatatagtacacaattaatattctcaacatcatacttttctttgcctataaaatgcctcgttaccctagcttctcataaaacacattgatgtaccacaagtgagagagaaacatcatataataatactctcttcttcttcttcttcttcttctgcatcttcttctcttcccctatcttttgacattttcttcttcttcttcttcttctgcatcttcttctcttcccctatcttttgacattttcttcttcttcttcttcttcttcttaaaaagatgtcaagatcagggacagaaccactaagtgttggaagagtagtgagtgatgttgtggacagttttgtcccaagtgtaaaaatgactgtcttttacaacaacaaacaagttgttaatggtcatgagttcactccttcccttattatgtcaaaacctagagttgaaattggtggagaagatatgagaacatcttatacactcgtaagctttcatcatcaatttcaattttttttcttaaataaaaaagttgtttatatattatataatttattttatttcttgaagataatgacagatccagatgccccaaatcctagtgatccgtacttaaaagaacacctttattggtttgtaataatgtttctcttcctcctttttttttccttttatacaaaattatatatttatttattcttacttatatatatgtaaatatatatgtatatatttcttattttcaggatggtcacagacattcctggtacaactgatgcatcttttggtgagtttctcaaacaacaccttactaattttttcttttttctattaacattaccaaattttctaattgggatttttttttaaacaggaaaggaaattgtgagttatgaagctccaaaaccaatggtgggaattcacagatttgtatttatattatttaagcagaatggaggaagacaaacagtgagggctccaaccataagagactatttcagtacaaaagtgttctctcaagacaataatcttgaccaaccagttgctgcagtatacatcaacgcacagaaaaaacctgcggctagaagaaggtcataaataataaatcaaattattcatttttactaaatgaataattttttttaatctccaactcaagaacaacaaagactcttcttcttcttcttcctttttatcttttttttgggtcaatgtcatggtctattatgttaaacaaaacaagtgtctgcagtcgaaaaataataaatattttgtctttttttgtttttgtttatttactggttttatttatgatttggcatttgggtctcttgttgtaatagaactaccttaaacaggtttagtttgtttgtctccttctttcatgttggatatatggtgtttttatctaagagaatgatcaagagttcttcaaacatgcttacacgaaaaaaaaaaagttaatgaaatattaataaaactaggcaaaactcgccaatcaaacaaacaaaatctaaaaaaaataaataaaactaggcaaaatagagcgactatattaataagaaataattatttttaatatattaaatagttactttttaaaataattctaatatataataatagttaagttatattatctaattccacattattattataattttatttattaaaaaatgaatctccataaattatataaaaaaaattctctaatattattaagaataattagaatttatccctcagccttgtagagttttgcctcttcaattttttttatgtaacaaaaattctcattgaaatataaaaattgttgcaaatatctctttctaattgtattctagtcatttatttaaataatttgttgatatgttaatctagccaaattcaagagtctaaagaaaaaataaatacatacataggaatctaataatgaattatgggagtattgggaatatctatgtgagaactactgtttatatgtttaattgtcaataaactatatttttggtaatttaataatatcctgcaattgtagctgtaattcatagccacttacatatatgcaaattgttttttaacaaaaaaaaaaatgcacaaaatgtaattccaagggaatatttgcaacgatttatataatttagaaaaaatttaagtgagaaaagttttaggggcaaaattctacaaagatcataatttaggagataaaaattctatttactatattattaattattttatttggagttaattattgtgaagttaaaatttatgttagataaattaacaattaacccaagatctatttgtatataacatagaaca

SEQ ID NO: 296194 - DNA, 1391 bp, Cannabis indica
ctatttatatatatttaaaattttttagggaagagagtgtcatttttgctcctaaatgtaaatgttatttttggacatggcacagaattatgcaatcaaatcttggcaatgccattcaaaccaacactaattgctgattctttcgagcaactcgatgttacgttgctcgacaaatgggtaaggcaaactactaacacatcaatatatatacagcattgctattagtcatcagtagtacttaatactttttataggtggcgctccacgattggttatcgatattccctaaaagttatttttttttaagttatatgatacctaatacttaattacactaataacagtatgacaccgatgatggtgttagacacagtagtaccttttagtaattctctacatcatatggaagaatggagcactgttcgttcaatactgcaaccagtgaacgtgttgttgatcactgaatactgtggccaacaacatattggcaatgttgtgggaactcgtgcctagagaacccagaagcaacttcaatgatttttgaagcttgatagtttttgaataattaatatgccacatatttatgcaaatattttaatattctaattatttcatttaaatcatctttaatggtgtatccattcaataataataataataataataaaattagggtttctcgtcctaaatttatagctataggatgttgtcttttttttttgaccaggcccaccggccttccctgggcataggtgcagcttggtcgaggttgtgtttagctattgcgattcgatttttgctactgatatggttttttattttgttttgttgttagttcttcaatggctcgtcatcaaatcgctgttagtggttgggaacaacaagttctctgggactgaaggagttgttagtagcgcagttacttaccttgcacaatagttaagtgctcaagttatgagattgaatgaacctacaacaataattcttctattgtgtcttctgagcggtagatgaaattgaacacaagtgctcttaaggttaactgtgatgctgcaatctttttcatcttattttagtttttagttttttgtcaaacgatctaagaattaggcaaatgatatttgacttatatttctaattctaatcctggtcgtgtctctaacgagagagatgtcccgattaaattgtatgctattaatataattgcatgatttattaaaaaaaaatcatatttaatcggaattaaaaaaagggactccctaaccatgtctaggtcgatgcttttatgacccaatatgtaatcttatgaatatgacattggtattccttcactgtgaaggatgtggctgaagctttcaatctgcctatgggaattgagacaactgatgtgg

SEQ ID NO: 296195 - DNA, 4962 bp, Cannabis indica
ggattcgatctggttcacaaatcattgtatactagttgaatgtttaggtttgtatcttctatggttttaaaaaaaaaaaacgattgggttcttttttttttgttggttgttcctatagtataatatattcaattgggtgattaaaatgtaggtgtgataatatcccaaaatatatatttgaatatgcgtataatctgtttgaatctgataaaatgattccttgaacaaattaagaaataccatacctcttatattgtaaataaagattatgtttttggtatatcttgctcttacaatcattgacttaattttaggtagaaattagatagagtgatcaaattctttatttgtgcatatcaacattctgcctagtccctttcaaatgctttcaaacatacctgtaataagattttggtctaaaccattttgcatactgtgatgaggaaacatatggtttagttacttgtttcttccctttaaagtttttagttctagtagtagttctctttgaatagatatgctcatttttttttccttttccctttttaaaataaataaataaataaaaatcattttgcggtatgcatgtgaattctggttattagtttcttattaatggtgtcctttactaagtatacacataaatatttatggcttttgaacgatgatatagtgtgaatgctggttattagtttatattattaatggtccatatgtcatgtactaaataaatatacacaaatatttatggcttttgaacgatgatataatagtagaagtatatatataaatttggattattaacttattttcatggaagtgtttttattatgtggattttgatgcttttttttttaatatttatagctgtatttattattaattaattatgtatagttggggtgtatcttagatctgtgttagatttgttatgtttttggttgaagatttcatctttctttggtttttgaaagagtactcttttgtttttgaaatgagttttttttacgcttgttgttgttttttccaataccaatagactatgtctaatcataatacttatatacaactcaataagaatgacatcatgtctcttttccttttcttggtagaagaaaaattttatgttatgatatattgttatatagcgactgataagaatgaagtgaatgcttattgcgccttgtgtttttaaaattgtgatttttaggcttgtttatgtgttcctagtttgtaagtgctcttttgattggatcatgcatgatagattatttagacaaatattgataaatatattttagggagaagttaattttaggagtgtatctagtttgtaattgctcttttgattggatcatgcatgatagattattttgaaaaatattgatgaatatttttttatggagaagttaattttaggagtgtatctatgtactttatgtgtagaatagatacagtatttatgttcataggtgtgtttaatctacaaacatagtatatagcttttcaaaagttgcaatcttacggacaatcagataagtcactgaacaattagggctttgggtatttcaaatttcttttttcttttttaccagtagaggttttgcttgattaatacctacagtttgtttgatcaaaacatatttaaagtttaagcttgaaatgaaataggatctttaaatttatttttaagtttcacgttctgaaatcttttaagcatgctaaattcaccacgtttaccttctttttcctgctcaattggaaggaatatctactgtgatggctagaggagcaatccatcaattactaaggaggaaacttcattctcagtccactgtaagaatcttcacacctcttatttgtctttcgtttgcaacttttttgtaaattttctaggcagcagcctcgtcggttccctaagttgagcttgtattatattaatgttggatgttgtggatttatatactgtctttcaatcagttttatggctgtgtgaatctttttttttaaaaattacttgtagcatttgaatgaagagtttttgtgcatgcatgccatcctgcatctgttttctattttatccgtgtgactatattaattgtagcatttgtttgaagagtttttgtgcatgcatgccatcctgcatctgttttctattttatcaagtgtgactattatttacagattttcatttcaccatgatcattttaattaaaattttgaaatgctaatttacagattcccccatctttgtcttcctttaattcaaagagagacgatactggttctgctgggattaagtctctaagagcccttgcacttctaggagctggagtctctggattataagttttgcaactgttgcatctgctgatgaggctgaacatggattagaatgtccaagctatccctggccccacaagggaattctaagttcatatgatcatggatcgtgagttctaatctactctgtgtagtgtgtgtaatgtgtatgctactagattgtgtaatatttgaaggctgtggtcatcatttggatagcttttaattctgatatctattgtttctttgtccttatggttcaatcctaatgattgaaatcttgaatagttttctcctcaaaatggtgggattaattagacagttcaagatcactaggcatgaataagttaattaagctgttttatggaaaattgttgcaatgtattaggaggcttatgaaatttgcaactgaaatgccaattttgttatcctctcttacttgtacttgggcaggattcgtcgtggtcatcaggtttaccaacaagtttgtgcatcatgccactccatgtctttaatatcataccgtgatttggtgggtgttgcatacacagaagaggaaacaaaggctatggcagctgagattgaggtggttgatgggcccaatgatgagggtgagatgttcacgcgcccgggaaaactgagtgatcggtttccccagccatattcaaatgagcaagcagctagatttgcaaatggaggggcatatcctccagatctaagtctcattaccaaagtaaatattttcttgtgctaatgatttctcaattctctatccttttgtctatgtacttctataatattttctcaactttacatttcaggctcgccacaatggtcagaattatgtgtttgcccttttaaccggataccgtgatcctcctgctggtgtttcggtactttttcttcttactctctttcctatgtaatgtgctagctactttagttgaaagataaggagaatcctaagtgaatttttatgtggagagaacaaaacaataactgaagaagaagtattttatttatttatttttggagttgggtacgtatattttttgaagtcttgatagtatgttccttacagagtattcgtccattcatgtcaattataaatgctggcatttgtttgggaataaacttctcttctgtgttttcctaattttattaaccctttcattttgatggagtacatctctctttcaattttataggttgtacttgtggacttaactctaactgtttttaactaaacatatttataatgatatttcagatccgtgatggtttgcactacaacccttacttccctggtggagcaattgctatgcctaagatgcttaatgatggtgctgtagagtacgaagacggtactcctgctacagaggcccaggtatggttctcttcttcacgtgacaggcgcatgctcaactatgcttgttcaccttaataattcgttttgagaggctcatagctgaagctgttttgtcatgttgcagatgggtaaagatgtcacaacattcttgtcctgggctgcagaaccagaaatggaagaaaggaaactggttggtttacgagtagccacctctcttgtcatgatttagttctccagaccatacgctaacccattttttccctttcaatgtcttaaaatgtcagatgggattcaaatggatatttgtgctctcactggctctactccaagctgcatactaccggcggttgaagtggagtactctcaagtctcgcaagctggttcttgatgtcatcaactagattcctttttaatttcatttagaattatgcttgtggttggagggtctctaagttggaaatatttttttttaatgatcttggttttcttcccatgcatgctcctattgagttgacaacatcagttattggtaatgtagtgacctgaggaatgtcacttgcagagacactgaaaataagctgctccatacatctgataaaatatttttgcctttttgacataaaaagctttgttaaattcttctttatggacttgtggagggatgttgctttttcaatattcatttaatgctttggatcatatatttgcaaattaatggtcaaatattataataaagaatggcaacttttttaatctcggccttctttttatttttattttggtgacattgcctttttttttattattatttatttatataatcaaacattttattttgctttctgtcaaatattagtgtgttctaaatgatatatattccattttccttggtaatgtaaaatgtaaagtgagaaaaatgaaataaaatggaaatgaccaaatggggcttacctgttaagctttgtgatagcttgtgcctgtaaattttcatgcatgttcaaaaagagcattttataagaattccttactgaatgtgagataataattattgtttggtgaaaactgtttgggacaatttggacatccttggacttgtgtttggaaaaattatttcatatttagcaaataattttgaaatttttacaccaaaaatacaaaatgccaactttattacacatatactacttgcacgtcaaatccatgcacctatcaaccatcaatcaactctcaatcacttccctttcttttttttcttttgttttcatttgatt

SEQ ID NO: 296196 - DNA, 3270 bp, Cannabis indica
atatatatatatgttatatatgtacatgtcacggataatgaagagaagtgtttttggtattattacctgcttcaattaattgaaacactttgtcaatttatatgtgccttctgcttcgttgtcctttctaactctagctttgtcctagaaatcatgaatggatttgttgattttggtttgcctctttcttaaaaatacctaatgagacttgtatgtagcaagtgaggtgtaatataaataagaactattaattatagactaaatatattgtcccacaaatgtaaaaatgttgaactatttataagagcaactccatctattatcgatttgtttttgagatgaaactctataattcgtcatggttttgtgcattcaatcacatctattgtcaaaaaagaaatttcctataatgcaaaagacacatattctgacccatcactatgatatttgtcaagaacaaatgaaatagcaaagctttaatataatgattacaaaaatatgccttccaacaatacatacaataaatgctccattactgttgaactattgaaatacgcatgcccatcaccaattttttttttttttgttcttttatattttcatgattcaaaatctatgactattaaacccacatataatagttacttaaaaccctaattcataatggtgagcactacgttacgtttttggttttatttgtttaatttttccccacccgaaattctgaaaaatagaaatatataaattttgttattaaaattgatactttgagatggtgtgagaacttgattgcatggaaaaaaagaaaaaaaaaaagcaagagtaaatcacttaacaatattccttcaaaaaaaatttatcacttaacaatggtctaaaatctttcataaaaacgcaaaaacaatggaaaacgatgtttttgcgatgaaatttgttaaattttcggtgatatcattttacttagatgttaatttgaggtgatttgtttttagttttgaaacttttttcatcgagatttacacattcaaaatcaaaataggtagaaccttaaactagtgtataaaaacttagtaaaatcttaattatttagatatcaatcttcattatgttgtcatatatatatagatattaatatgataacgtcgttaaacatcgcaaaatcaaattttatcacaaattatcgcaaaatcatcatttttggcagtgtcgtcaaacatctttttatttatttatttctatttttatggcacaattgttaaaatatcgattttcactttaaaaaaaatcaaacttttttgcaccaccactagactattaaagggtccattttaattaaaaaaaattctgtaatattctaagttttagacttgaataaaaaaaattatattattatttaattttagaaaaaaataattcatgtcacttttcatgtccaggaaaataccccatatcatattcaacaaacagatattcacatttcatagtcatagtcatagataaccttttttcttgcaatagtatcttaataacctctaattatatagttaaatataaactcgtattgagtaataatctcaaattatactgaaccaatttacaagggctttccactctaccctttctcatattgttgagaaagacattttttgcctataattatcaagcatggtatattgggtattagaaagtacaaagcctcatctataaatggtgacaactcgtccactcgagcccgtcgaggagtaggaggggtatgtctacaatataattatagaaaatttacataatacacttaaaaatagtttttttttttacatttttacaaattttattattcatatttttactgatttgtactttttaacgttattttcatattgttacaacgttatattatatttctcaacatgtaaataacagtttttttaaaatacttaaaagcaacgatctataagaaaaaaattccgtaaaaatgtaaaaactgctataattctataaaaacgtaaatatttggttaatttggtgtatttttgaaataatctcaataattatcccccaaaattatctgttcataatgtaatcaaaggatgaacataaatcaattaatccaattacaacaaaccattaaatattagatatccaattatgattgaatcagacttttttaaatatttaattggattggatagtgtgaaaaagtatcccaaaatcaaattgaattaattaatattttatttggttctgagtaatttgatatttttatatttaaaatgtatattatatacatgaaattttacttatgtaatcattattattattttttttagattgaatagatgttatccaattcaatgaatattgaatttaaaatattaaatagatctcatctaatttaaaaaaatttaaatttaaaacattaaataaaggaaaatttacatgatatactaacttttgctatttttttacaaaaatactgttaggcggtattttttacttttttactgtatttttttataagtttcatactgcagtatactgtgttaaattttcactggtgttctactggtgttttattggtgttctactattgttttgagttgtcttgctttgtgttttactggtgttttataaaaacacaatatttttaaaaatatttccgtatgacagtatttttataaaaattaactcaaatttcaatatttttgtaagtttctctaaataaatctaaatcaatctattagatatagtgtacataaaatacattagaatatccaacattctattgaattagattgtttgattgaaactaattagaccaatcaattaacaaatccaacatctaatataattattgaatgtgatcgaatgaacactctcggtataatccgcgttcttcagttaaagcatgcaaagatttatgaaaaatcactataactgatttcatcagcccgcacgtgtcgcactgtcacctactatctctaaaacggtaactgtgatttcattttcaacgtactattcatggaaataattaagcttaagaattttgctgccagcgtccataggggtgtgcaaaaagtcatccaatccaattccaaccgaccgatccaatcccaaccgatccaatagaatcggatatccaatcataattggatcggatcagatgcaaattttaaaaatccaattggatcggatcggatgttggatgagacatccgatccaatggataacgatccaatccaatccaatatcatccaatgtccatccaatcat

SEQ ID NO: 296197 - DNA, 1823 bp, Cannabis indica
tcaccccccctcttggaaacatatcttgggctaacagaagatggggaagatagtgtgactcgtgcccaacatcatcatgattgtcgtgctcagtgagagaatcacccaaacaacactgatcttcaaagaccagctcggtcagctgaccaaacaagaaggcttctaggtggatcaatctttgacaagatgggacccatgataggggatctaataaacactttgaatcagagaaatgaggtgcaaaacaagcatgttaaccctcccaacactcaaccaattaatgtgaacaattatgtgtttggcgaggttctagggggaccataggtgacacatgttggtcaatagcaggtcaagttaatctagtagtgcaagcccaaatagatcagcttaagagcctcgtattaagcctgaccagcccaaattcactgacttagaactcgaccgaataagaggatcaccgttctcacctcaaatcaatgcccttgatcttccgatcaagtttaaaaggcccatatgcaagatgtatacgggcaaagatgaccctctatctcacatcaagtactttgagatgcagatggacctacaatcaataaagagtgatgtacggtgtagaatctttctagctagcttggtagaggccacccaacaatggtactttgagctagccctagggaaattcatggaacactttcatggaagagtttcacgcacatttttcctcttccaagaaactccctactcacttagaagacttggtcaaagtaaaatagatactagatgaacttttgaaagattatatcagtcgatttatgaccgaggcaacaaaggtgaagggattgattgaggagggaacgctggccaccatccaaggaggaattaaacctttgggagaattatagaaagacatcaagatgcttactatagggtcaatgggagaattctttgaccgtgtagacgaatttataaagcttgaagaagaagaagtctgatgactggacacagtcagttggaaaaagatgaccaaagccccaccactgttgacaatacatctctccagtgcaatcaaaactcccaacctcaaaacggtgacaattcagaccaaggtggtaaaaggtaaaacaacggaaataaccaaggcaatgggaaaaagggaagctcaataacaatcccgatcaacaacatccttgagagagggctccaaaattcacttccttcagtatccttacaaaagaaagagaaaatatcttcatggcaactcagtctgttgttttgtacaaaagaccccctccaattaaaaaagatataggcaagagggacaccaccaagtattgtcgctttcaaggactacaaccattgcaacaacttaaaagaaggaataaaattcctcatcaggaagagctacctgcacttacgtaggtatgttaaggccagacaagacagaggatcaaccaaccggatagtaatcaaaatcatttaatgcctccacttgtggatgggcatttacgttgctggagattcaaacaaagtaagggaaaagtatgcctaaaccctgtagtatgagaaaaaagatgaaatattggttgtagatgaaagaaatttgaaacagctgttgtaatacccaaaattaagaaaaggattagcaaaaccctaattagataattatgagttaattgaggaattatattattatatagttcaatatatgtgaaattatatgaaatttaacatgttaaagaccccgttggtaagtcaggggcattttggtaattatgacccgagaagggtaaattgtttagattaatttaattacgtgcttaatagaa

SEQ ID NO: 296198 - DNA, 10959 bp, Cannabis indica
gtttttttttttaaaaaaaaaggctaaaatacaacactatctcactaacacttccaagagcttctctactcttattttttaaaatacatcacaaaaattcaacttttatttattttacctttaaacttttatattacaccatacatttaacttttttattttttctctatatcatttaaatatattttattaattttatataaataattcatataatatttacgcacatatatagaaaagttaaaaaacaatattaaaatatatttagctcaataaataattatctctacatttagttaaatactatttattaagttaaaaaaaatatgtaaagtagctaacgtttacctcacttgtaaaaaacttaattatgttaatttttttttattaatttaaaaattaaactattttaactcgtatattaggaatcatcttacaccgtaatgaaataataaataaattaattaattaaataaagagtattttgttataaaaaattattaattattatttgaaaagaatatattgaattttattaaaactattttttttttaaaaaaaaaaaaactaaaaaaaaaaaaaattgaataggtgatgccctaatctctctgtctctctctctctctcttgggttttggtcagaacacagtcggcattttatcattgtcaaccttccctatcacatatcaaacgttctctccactctcgattccattctctccttctcgccctcattcactgacccaagtaagctaactcaatcctcaagcttctttttaatggtgttatgttgttcttctctgttttcctttgttgttgttgtttgatttctcctactactacacgactccattgttgcccagcttcatattcggttcatatagtctagatctagttttttagcaaggtttgacattcaatgttgtttgctgtgttatatgttagtgtgaatttgtttgtatttttttacgttgacttaattgagagtgaaaacccatttgaaagatttgaactttatctctgtttacagctctaattttgttaatctcgttaaaaattcatctgggtcgatgttaaattggacttttttgttttagcataatttgacactgtaattttaggaaaaaagtgataatctttttcaattttgttataattgagtactattagattgagctctgttgccaggtttgtgaggcatgactggtggtgataatcaaaaggttgatgatggtgataataagccaaaggttgaagttggagatttgccaaaggctgatttagttgaggaaaagtctggtgtggagaagaaaaaatctggtggagacaagcagaaaaagtctggtggagagaagcaaaagactggtggtgataagaagaagaataatgctggtggtggtggaggtggtggtgagatttgttccccacattgctacttacttgatggctccatatggttacatatacttattattatgggattatgttggcttttacaggaggaaagaaaaaggaagttaagaaggagactggacttggacttacccacaagaaggatgagaactttggagagtggtactctgaggtatttttcttttaactaacaattagcatttgtaggctgtgaagttgttgtaggaattgtaaaatttccatgtatgctagtctcaaactattagccttattacttgttgtgttttcctattgagaaatgatgtattatagtttgtagatagatagaagaggataaggtatcatattgaagatataacgaaatattaatacaagttttttttaaaattaaacataaatttaatttgattttacttcttggtgctgtaggtagttgtcaatggagaaatgatcgagtactatgacatatcggggtgttatattctcaggccttggactatggcaatatgggagatcatgcaggtgagtctgagaaactttaaaatattgccatcatattcattttcttaaatgcatcatttttttaaaatggatgttgttcccattgatcatttatcattgaattcccacatttttcattttcaatattttgactttctaataatattgtcaatgatgtcatttggcaggcatttttcgatggtgaaataaagaaaatgaaaataaagaactgctatttcccacttttcgtatctcctactgtcttgcaaaaggagaaggatcatattgagggttttgcacctgaggtgagatttggaaacgtttttcagaacaatgagaaaactttgacttgtttttctgtgtgttgtttcttctttgaagtcattaatgacgttataccttgggattccttaggttgcttgggtgactaaatctggagagtctgatttggaggtgccaattgcaattcgtccaactagtgagacggtaatgtatccctattattcaaaatggataaggggacaccgagaccttcctttgagacttaaccagtggtgtaatgttgttcgatgggagttcagcaatcccacgcctttcatcaggtttattacttttagatctcttcatttataatagtttagtttcttaaacaatgccgatgtcacaaatgaagaactacgtgtattgcgtacaacatttcatagttactcttgattttattttattttattttctatttattctgcttttttctttttctgttttcttaaatgatccgtaaaaattttagaaatatgagaaaaagagaatgtaactgttgttgaattgaagcttgttctgtctgttaaccgccatgaattagataatcgctaactaactcttacatatatacttattccaggagtcgggagtttctttggcaagaagggcatactgcttttgcaacaaaacccgaagcagatgaagaggtatgaaacttaagcttgaataccattaagattatgaattcggatcttctattttaacttctccttatccttattttcattaatcaagtaaaatattttcactttttattgtttctttattttatggaagaagatccattgacaggatttatatgtgtagatttcatattttgacaaaaattttaactcatttcggtacaaagtattgatttaaggaccagttagaactctatcaaatacaaatttattctcaatgctaatttaaatcagtttttttgttgttctggaacttaactaataatagcttgtttccgtcttctttcgcttaatttagcatcaaggcttttgttcttatttctttttagtttcatgtattcaagtgcttaaatttgtctatgatattttctgtggtattgcgtattattgttcatgatgataggtttaatttctgctatgttgtttaatttcacatgaatgtgtaaaatatcaggttcttgagattttggagttgtacagacgcatctacgaagaattcttggctattcctgttgtgaagggcaagaagagtgagatggagaaattcgccggtggactatacaccacaagtgttgaggtgtagtgaaattacttgcttaatccattttctttgcctttgattttacgacacatttatttagtttgaactattgaatgcttatacttgtctgtcttcgtatactaggctttcgttccaaacaccggtcgtggtgtacaaggtgcaacttcacattgccttggtcaaaatttcgccaaaatgtttgagattaactttgaaaatgagaagggagagaaggctatggtctggcagaattcgtgggcctatagtactcgaacggtactctttctatctaacatcttgagaagaatagttccaacattttgaaaattgaccattttaaccttttttcgatttccaaatatagattggagtaatggtgatggttcatggggacgacaaaggtttggtgttgccaccgaaagttgcatccgtccaagttatcgtagttcccgtgccatataaagatgccgatactcaagggatttatgacgcttgtactgctactgtgaatagcttgaacgaagctggtattcgtgctgaagccgacttccgagacaattactctcctggctggaagtactctcattgggaaatgaaaggcgttcctcttaggattgaaataggaccaaaagacttggcaaacagtcaggtaagcgagtttctgttctgttcattaccctctttgatctagttcgggtttgatgttatagaaatgtttcacttaaaattgttgaaatacaggtacgctgtgtccgccgtgacaatgcatcgaaaaaagatattccaatggcaaacttggtagagggagtaaaagaacttctggacaacattcaacagagcctattcgatgctgcaaaagtaaaacgagatgcgtgtgttcaaattgttaagacttgggaagagtttgtcgatgcactcgccaaaaggaaattgatcttagctccttggtgtgacgaagaggtaattttccttttctcatcgatatttttatggtttcgtgatctaaaagatgttctttgttcttactctataggaagtagaaaaggatgtgaaaacaaagacaaagggtgatatgggagcagccaaaactttatgctcaccgttcgaacagccagagctcccagaaggtaacccgaccgcgattgaaatctcgattatttaccttactagaatgctgttgttaagtaggatgtttctaaatagaaatgatttgtttcgaatgtaggtactttgtgcttcgcctcggggaagccggcgaagaagtggacctattggggaaggagttactaagattatagcatttgtttggtatttttgaatgtagctgagcttgttgtattggagtgtgatttgttataggaaaagaggtacttattgacctgaaaaaattgaacaaatcccactactttcaattttcaatctaatttataatttgcttacatttgttcattttacaaaattacataaaagaatgttttgaaggatttgatttgattttcttttattatatagttggatttgtctttccctatgcttagcatatggatatgcatgccttaagtaaattaataactacattacttgcttaatggattgacatgggtggatatataattttaagtaaattagtattatgatatgtcatttttgtattagtatattaaatttaataatctgaattaattaggaattgctattaaattaccattaatttttatatatttgtaaaattttagaattttaatttagatattattattattattattaaaaattaaatttaaatatttgtttgcaatcaaaagttaactagacttagtgtattttttttttaatgatataaaagaaagtagagattacacaattaagtttttacacatattgaaaaaatatgatatttttttagtgaaatttattttataagaaaaattaaaaaagttgaaaaaaaagaaagataaggggtaagtaagggtaacaaattaaattactttttctatattcttcttttcattttaattctctcaaaatttttttttcttttttttttagaaaaaactatatttttataaactattgtcaaaaaataaagtgataaaaatgataattccctataaaaaacaaaaaatagcaaaaaagaaaaaaatatacattaaaataggtatttttaactttatagaaaactacaaatgaaaaaaaaaaataattacataaagcaaattttttgtaaatttttaacattgttcaaaaaaatttttaaaaaaaatatttttaagatattttattaaaacaacaagaaaactatataaaagtaacgacaaaacaatgtaaaaaaataataaaaaataaacaacaaaataacaagagtacaatataaaaatatataaaaaatctgtattttatataaataaaatcataaaatcgtaaaaatattaaaaacatacttatttttataattttttttattgtttttgtatttttttaaaattataccaatgtaaaagccttttgggcctacgtagtggtctatatgtagcaagaaaaaagcccaaatggtttggtcaccgccaagagagagaaagagaagagagagaaagagaaaggtgttatgttcaacttcaaacgaactttagtctactcctctctattcagctctccaccgtctccatgcctcaaggtccatactttatccaataaatctatttattttccaataatatttttgggttttcattatcaaattgtgtttgtttgtatacagatcttcccgggttttactatgatgcggagaagaacaggtacttcccttgtaagggtccaatacctggttctgcttctacttcttcttctaaatcttctaccaaaccagtaccaagggtaaccactaaccataactacttttttatctttaataaacttagttattttgttcttcataagcaaacttattgtgaatttgctatgtggagtttgtttgtttgtattgtatttatgtttatctagtcccaattttgttttgattgcaagtattttcaatagttattggtgtgattttaagtttttctaaaactctattttgctcagtatgtatgaatgagatcattgaggagaggatggtgcttgttagctatggcatatcacattattctcttttgcaattctggatcaattaggtgacagataatgcagcatttcatataatgtgaagagcttattggaaaattaagtcgtttcgattttgtagttttgcctttgtgtgagttttggctgtgcaagtatactagttattacttattaggcctcaaagatgtgacataacgccgaatggtagcaatggatcgatgattcgatggtagaagtcattggttcggattgttggaaagtgaaagtctaatgtctgttggaacttttttctttttgtttttggtagttataggattgtgtaattttatctgggaattgtgctgggttctcctacttattgaatatttggaaccgataagttgacatggggaaaaggcacatgccataagagaaagatagaaattacatggttaaatcacttcttgcttagtttataatcttcactatgaatttaaccaatttttgtagtaaatttattgttttggtaagctatttttgagatatggctttctcttttgtttttgaaaactaatactgtcctcattttattgcaggagataaagtttagtaggaaaaatgaagtgagaacttctaagctgcttcatgttagggagttatttggtaatctcatttcttcaaaaaaaggaaaatgcaactttaaggaggaattcaggaaaactcgagcatcacatcctaaggtatgttagtgttcgaaaagaattctgaattagaagtatttggttaactgattacggaaaaaacaatatcttaaagacgattgcaagaagtgttctgcactttgactgatagtttttgcttcgtcttcacaataagggagtgaaaaatgtttgacgattgcaagttctatactcttagtcatttcactgaacaaccatggaaatttgaaagtcttttttctctgatgaaaataaagagtgtttatatgaatgcgcacaggtttggaaatattttggaacagagaagataggcgattctgctttggaacggataaatgttgatgtgcaattgttagagggtcaaaccaaaacagatgttttattggcaggcgggataaatggatctctaaggtattcatataataggctgttaattatgtctaaaatgcattgaatgctcttagtgtttttgtttcgcaatcagctgtaattgtgcgaaaaattaaaataaaaaactttctccccattggaaatttatgatgattccgaaagtaataactgttaaggttaatattgtagatttgagatgagatcaaggctttacgataaagggtttctgctagtttagcaaaggaactagtacaataaccattgtagcattatttgatgtggtggtagtgaagtgtgaatatgtacattgtttaatatgtgctactaaacgctacctaattagtaattactaagatttttataccttcactcgttaaagcggtgtaggggaattatctttcatgttgaagcaacttgaatagttgaacatcttcatatatagaaactgccattttatttagaaagaaataatgggaccaaaaaaaaacgaaagcaaaataaacaagtgttttccttgacaacaaaaaaaataaataccacccaacaaagtgttttccaactaataataattaacaaaagaaatgtcatttgttactgtgaataatatcgtaacatagtctgttgttactatctttctaaatgtactgttttgcagaatctttcattttttgcatgctttttgtaaacatttgtatggattttattactagttattttttgtgaagtttgttgcctttgcagtttttctgacgtgggaaaggctcgacaacaatccgatggtctacaaagcattccatactgcgtgtggccaatcaccagaggagaagaaactaagtgtagtgtgtcccccgaacatatatggagagagacgggagcttcattacttatgtcatctaatatatcgtgcataaaaacttttagaaagaactcttcgtcggccatggaagatggtgggagtgtccagcacgcaatgtatccttttcttagtacttagtttgattgttttgtatgatgtgtgtgtgtataaatatatcggaagtagtacaatagcgattttcttgctctgttgttcaccgtttgattttctatcagatagttacagttatatatgagattgaaaactatcatttattttaagttgcccttaacttagtgaacaggatttctactttgggatcagagagacatggtggatctctttgtattattaatctaagtgaacccttggagttcgatcatgcagctcttttcataagacggaggatacaagagattgcaaattttaattgtaccatatggactgcagattgtggatctaataaaaatcgagttgtgattggcacgtttcttttgtccttacccttttctatttattgttagttctcagcatgaatgtttttgcagcaagttctagtttagagggcctttcttattttggcttagtttaatctttgttaccaaaatatctataaattaattgattgaaataatggaaatttaatctttgaatgcttattgtgattgttgatctgttataggaaccaatatgggggctgctttggtagatcccgaaacaggagggacatcatgggtgttacgcagtaaaagtgatgttttggcgcaacaacttgttcactcggtaagttatacttgaggattatcacagttactgatgtaagaaatcaaattattaatatttttaatattgtgcatagaagaatagaatgagaataataaagaaaagtatgtagattcacgtttgtgtaatatatatcgtcttatattttggggctgatttcttctttctcttgagtagggaaatgttgtactatgtggacttagaaatggagcagttatttctgttgatgttcgtgagaaacgggaaggatctggcaggcttgtcagacatagaatttcacaacttcctttgaatagcactaccgcaaaatcaagcaaacgatggtttaaggtagaaagttctcgctaaaaaaagcaaaaaagtatgtgagcttggttcttaatatgtggtatgttgttatgctttaaccgcaagttagttagtaaattaataaactagaacataacaagcaagaatcaacaagagaatttcgtagaggttttattgaattaagaaaccctaaagtacacgatttatattaaaaaccctcatagtattgataattaatatactatttttctctagtaattttttcgttgattttctttatgaacgacgaggctgatttattgatgtgattctgtgaatatgtttctgtttcatctatgtggtattttctgtgcttttattggaaactattattaattatttgattatgtgattatgttttacagctttctggaaatttgtatccttctcacacaattcagttgccttcatcaatctcctggtcagtcttctgtacaatctcagttttgcttgaactctttgttgtttttggggttcttgttttcgcgttttgataattttcgtcttttgatttccaactctagtttggtatcacttcaatatgatgatcaatacttcttggcaagctccatggacggctcggttagtattttctccttttcggttttggattggggatgtgtttgtttcattgtgtttcttctcggattatccccagttatacacatcttcagtaacttgtccttcaactcgaagtatcgattagaatcatcgtatgaaaatgaacgaacgaatttgtcttgtttattcacaggtgaagctttacgaccatcgcctttgccaaagaggtgctgtacaatcatacgagggacatgtaaattctcacactcgaatacagctcggtgttgatccatccgagagattcattatgtcaggtattaattacatcactcctcgtaattttctaaccaattcgcccgagttttcaactcatatcttgttcttacagggggagaagactgctacttacgaatttggagtatcaagtccggtgaactactttttcgagataaattctcgagcaccatcctctcaaccgtttcatggcagaggagagaaggtaggagttgtttgtttatggagtaatatgcagcataaatacctaagtttaactcccagttacaaataaatatttaagtttaatttttggcagtaataatacataagttataattttggaacttctgtaggtacttggttaaataattgtcacgtggcaatcgttgattggtttaactcattaaatttttattatttaaaaaaaattagttcaaatataccaat

SEQ ID NO: 296199 - DNA, 2826 bp, Cannabis indica
gataactaatcagattgtaaagagttttatttagggcataaaacccaacagtatgtcactatttggagataaaggggagtgagtgggaacagtggggttcacttgttgttgatcattatgatttgggatatgtggctcaggtatagggtgggtattaggtgcagttgaggacacagtagggtcaacagtagcaggtatactagtatggggtgataaaggtacagtattgaaagtagtgaaaggaaatgaggtagagtttgaagagtgtaccagatggttagaggaaagtgcttttgcagggtaatgttgttcattgaaaacaacatttcgtgcaatgtaaacccttccttcattgctttcacatatgtagcccttatggtgagtggagtaccccaagaatagacactattgtgatctataatccatcttgtgctgattatatggcctcaaatgaggataacaagcacatccaaaggaccttaggatgttgtagtctggttggtgtgaaagagagtttcatagggtgatagatggtttagaacccttgtaggtaatctgtttatagaaaaaacagcagcactgaaagcataccaccaataagataaatccaaaccaaattgtgcaagtaaagttagcccagtttcagttatgtgtctatgttttctctctgccctcccattttgttcatgaattattggacaagtgtgttgaaaatgaatgccctaatcttctaagaacctttcgaatgttctatactctcctccttagttggcttggacagacttaattgggagattaaattgtttttccaccaacccttaccacttaataaacacctcaaaggcttgaggttttagagttagtggaaagatccatgtatacctgctataatcatcaagaaaataaacatagtatttgtaaccttgtttggcatcaacatgtgatggtccccataaataagtatggattaaggccaaaggttggtttgccctggtgtcagaaacagagaatgaaagagtatggctttttcccaattgacaagcatggcaaaaggtaaggtcttttatggagcaatgtggggaagatggggtaagagtttgatgagagtgtttattgcaggacgaccgagttcgcaatgccaagcattaacatctttagtagtaaataaatgatacaattcaagggacaaaagagagtaatcatgagaagtagatgttttattgattgaagaatgagtacaattggttatttcaggtacagcctgatcattttgcatgtaattacaaacacattcaggtgtagaaaaaggactagacacaagattacattgtagtgtagctgaagtagagaatgaagagtcatctcccaattgatataaaccatccttaaccttccctttgatcagcacccgtccagtttccttgtccttgacaaagcaacagtgtttatgaaattcaagaaacacattgttatcttctgttagtttaaaaaaaaccacattctttttaattgaaggaatttgtaggacaaaatttaatttttgggggacagttatttaaggaaggtaaaatagcaaaactaatgtgagagataagattttcttaccatcagctacaacaagagtttctggaccattgtaggctgtggatgtgtcgagagtttcaagattgttggtgatgtgattggttgccccagtatctgcaaaccatgagagatcatcaccaaaatcaggtaacacaacatgttgatgagttgaggagtcaggacatcacactcagtcagatatgcacgaggtgcagatacattttgtttgggagtaacccagtttttatcaaatctgtagtgacacacaacagctgtgtgcccatatttcatgcaaacttgacaaatcaatcgagaacttgaataaaatccacgaccaaagcctcttgcttgagttcttgattgactttcattggggagatctttcccatgagtttggaaaggtctgaaattgtcatttcttgaatttttcagggcaagattggcttgcatttttagagtaagatctgagactgagttgtggtgatcaagacgactctcgtgtgcccttagcaaggcttggacttctctaagggtgagttcatcacttctggatgtgatccctaaaccacaggatcgtactcagggcctaacccatttaacaattgcagaatgagatcttgaattccaacagcacagccagcaatggtgatggaattagaaagcatttgaatcttttctacatagtctaaaattgatagtgatcctttcttgatgtgagaaaattgacctttaagttgaagaagtcatgcacgagactgactggtgaacctctgttccagagctctccaaacataataggaacttgtataatttgccacagaggccagaacaccttcggtcatggatgagcgtagccatgaaagaagcaactgatcacgtttcttccattgttgatactgaacatttggttcaccagtgacaagatgttgaggagagggaactccaatgaaaagaatgtcgtcaagatcatgtccgatgacggtgggaacaacatgagatttccaggcaaggaaatttgttcgatcaagcttgacagtaagggggcagagagagagagagagtttgagaaaagattccaatttgttggagcaagacgtcgagggggagcagcggtagccatggtctgtgtaggatcgaactgaacgccggaggtgtttctagtgaaagccattagtgatagtcgtcaatggcgattgatgttgggttttatgccctaaataaaactcattacaatctgattag

SEQ ID NO: 296200 - DNA, 3451 bp, Cannabis indica
aaaaaaaggttatagttggagtgttatgtaaaatttgtgaattctagaaagggcttttttagtgtgtgagcccaagtgctccttcttatgctgcatttgtcagtgaccgtcccacaagccattcccaaagctcgtacttagaaatttatcttattttctttcaaaaaagaagtttatcttattttattcacgaaagaaaaacccaacaaaaactcgtgaaatgattttaaaagaagaaatctcgatatttgtctttcataaactccataatataaaatgtcaatttgatatctgatacaattatttttttttagggaagaacaagtagaatgaatttccactcacaagtttcatattatgattaatattattattagtacctacttataaacctataatgtatgttaaattcaacctaaaatacaaacatttgagtttggcttttatttttaaataattatttctgagctacgttattttccaatttctattatttatttattttttattatgttcgtattgtcagatacacgacgacgctatacaccacgagcccacagttttaaattatgagcagaaacaagctgtaaaattaccgtgacgaaattgccctttcacatgattttagaatcaaatgatttgttttttttatcaaacattaaaaagattgagaaagttcaatattaccctgcaactggataagaggtcaaagtggtcctaacatggtcaaagagtacacaatgcaggacaaaatggtcatttggattacaagagagagacattggagccagagccccaattaccctagaatagtagtagtagtagaagaagtgacagcattcatgtggaattcgtggggtcctttcgtccttttgctctctccaattttgtttttttttctccttaacgtgaattttttgacattaaatttaatatttattaaagaacaacaaaataaattaaatacgacagagcctaggccccctctctctccacgttgagccatcttctactgagacttagactattctttttatataaattaattaattaattaattaattgtaaacaaacaactattatcgaaattaataaaataaaatactgaaaaagaaaagcaattaaagaaatgaaaatctacgtcagctatccaaactcaccagatccacaatttcccatcagagctctgcaaccaacaatggctgaaagcctgagatggaatcatttttttctcttcttacttcagaatttattcaaacttaaatgaaaaaaaaaacaccccacttcaatcacgatcaagattacagtaaaggaaagaaaaaaaaaagcagagatcagaaaatgagtgataatatctacataaatttccatatctattgccattaaaatattttgggattctaaacactagtctcatattaaatttaacagaaaaataacatcattcacccagataaaaaaaaattctaaagcttaatagaaattaaaaagaaatgaaaaatatttttatatacaagtataaatatctcttcctcctactacttcatgattttcctcatttagacaacgagaaaaaaagaaagctaaaaaaagaactgggttcttaagcaaaacccccaaaaagatctcacatggaaaaaaaaaaaagaaaaaaaaaaaaaggacattcttttatggtttgtcgctcgttctgttgggaaaattgttcaggaatcgctgtaatctctccagcaaataagcatggtgacgcatcgcctcataatgtagaaacgagccctttgttccttgactaagcgagcacacttcctggtaaaagagcatcttctatgagaggaattggaattcttgacaagtggacatgaagatgaagatcggcttctggacaagctttctttcttggagagcttccatttttcgtcgaagtaaaaaggcggtggagcactaattggagcagaaccagatacagaacaagcaccgctgttaatatttgttacagagacggaagccatggatggcactgattaagcttttggtggttcagatcagacttttcagaggaaatcaaaagattagttcggagtagtgaagtgtgtgggagaattagattagtatttataatgggtttgggaaaaagtgggttcgcagatgggtgtgtcagtgggtatcacctgggccttcttttgcctcgagaggcccacatttattttattttattttataaaataatttttatatatttaaacaataatattattttagagtggtgggttcccaacgcacacgtcatcaaaggtacttaattcattgagagagagaaagaagaatttaatgcaccaaatctcactgagtgagtgagtgagagcccctttttcattttcttagtttcatcgtttcagtaaaatttatagagaaatttaggggttttgttgaatttaaatttaatacttctgtaattgtaactttatttaattattatttttaaatagaggtaacttgaagagaagaaatttttacagaagatcaaattatagagattctttctgggttccttttctgcaagtaactcataggaggagccaggactagcctgactaattgacttggattaggagttttcctaggtgttgttgtatgacgccaacattgcttcattttttcacttcccattgttattactaataattattaatataattataagatgttaagaaattacctcacaaattataccacctaaattccattcgaataataatattgtatacaatatatttattttattttatactgttatgaatcagtttgaatctcttgaaaattagtagatgtccaaaaaattagaatatcaaaagtataatatcatataaaaaattaaaattagaaaatagtatctgtacattcattatagctttataaacacactctataatttctgtccatttttgtttaaattatctgataatatagttagtgtatttatgtttcagttccagtccaggatgttatattgtattataataatgtacataatggatattttggagcataaatgtatattaatattaaggacaatcacacaaatgcgttaaaataatatagactagctaattgatggttttgtctattgagatttgagaatatcagtctctgtattacaatagggaaacttcattatatatacataaaaatatatctattatcaattttttaacttttaattaatgggaaaatttaaatatttatgcatttattgaaataagattagtccactaaaccaaaagtactcttcaactaaaactattcaacattgtagaataagtcaatttttactaaaactccattttaccccttttattccaaaaggtgactctctctctctctctctctgaacccaccaccacgacgggaatctccattgaacccaccatctgagcaccactcgacccaccat

SEQ ID NO: 296201 - DNA, 755 bp, Cannabis indica
atccgagaatccagtgtttcacgtgatttacttgtttgtttgttgaattatgccaatatcacaactttggaacattcattgagttgtttttattaactttaatactgttacaacatctgatacaacaaaatattacataatgcgtttacctcttgtaggttgagcagcattcacaattgtcttgttttcttataataatatcattttattttcatggtaggcggactcaaaactgcatatacattggaagggggttagtggagatagccttggcctcgtgtacagggtatcttgatgcaaatggttgtgtgtagtccattgatgaagataaggttagcaatggtgatattttaaatgagaaaggaagtataatatgtgaaagttagaaggaacaacagaatttgtggaaaccaataaaaacatatgtagacgaagaaagaaccccattaggtcaataattagaattttaagtcagaactttttgggttagtgtaaggttacaaatttgccatgaattgttttgatttgatgtgttgttattacttattagatcagttacagatattttgtagaattaaaattggaattaaaacgaaacgcaatcacccagttagaagattcctccaatcgttttggatcaattttcttttcatattcttattgcaggtcctacgagttgaaccatgttccatcatcaaatttgggttttttttttttttttttttaaatatcgaatcgggtcagccccgacccga

SEQ ID NO: 296202 - DNA, 2351 bp, Cannabis indica
gtaaaataatttccaacattccctccccagatattaacttgagactctcttcctattgcccagacactcttatcagcaataaaagctttggtagcccatatacctttagccacaagggaagcagagccaggtaaagaagaattgagaaaatccaagcttgaacaatatttctctgtcagaacagttttccatagagtccaggactctcccgccataacccatccaagcttcgcaatcaggcaaaaattaatatcagccgatctcctcagccccaaactgccacatgacttcggtttgcacaaggtgtcccaagcttttagagccataaatctgcccttgttagtgtctcctttccaccagaacctacgcaaaataccatcgattcgatcagtaagcttgcgaggaagcaagaaaactgacatgttataaacaggaatcgaagtcaggacattcttaatcaaagtagttcgagccacctgagaaagcagcttagctctccagccttctagccgagagctaatcttctctacaataaactcaaactccgaagtacccctgccaccagtgatgaatgcattgcccaaaaatttctctcctctagacatttcatcaaaccccaagtaatccaagatctcatcacggacagaagcagaacaatttttcgagaaaaacaatttcgattttcgctcatttaaagcctggccagaccacctacaatatttattcataacctccatgaaggaggcaacatttccccgatccgccttgaggaagacaactaagtcatcggcatacattaagtgagttagagcttgtccatccccaccaatcggatatccagtcaactctcccccaatttctttggcaagaagcattcttgagagaacctccccacaaagaataaaaagcaacggcgaaaggggatcgccttgtctgacccctctctttgggaagaacttctttgtgatacctccattgagaagcacttggaaactgactgaagaaatacaatgtctaaccagattgcagaagtgattattgaaaccaaaggcatgaaggaccttaaggatgaaattccattccaatctatcgtaagccttggacatatcgcatttgatactcacaaaagcattcccccccccccccgcttgcctttcaagtcatgaacaatctcattcgcaattatcgagttttccgcaatgtttctgccttttacaaaagcagcctgctgaggagaaatcaaattatctaaaaccgctcccaaccgattcgccaagattttagagacaatcttataagtcgaattgcatagactgatgggtctataatcgtcgaacttctctgcttgaggcttcttagggatgagcacaatgagggtcctattcacctctctacagaactttccattgaggaagaattcctgaacaaactgaatcacttgcgtccccaccacctcccaatactgtttaaagaattttgcaggaaaatcgtccggaccgggagactttaaaggaggcatagaccacaccaccctcttgatctcttcctccgaaggacaagcacttaaccgatcattttccgcctccgaaatgctatttgctatgtagtccgacaaatcctcgtccacaacagggttagtagaattgaaaagcctttgaaagttagaccgaaagtactcggctataccaggtctctcttcaacaatagatccatcatcttctcttatcgcccaaatatgattccgttttcgcctaaccacattagacgcatggaaaaactgagagttcttatcaccttccttcaaccaagactctctagatttctgtttccaaatggactccaaccggttctccacttcgtccagctcaagcataatggtcccttcaatctcaacattttccttcgatggagggcaattttgcacctcacaaagaagcttttcaagctccttgatcttagtttggcaatgcccaaagacaagccgattccattcacttagagccttaacagttgctttaagtttgtagcaaaaaatgaagctgtgaaaaccttcaaccccacttttccacgtgctttcgataattctgcgacaatcgttatccctactccaagcatctagataacggaaaggggcaataaaattttccctttccattctagtatccaaaataataggagcatgatcagaatggcggatcaccaagtttcttaccccagccttcttgaattgagttattcaattgttaagttataattagcctatgtttcgggtctttaaagttagcattatctcgtctattggtgtcttttggagcagttttacgcttgattttcattatttcaggttcccg

SEQ ID NO: 296203 - DNA, 8470 bp, Cannabis indica
ctttatatatagatatagatgatgtatttttacaatgaatttgactaaattttatcttattcaatatttgacccaatttgattttttttaaaacaaaaaattgatttaatgggacccaaattccacccaatttccgctaaaatattccctcaaaaatgtctttaatgtgattgtcttaagccttaattacgcctgattttcacacacatatgcctagtcgttaatggcgccaccagataggtccaaaaataaaaaaaacggatattagtaaaaaaggcgggagattctaacgaatcagaagtcattgattatggccacgctgtcgagttcatatggtctcgaccgcagagaattatttcatatgttttcactttcgctttagacctttacacgccttattctgaaacagtacgctcaagtttacagtctgtactgatcaaaatctacaactagtagtagtggaagccatcaaagctctctactttttttttgtttggaaattagggtttttttttattatttttaaatttgtttatctctttctcgattttctctcctttcctgtttggtttccgggaaaataaattcttatcttctcaaaatcacaacccaataattaccatgcatcaaacgttaagatatctagattttccgaagactgttttgctaattgtgttgtagatcgaggtttatttaggttttgggggttgagataatgccaaggcagaatctgagtatggatttaatgatccctggtaaaatcagaaaaagagggtgttcttcttcggcatcttcttcttcctctgtgatccaaaactacaggtttaagagagcgattcttgttgggaaaagaggtggatccactacgcccgtgcctacatggaggctcatgggctgttcgagatctcccgcgtcggcattgcgaaacatggactcgcctaagtatcctccttcgcaaggcggcaccggtaaaaccaagcaacttcctccggtctcggccaggaagcttgcggccacgctctgggagatgaatgagataccttcgccgaaggttaaagaaggctcggacgagaggagacttaggaaggagctcagagctagagagaggatgtcgaggtctatgcattcgggttctttgcctccgcatctctctgatccatcccatagtccagtttccgaggtaggcttatttattatggtttaaatttttcttttaaatttaaagccatttaactcgtctttgattagtgagaaaattcaaatcttctgccatatgtcctggaatctggcatgaagtatgacttggcaaatttctctttaaaatttatctgccacaccccacttttaaaaatcaaatatttgaccttgatcatcgggttataggttgtatagtaacgtggaatccatatagtgattcgttttgaactatcaataaatagtaaagttgatatgatcacaatgattggtttgttcactactattgctgagatgcaaaacttaaataagaatcatttggggccatgttattgcaagtcatgatcaatactatcctgtttgtgtttcttatctttgtcgttatatgattatgatggtgttgatgttgaatattaacattttatttacttacttatgatgtatttgacatgtagaggattgatcgatctggaactggtagtcgccatagaagaactccatctgtttctcataggcttagagttacagaacgtcatgccggagggttggattcactcagcaatgccagcttaatggaggtacttcaagttaataatctgtttgattctgtgaattggctacccttctatctttattcgcacttattttttattcgtatttcgattgagtaatgtagtatgaagtatttcctttcttttatgagtaaattgtagaagatgttaattgccgaacttgttgcctgattgtcttattaatacaggttgagactagatccagagctcagactcctactgcatccactggtggtgtcaagactcgacttaaagatgttagtaatgctttgatgacatctaaggagttgctaaaaattattaaccgcatttggggtcatgaagatagaccttcttcaagcatgtcactgatttcagctttacatgctgagctggagagggctcgtatgcaggtcaatcaatttatacaagaacaccgatctgatcagaatgagattaactacattatgaagtgttttgctgaagaaaaggcagcatggaaaaacaaggagcaggaactggttgaggctgctattgaatctgtagtgggagagctagaggtggagaggaagctgagaagaagatccgagagcttaaacaaaaaacttggaaaagaattgtcagagacaaagtcttcccttcttaaggtagtgaaagaacttgaaacggaaaagagagctagagagataatggaacaagtttgtgatgaattagccagagatattgatgaagataaagctgaagcagaggaactaaagagagaatctgcaaaagtttgtgaagaggttgagaaggaaagggagatgatgcaactagctgatatgttgcgggaggaaagagttcatatgaaactctctgaagcaaaacatcagcttgaggagaagaatgcagctgttgataatttgaggaatcaacttgaagtatttttaggaactaaaagaagcaaggacaaagggcgtggcatcacttatccaaatgatgaagagctcgaagcttatattgctgcaactcgttttggtttgcaacagaaagaactaaaagatgatgatgggagtgaagtagttgatggagcggaatgtgaagaggatttggctgaaagtgatcttcattcaatagaattgaacatggataacaataacaagaactacaactggcctcatatacttggggctgctcgtgattcaagaaaggctctaattgatcaagaagaaattaaagagaggaagtccacatctgggaaagcaccaagaaaaagtactacttcactacaaaggagcacatcagatggagtggagcttcgtatcccaagtgaaaagcttcaaacttcaggagatgggattgattgggacagattttctgaaatagagaggcacttgcaaggaaaaggttatggggatgaaatgtatggatacaaatcttcaaagggtcttcgagaccaaattttgtccggatctcgattgggacctgcaggagttcatgctagtccaacacggcaatggggacaaccacgcacatctagagattctaccaattcagttctggagaggactgccgtggttcagggaaatggatcaagaacacgactaatggaagccagaggcgaaggcctaatctctagaaaatctaaaagatgaaaaatgctcttcttaggcatgccattccattctatctgcaaaaggattaggtggctgtctttgactttaatgtaagatctatacacagagacacaaaggcagtcaatgttgagatcttttctttcattggtagatgcttttgttttttgatatcttaagagcatcttggtcgcagcgcactcagctgcccgtttactgctctatttcaattacacatgccgtgcttgtagatttattgtagaaagctttgctaatttagcaaattccccttatgtacaaaaacttctagtattattgagatgaatattgctagaagtactcaatatttgacctcatgtgtgtttgttcctcttattaaagtactaaatctgcataatttgcttgtaaaagctgtttcttgggctttttattagaaatttaaatttcaaaccagaagaaaagaaagtagtttaaccatctttaaaaagaaaaaaaaagatattgaagacaagacatcaaaaggtcatttcgattttccccaaccatctttataccaaatcccatttgttggtacttatgagagaccctttcaagggtaaagtgataaaatgacaactaaaaaaatccaatgagatgagggagtaaacttctcaaaagagtcatcagctgtctatcataattcaatggcgacaatcattccattggagcaggcttgcctctactttaatgtaattggtcgctgaatgaggaaaggagacaaaccatttggctctcattatcattatgcaaataatgaggtgtaaagtttggaatgtattttggctctcagctgttcaagggtttcacatttcataggctaataatggctacgctaccattacaaaatcaacttaccaggccaactccaatggaaatatctgtttatccgtaagtggagctaaatagtctcataaaatattattattattttatagagagaagacaaaaaaaatacctacagttagaacctgcatccaactaatatttatataagaattgctaaaagataccactagtgtttagcatccttctcggtttcatatcgctattggtgtagttaaatatctggtccaatataacttaaaaaaaaaataactttcacagaatatcactaactaatcgtaaaacgtcactttaccactggtacctgatagaaatactctatttatatgtatggacattgttttttaatttgtggagtccaatgctttcattggagttgccctaagcaatttatatatgtgtccaacaagtaaaagtaaaagtgtgcacccccaaaccaatttatatatgtgtccaataagcaccaaataagattgcctccattagagttgccctaagaaaaaaatcacaaaccaaaaatctattggaaaagtatacaagatgaacagtcatttttgtcatttggaaagccaaaaagggaaatgaactaccagaaatagaaaaggaaaataactcgtaaaatatgctcaaggagtttagattgaaaacatagtaattccttcctatcccattgactgcacacaaaaagatgcacagaaacaatatccagaagccttagggggaaaaccatcaactgtactattatgttgaaccttaaaaaaatcagaatgagtggcattcattatacaccaggcactaaagttagcccaaagactctacaatatgacttacagtaggcataatctactaaatcaaatttatattacagttcatcatcaccaacttccactttcacagaacagagaaacaaatcttcatcatctttctttgcaaagttaccattgtttggttgagcagtacgttcccctccgctgaattctaatttcgctcgagcaatctcactaagatctggaagtatcattcaaaaattagtcaaaagatagtatctcaaatgtctaaagatgtacattaaagagagaatgagatacctagatcagctgagataagggattccccttggtaatttggtcctgccaaaatggttcctgatggagaaactataagacttcccccggaacagacaacagtatctaaagatgcatcgccatttgagtcgccagatgtgtattcttctggaggcattggatagtctttccttaagcaaaactgatttgcagataaaacaaagcaaccaccttccaaggcaatatgtgtcattgatgctctccatacatctcttgcttctgctgttggtgcacaatatatttcgatacctataatgatacttacacaggttacatgctagtcatgtatatttgtaaccattattttgatcgaaagcggattgtgattgtaaaagagtttacctttgccatacaattcagttcttaaatgtggcattctgttgtcccaacatataagtccaccgatttttccaatcgtagtttcatatacgggcagtgaagatttctctccaccacaccatacagcagaatcagacgacaatggcagtaacttgcgatatttgccaagaaattggcccatggcatcaaaaaacagaactgtgctaaagagaaccaattcaactctctccactactcctattactagatgaacccgatatttctcagcaatgcttgcaagctgatcaacttcaggacctgtatcaaacatcagagttgcataaggtgaataaagcaattgtcacattctatagaaaaagcttaaattgttataggataaagacaattcaccaggcacactaatagctgaggcataatacttttgatactcattgttatcctctaaatggctttctttcatagcattaaacatcacactatgtggataacctccaacaaaggcttcaggaaatacaactaattgtgatccgtatgcagcagaactagcaacaagtctttctgctttatctgccaacaacaacaagtcagtaaatagaaacgaagataaactagaccaagtggtaattttactactcttgcattgaacatcatcatgtacatactaaatttcagagatgtgaataaaagaccagaaagatgacaaaagcaaaatcctatactcaaaacctgttcatgtttacatgtatattaagtacaaaatagtactaaaaacaaataacaaacttgcaatgaagggtacaatgaaaatggtgggacatcaaagaactggaatttatatgtatgcgccattaagtgggagggacccaattttgaatgaaaaaaatatttgtttggcttctaagaaaatctggtcccacaaaaaagaaaatgtacaaaaaggaaggaaattgacaaaaaatcaccaaatcccacaaacaatctgcgtttaacccgtgaaaaattcccatttgggtagttgaaatggtgaagtgaacagtatacctagcgtagctggggtgtcgtagaacacagtggaagcctgaacgacggtaaccctcaccaccggcctcgggacgaccacgtcgttaagcccatttacggaattaacggaatgattcgatttcggtgttcgagtcttagaggaaggtttcagaggaagaacaaggtctggtcggacctgggtgaggagccactgaatggtctccccatcagaacgatgacccagttctcgggtcagtcgaaatataccagggcaacacgtggcgggtattctgacccgcctgtgacgaccgtcgactttggaatgcctgtcgaccccctttacacgacgccgttgcagcggtcctggctgttgtatctggacttgaatcggcaaataagggtgctcctctccctcgttattcataggaggagccgtggctgtggtggttacgggttgattagtgtccattgtggtgtcaagaaaggaaagaaagagtgagagaggtactaaaaggagaagaagaagaagaagaagaagaagaagaaaggtgattatctgcaatctgttggataaattgtgggggttgcttttaagcctaaggctgacacaacaatatacagtcagtaacaacagttgcagaaatgttgcagattgactaaagaaatttcagagtcgaagtccaatggtgttattagtattccatggaattaggtgtcgtttattgatgaagttacacgacatggcgctctacctaacaattagttgcccttgtttcttatattattgttataggaaaatgaggcacattccatttttagtactttgacatctccaatgtttaaaaattttattttatttatctttttacattattctttgttatgtgaaaagacgtgacatctatttgagtgacacgtgagaaacatttcatgacctgaacgggtaatatgctccataatgtatagtctaaagtgatttatcatttgtaaacaactcattagaagagtaagatagaatattcggacatgataaatgacaccgtccgacctgtgtcgatcttacaacaagctcacatacaccggccaaggtaaatgcatgtggaatcctcgattttagccaaccgacagtggaatcgtgtttatgatcagtatcaccacgtgtacacaataagaataagtaaataaagagacacaatatttttacagaagttcggctcccttagctagcaagtaataacctactccccttttagtttattgataccaaagataatattactcagatcacaagtgttctgtattctggaatggctctcttaagattacaatagtgagaatcagtaggcaagtaagagagatgagagaaacttagtctctactataatgcttgaggcgtatagaagagagagagagctaaaatttatgacttagagctttagagtttaggggaactaggtttaattttgtgctctttatataggagagcttacaagagatgataggttcatatctccttaaaatgaggagatatcacctatttgttacattataaaataataaataaataatgcgttaattagtccccaagaataggtaaattatgaagtttatgggtttattgaagctcaattcattgcttgaagttctatttgttggaaatttttaccaggatctagatttactaccaagtatgtttgattaacatcctaatatgaattctaaaacaatgaaataaacacataagagt

SEQ ID NO: 296204 - DNA, 4566 bp, Cannabis indica
gggccgaacccaattctctaacaacacccccttcctcaaaaataaccttgtcctcaaggttgttcagcccgtatgtcttgcaaaatgaggaaaaattttcccaggtagcatcctcaagagaactcaaagtccattgtactagaacttgtttgagtggacccgttggacctgcagtgattcgcgttgccagtatagcattcggtaacatcacaggtttgttggctacagtaagcttgggcaaggggtagcaagttacagagtcgtttccatgatatggtttcagtaaagagacgtgaaacgtggggtgaatgcgactgcctggtggtagctccaatcgataggcaacctttccgactcttgctgttactgcaaaaggtccgaaaaatcgtctgcacagtttggcattcagtctcttcgccactgtggtctgtcgatacggctgtagcttgactaacaccaaatcaccgactttaaactcaatgtctcttcgttttttatccgcctgctgctgcattctatgtctggcctgttgcaaatgaagctgcaaatggtgcagaatatcatcccgcgtaagtagatcatcttccactgcttgtatggttgtggcccctcttgtatacgatggaatggttggcggtgttctcccataaactgcttggaacggtgtcatcccaatggccgaatgatgactagtattgtaatgatactcaacccacgataagaagtttgtccactgttttgggttgtccgccgaaaatgcccgtaggtattgttccaagtagcgattggtaacctcactttgtccgtccgattgagggtgatatgccgagctcatgttgagtgaagtacccattaattcgaacaatttctgccaaaaggcgcttgtaaatatcggatcccgatcggacacaatcgttcttggtaatccatgtagtttaatcaccatatgtgtaaacaactcggcaactttagtggctgaataatggtttggaagtgctccaaaatgagcatacttagtaaatcgatccacaacaaccaaaatattagtggctccgtttgacttgagtaaaccgacaataaaatccatggataagtcttcccaaactctctccggaatagctaatggttgaagtaacccgtatggtgccttggccgagtacttcactgtctgacaagttgggcagtttcgaacaaactcctttacttctttacgcatgccaagccaaaaaaaatttgctcccagccttaaaaatgtcctctcgactcctgcatgacctccaatacgcgaagaatggaattcagccagcaactgggattttaaattagaatgcttactgattagaaggcggtggcggtaatatagaagtccgtctttgacagagtacagcgaagtatcagcgctgccttcttgtaattggctgtgtagttgtcgtaggtccgggcatgtcatgttttcttgcttcaattcatccagaaagtcgaaagaccccgtactcatagccagcaatagattcgaatggtattctgccggtagtcttgagagcgcatccgctgctgcgttgtgtttgcccgacttatattcaattgaaaactgatatcccattaacttgtgcaggaatttttgctgttccggagtctgaataacttgagtgagcagttctttaaggcttcggtgatcaatccgaataataaagtgcctacccaacaaatattgtcgccatttggtgactgcttcgactattgccctcatctccttaccgtaggtagaagctgtagcaaatttaggtcccagttttttgctaaaaaaagctagtggatggccttcctgcattaacacaccaccaatacccacattagaagcatcagtttcaatcacaaaaggtttagaaaaatcgggtagatggaggactggtgttgtcgtcattgccactttgagctgttgaaatgcttcggctgcctcgtgattccagtggaaactatcctttcggaggagtgaagttaacggtgcagcgatagttgcataccgagctacaaatcgtcggtagtaacccgtcaaacccagaaatcctcggagttgtttgagcgtcttcggaactggccattgtaccattgctgccgtttttgccggatctgcccgaacaccctgcggagagacaatgtgcccgaggtactcgattgtgtcttggaaaaactggcatttgctgagtttggcataaaaactgttatcccgcaataattgtaatacagatttcagatggtgccgatgctcctcattcgaacgactatagaccaaaatgtcgtcgaaaaaaactgtaacaaaacgccgcaaaaatggtctgaatacctggttcattgccgcctggaatgtggagggagcgttggttagaccaaatggcatgacgacaaactcgtaatggccatcatgtgtgcgaaaagcagtcttgtggatgtccctcggatccattctaatctgatgatacccagcacgaaggtccagcttagaaaaaaccttagcgctgcccagttcgtctaacagttcgtcgatggtaggaattggaaatctgtcttttatggtaataccgttgagtgctcgataatctacacaaaatctccacgtcccgtcttttttcttgaccaacaaaactggcgatgagtatggacttgtgcttgttcggatgaacccgcattccttcatctcgtgaatcaactgctcgatgatgtctttttggaagtaaggatatctgtatggccttacattaattggagaggttcctggttgtaagaaaatgcgatggtccatggtgcggcaaggtgggagatgtttcgggtcagagaaaacatcttggaactcagtgagtaatgcagacccttcactgggcaaacttcgttgaacttccactagtgcatcggtacccttttccagctctgtcacggctgtgcagattcgaaaacagtcacgaacatctccatctaaaatcatagtatgtagctgagagtaggacagttgatgagcctcgaaatccttagagcctgcgagttttacgactttaccgtcccatgaaaattccatagttagggctttatggtcatgaatacaaggacctaaagtttgcaaccattgcatcccgagcacgacatccaatccacaaatcggtagtacatacaaatcgaccacaaaacggtgtccctgcaacagtagctctactcctcggcacagtttagaacaaagaagaaaatggccactgcccatatacactttgaaacgcttcgtctcctcccacgacaaccttagttgagttgctagtgactcctggataaaattattgttgctgccggtatcaattagaacctccaaggtttccgtcccatggttggccgatattctgaatatccgagggtttaaggggtttgacaatgagtttaagctaacctcctcctctgcattatcctccaagtcattacaaatggtatcccctgtagagagttgttcctcatcttcggaagcacacaagatgagcattctatttttacacttgtgaccaaaactaaacttctcatcgcaagtaaaacagagacccttgtcccttttttctttcaatttcgctggtgatagttttttgattggtaatggggaaatgctcgaaactgatgactgtggtggagtgagacctggtttaaatggaactatggagctggtagtcgttgttgtacttggcgccgtgggcttactgtaccaaggtgaacgttgcagatccaccttccgtcggcctcccaaatcgtcattcctctcttcgaataattgagcctttgccatggcatcattcaaatcgatgggcttagccagaaggagttcacgccgtatctccattttcaacccccaaacaaaaaagttaaggaacatcgcctctgagactccagtgattctcggcataagagtttcaaactctgccctataatcagcaactcggcctgcttgagtcagtttcgacaaccttcctaaaggatcatcgtatatcgatgtcccgaagcgttgttgcagtgctcggataaaagaagaccaatcagtgagtgcccctcccttctccatccattgaaaccatgttgaaggtgacccctccaagtgaaacgcgaccatcgctaagcgcatttcatcatccaccttgtgcagatcgaagaacttattgattttgtagatccagtcctcaacgttttctccatcaaacctgggtaccttgacccgtaaggtcttgagtagggaatttacctcctgatgatcccttgtcatccctgtcctcctagtgttcgactggccagactccctcgcagtcccaacgtgaccctcggagttctctgaactggcttgcggcaactgggtgaacctctcttcagtcttagctacatgctgctccagtaaggcaaaaacttctgaaattgagcatcagaatgctgtttgaaattgagctccattgcttgaagtaacccagcaatttcctcattcttcattgtgagtaaaatcaatgaaagcaccaataatacagtacgcactcttcgagtcagtgcccaact

SEQ ID NO: 296205 - DNA, 4917 bp, Cannabis indica
aagtttccttatcgataaatagcttggcaacacactaaatattaagaaaacatggagaaaatgataaaacgaggaaactgcctgaaaaacagtaggtcgtttctgtaaaaacagcgagccgtttttttgggtttgctcagtaaaaatggtagaccgtttttcactaagaaaaataaagagtctccaaaacgactcaaaactaacccaaacttcaaactaagctccataatacctataatcatcatagcgaaccatttccaagtgatcaaaccagatataatacaatgtaacacaattcaccattgttaagtcaattcacaattcaaactaagctcaaacttgctcaactcaagcatcaaccactaaaaccacaaaaattaagcttaaaataacttgaatatactacagaaaaaatcaagaacaaaccgtaattctaatagtaacaactcaacaattgcatgctcaaaactaaagaaaactcatgtttggatcacaccacttgaattcagctaaaattcacttgaattactgaaaaacactctgaatttccccttgttttggttgaaccgaaacaagagagaaagagagcaacaacagattttctagttttttatcttttcctttgtttaattaattaacttagataaatcaatagttttaacttaatccactaaacaaaataattgccagctgccatcaaaagggaaagccacctaaatcaaactaaaatacccatttgaccctcacttaaatgctaattactaaaatggactaggggtaaaatagtctaacaccataacccccctaatctcgatattctaaatatcaacaataattcccctactaagaccaagatacaagaccttgtctatgtgactttaccgattaaatgtcgcgttccattgttactgggcataaaaatatgaaaaatataaaattcatagatatcataattaatacacttagaattcaaatatatctccataatcataaaaataataattaaaagtctacttttgaaaataaaccctaattatctgttaattctcaaaataaaactaagtggtcattacatcagatctaattgatctatgataaactaggtgatatgaccttaaaataattatagaggtaagattatgatcactgttctatttgtcaataatggtctcgttccgatgtaaatccttacctccaatgacaagtttattttgttagttccttggaaaaaaaaatataccatttactaaaagtgtaaataaaccttagatattgattatcaaatcagtgtaaatttagtgtactgataaatcatgaaatttaaatattcgaatcatataatcataattaatttttactgtaatgatgttgctataattataaataactatatcttctaaatttaaataaattttttatattaaacatataattatttaggtaaataaatatatgaactaaacaattgataaaataaaaatataatttttgaattttattaattaaaaataatattaaattgaatttaagttttatttaacacaaaatcccaacattgataacatagatgataaatatcaataaagaatttcttttccccaagtttgattatcttgatagtattataatttaaaaaactactaacctacatatggaaaactaggcaagttttccacaatcataatttgcaacattaacaagctttgggaaaatgaatgtgtaaaaaatggcgtccctaatgaacttcaacccccacatagaaccaccattttgaatccacccagataagaaagagccagcgataacccaagtggctcgccaccttctctcctctacataatcagatagtgctttagctatgtctctcgggacagctccttcatttcgtgcgacatatgccccaacgtgcctgcccaacaccacagcatcctcaagtgccaagcaaccgccctgtcctaggtccggtgtcgtagggtgcatggcatccccagccaccgtaatgttttgtttgcttaagtttccaaatgcaacactccatggtttcctcaaaactaatggtgcccatgaaattgttgaaaggtcgacatgctttaccacatctagatatgattcagggaaatccttggcataattctccagtacttctctctgtattgcttcagggtctcctctcagctttgtccctgtaatttatattagcaaattaatatatacatatataaaagtttcttgttttcatagatcatgttaaatgacaaatttcttggttaaaaagttgaaccttcttgtggagacacactataagttaaaaaccaataaatctctttatcactaatgggaacaaaaccagctctttttccatcaccaacaaactgttgaacttctttctttagtccatggccttgaggatacacagccaatccacgaaccgcagatcgaccagaatatgtcggttcagcgagtcccaaacaccttgccaccattgagtgcaccccatcacagcctatcagaacctatatttgcagagctatgactatgagagaggtcaacaaatgacgattttatgtttttgtaactttaatgaaactacctttgctttgatgacagtttcatcttctaagtggacaacaacgatagatgagccttcatgttcttgggtttcaatagcagtgatcttacaattgaagcgaatagaatcggttgggagttcctctgcgagagccttgagcaaggctttcctgtgtagtgttataggtctacttccattcattgaaaaaagaaaacaatatcatgagattgagaacatagtgtaaatcaacaaaaatttttatctatttaacacaaaattcgttgtaagtcgtcattgccttacatctagtacacgttattaaaaagagtagtataatataggacggtgcttacctattgctcgtcattaaagggatcatttgaattgctccagtactcacattggttacgtatatcctgttatataatgccaaataagtgacacaaatttgattaataacagtcggatatataagcgtaccatatattattataatattgttacggaatattaaagtacttaacactctataacatgttatcttataagtaattaaagattctttataatatttattaaactaaaataaataaaactcaaaattaaattatactaataatattacaatttataaaaatactagacatgccgtttagcatttctcatattattacgcttaatagactcattgttcagttttatatgaaatatttataggagggccatatgaatctttaggtataatatcgtgattagtatactttaatatttattttaacaaatattataaaaataattaattaattataaagtgacactccatcttggtgttgcaaattagcaatgctctttaagtaatagagatgataataatatgtagaatattataaatatgtaaattacctctctaagggggcgtaaacagaggtcaacttttgagaaatgccgagagcatcaagggcacgccaagcgttttgagagagggtcaaggctgcgcctgtggttctaagctcatcagctctctccaacaccaatgccttaacccctactctcttcagtgccaccgctacgcctaaccccgctattcctgctcccactataataacatcctccattctttaccttctaatcaccttttgtttttgttttttatttttcttttctacaaatacttttgagtacatgactactgcttaaatacaacccaagtcccgtgtcttattgacgtgtttgaccaaaatggaggctatagaatatggtccaatattttggtggacaagaaatggcacacttatcttgaatattcattgtattcatgaccttttaatcatttacttttcttaatgcaactcataaagtttctttttcagtagcggttttttcgtttagagtaatagtgtcctctagaatttttaagtgtaattgtaatacaatttgtaaacggctagttcataggtagaggcaatgaaatataagtacataatttttcgaaggtcttcctatacccgtctccaacattgactacgtttttctttagaaaaaaaggtcctcttgtggaccactacatattttgacgttattgcgcagtggacccataacttgccaattatagtaatatctcaacaaagtgttaatttatataaaaaaaaataattctcacagtgataaataaatctatatccgttgatattacgtgtaatgtatgtttcttttaattaaatttaatttaataacattaagtgctgtatgtttaatttttataattaagtattgtatttttattttttaatttttgaaataagatttgaaattttgatctgtgaattttttttaactattttggttacaaagtacaaatctttttcatcaagaaatcatacattgtgtattctaaagctattgatggaaaaaaatcttctgtcacctgtcacattcctgtcccttcaataaatagctatcacgtgtctttttttttttttcctatttaaccgattcaatgttcaagattcactctgttagttccatctcttcttctctctcctcataaataattatttcctaattaatgagtatattaaaaaaaatacatattctacgacatttaatatattattcaaaaaaattatgatatattcttataaataaagtttctatggtatatgcaaatgcaattttaataaaatttatttaaaatatttcatagcctaaaaattaaataaatggctactataatagaaaattaaatatacaatccatttaatttattattattattatatatatacaatccatttaatttattttctaaaaaaattgctctaagatttatttttttttttttgcaatta

SEQ ID NO: 296206 - DNA, 1018 bp, Cannabis indica
gtataaatttccatctctagttgagggggtggcatttaaatacctatatgacatttactcggtaacacaaaactgccaaaatgagaaatgtgttcaatacacacaaaaaattattagtttactccttaaagttatgattaaaaagtcctttcaaatttagaaattactttttagggggtaattattatatatacctacattttaagcaattaatatgggggttcaacatatgacacatgtatgaaactctgcaagataagttggctcacatattgaaatgcccaacattcaatatatacgccttaagaaaagaatgaattatcagtcctgatgatacaacagccagcaaaatgaatataagaaaatatgtacataatgcctcaggtaattcagaaccaaataataggtcgtcaggaattttccaagtagatatgctattgacgaggagaagaaagccaagcttatcgcgagattgaatgcattcgacttagtttgtacaagagatacaatttgaaaaagcttatgaggagtgaaatcctgcatccacattttactcttttcgagatcagcgagaaaggtttaatccatctaagtgattcgtgaggcgatacacattcattatacatcaattattcaatgtattctttgaggagaaaaaaagttaagttgaagctacactgtgataatgcgataagatttatatcatataataatagttgttcattttaaatattggttataaactatttctacctatttgtagataaatgaaacatgaagaatgtctatgttaattcataaaccgttacatagatcagatcaaataactgttatctaatctttataaatagtaggaacacataggcaggggcggacgtaatggtaagcttaagatacccctgaattttacactgttgaataaattccacttataaccagtcctgtatacttacagatatccacatcagcaaagtaaaaacagaaacaagcaaacagacacagtcctagggtggcttcg

SEQ ID NO: 296207 - DNA, 3785 bp, Cannabis indica
ctctctctctctctctctctctctctctctctctctatttgatgagttcaaacaaaattttgaaaaaaaaaagcttgaattttagtgtgaattttgtgtattctcttggttggagcttgaagaacttaaggtagctttctttaatctctttggcttactttaatttctggatttagatttgataatggagttttatgtatttttacgtttgtgtttgcatgttgataggaattgagttatttatggtgactattgtatgaatttacttgttcggttgattaatatagtcttggggtttatggattggattttgaaattgaatttctagtcaaaagactttgagtttttaggtttcaagcttgatgatttatgtgccataattgcgtttgtggatttattttgagctattttgttgaactaaatttcttactaatattagattggttatatgagttgagttgtatgttttaaggtatttaagcacgaattttgatgtatgaaatggttagaaaatacctcattttgatttggaagtttgtttttaagttatggtattttattgtggagtttggtgcatttttgagtacccaaatatgagtttttctgggtttttaacccaggagccgcgactcggttcttgagtgtcgcggcccttgatgtgttcagcaaggcagaatgtttttacaacttgttttggccattacctttgactctgaactctgtttgggactttctttataccgttagaaagctcgttttgggctctatatgttagtctatgattggagttcatattatgtatatgtataaaaatgaatttggaattaaccttatttatgaaatctcgggaatgtgtgactagaattaccaaaacttgcttaggaacacccgagaattcagaatctccacatacttaggttaccaggtaagatattgagttatcacatagagattagcatagtgacactcatgtatgttattttgtatatttacacgagaaaccgagattaagattattactctaagtttagttattttgtggtctagtgttattactctagaatgtatgtgaatgtgaatgcaataatgcattaaatatgttgatataaagagttatgcggttaaggcataactaggttagacttggtattcaaaaccgtgataaatcattctaaggccttattgtaaatagacgtgtgagtgtaatatgtaggtctatgttaaatagacaatagatgcagtggcataagcacttgagtgattataattcttatccatattgttgtttatactgtcttgatggacattggctcacaggtgctctattgtgcaggaaagggtaagtcggtagttaagcagtcatgagattgagagcttttgcagtgtattgtacatgttcaggccaagttagaccgcgaggattgggtttactaggaaacttgttgtaaatctccacttttatcgcttaggtcggcgtgtattaatgacttgtaatattttaaaaatattttacgggatcccaaaatcaaatgtactctttttggatttatcataacgtttaattattacaagttattattttattctatattttaaaatttaatttccacacttggctctaatacatcccggattaacagaattagcctatgtttagtcttagtatgtggtgttccttatgttacgacgttacatgtaacctcctcggcagcttccctaataacaatgggaacctcagtcgaatcatgcttcatgtttgccctattcttcttcttcttttgcttagatgttggttgcacagaaactagtacctcggctaccgacccttgttcttcagtctcccatgatgaatataacccatatcgtaggaacttctcctaggtagccagcaaagagaagttttgtgccttgttcagtatttacagaatggcttggtcccttatcctcaagccaagtgtgaaaggaggttggtcataagttttggctcgctgaaaagacaggtggttggccttcatccctcgcataatataataatcttggatgaacctacatatcttggagatatctttgtccatcgtgtcggtcaactaggaatagtcaacttgggaaaaatagaaataacctgagcgatcgtgcccgggttagacttcaactgaaagaatcaatttttatcatgaggagaaggcatcccccatttctattgcgcgtatagaacgaacagcgcaaccaggtacttgatctccttcgacgtgaattgcgttaggcagatcatgttataatttgccaccttttggaagtatgaatgaaggggtaaaagagccccctattgggcctgtggtttggaccacacgcaaagaccatcccagggtcatcaacaagttggctatcaaacaggagaaaggcagtcacgttctcgatgagccttttcttgtccaagtttgtaagcctttttagtctgagggtggatggaggaaaaattcacattggcttaagcctttcttggtatgcagacgagcaagattccttatactccttagtaacataatggatcttttcaatcagtaaatccccacgtacagtaatgggctgcccggactcattatattcatcgaacccttgaaattgtgcaagagcagcgaccttttcctcccaatcagcttgaactaggcgggcaccatgatggaatacttcttgtaccttggcatcactagcatgcactttagcagttacttatttagtagagccctcgtaaggagcatgaacaaacaccatttgtcaagcaagatgtgggtcttcagatgaaactttcctgtaaattttcttaggctgcaccactttcctagtcttgagtagcctttagatgaaggataatgtgtgatgttaaccacgatctctacttccatgatgactttccttgaaagttttggatcacctacttgcaaagcatccggaacccctacacagaccttatatgtccaagaggtagccagatatcaccttaaccctcgattcaattcccaaatgaatcatctgtaattttcaccaccaatacagtcagggtagtgatggtgttgcgcggtgggttttagaggttctgactcctaacttgttacttcccactcgtcaaatcttgacattaaagtctcaccaatgataaagaggttgcacagactctagactggttctcatggagtaattgaagtaagtcgacgtttactcgatgtttacctccccagaagtcacctgatttcatctacaaaagagagaaatggaggtaagaactgaccagggtcacgaaaggtcatgaaaagaaataacttagatgatctgaccaatcagatttaaagattgagggaaggaaattttgtcctaatgacgagaatcctagtttgaagagcacgagatgaacccaaaattctccggaaacaccaagcagggtgtgtttgaatgttttttaacaaaaaatagtgcaatttgtgaggaaataaaaaattatagtccgcacgcatgtattcaaaatcaaattatagtcctaacctctaaaataaaggacagttcataaacccagaagattcatagcggcaattctaaagtgaaatgcaagaaattaaagagagtgcataaagagtttaggaactcactcactgttgaatatcaccaagtaatttgagcaggagttcaaaaatgatcctaaaattccttgaagcttcaaagaaatctagagtttcgagagagggagagagagagagagagagagagagagagagagagagatgttatttttt

SEQ ID NO: 296208 - DNA, 3327 bp, Cannabis indica
ttccccgtacattaacggcctaatttccatctctacctagaccagacttaaataaaattaaaaataaaaatgaaaaataaattttacaaaacacatattttctatttttaaaattaaaaataaagtgacttacacgttattttatttttaaaataaatttttaaaaataaaaattgtactttattaaaaaattaaaaaataaaattattaccgaacaacatttacaatgatcaagcttttgtaatctgaataacgtaaggcactactaatttaagatgagtactcccactaagtccctatatttcaagttgcaattagtataatttggtttgcttggaaatgaggattcaatcattatgcttacggtgaatttcacttcagccttcaagtcaaacagatcaaggtacaagtcattacattattattagaatctttaatattcaattaaataaataaaacattaattataccagacaacaaagtcaagatggccgagttggtctaaggcgccagtttcaggtactggtccgaaagggcatgggttcgaatcccattcttgacattatttgacatcttttttttattttatttataataatgtgaataaaaacatcttcattattattagtttttttttgttgctatgcttggtataaatatgaacaaaaccttttatttccttaaaaaaaaaaaaaaaattaatgaacaatatttatccaaatccatgatgaaatgggagtgggacacatgaagcaagattaacttattaaggggtaacactggaatgtgcttatatatccttagttacaggttgcatgttaataaacaccaaaaaataaaaataccaaagaaagctctctcaactcctatatctatctatatatataatttcctttccctcaaaaaatcaaaataaaaacaacaagactaataaactatacgtatttttttttaaggaagaaaatagctagtaatcttaattgagtgaattatggatgccactccccttatccgatgacccaattaaaccttccctcctcaacttgtcctccttagctttcctgcaaaacaccacccaagaattgacctcaagagatatacaagcgccgatcaacgtagccaaacacaagcagtacccaagcttagcgtacgagcccccttgacccattacttcaaacccttggaaaacgttgatcactcccaaaaccacgcacgcgtacccaacaaagtggtgatatgacttccaatactttctgaatttgttcgttgttttcggccgaaacagcagagccaatgtctgaagcgctcccagcaagaacgccgcgaaacccagcttacggtgaagaccgtactggactcccggtgacagatcgcctagccgtattccaacagcaaatcccaccgttcccagcacgaaccccgatagctgaatccccatgtggacgtagaaccaagttggcccaattgactgtatgtgtctcaggtaacgcgccgtcacggctcccgtcgggagtaagataccccaggcgatgccgttaatgacgccgtgaaatgttctcaaggttaagatgacgccgtttcgctgcccccctgcggtggatccggattccacgtcgatggttgccgtggaagacaggtcatcggcgttggtcgggtgaatcgtcggggagtagccctggacgtagaggccgcggttccagacgtgatgaattcttgtccgattaggagccagtttgagggtggcgaagatctggacggcggcgccggagtggacggtagcgagttttccgccgtagagtgtggcggaggaagaaatgaggtggatgtcgagaggacgagagaggagtggggttcgctggagcttaacagtggggtcgattacgtaagggaggaggacaatttgaccggaattaggatcgggaaaggcaatgagagctcgggttccggtcatctctgaggatacggggttgatgccccagcctacccaaccggagggagagatgaaatttccgaagaagacgaggtcaagtgttgagttgtggcggtggaaggtccaggctatggaggcttgttgggatgggagtgtcatgcatttttggaaggtttttgtttgagtttgggtgttgcagtgtgaagaaagtgcattgttgggaaagaagaagaagatgatgaatacaattatgatgaagagattcatgttggttgggagaagtgatcaatatggaataagaatgtgaatgagttcttttgtttttgagattttatgtgttggagacttggagtttttgaaacaagagtgtataataatattattggacggtcgtgaagatgatgattactactaagtataatgatgatatgagtggaggaatactgatatgagcttagctttgaagtaaagcttatattatttctttcttttggtttggtggtgtaagtagaaatataagatgtgataatgaaggttattcctttttcttatataattaaatatattaattgtcgcttgtgtaaaaagcttgccagttagaaaataccattcagtaaaaaaaaatgcctattgttgtgtaatcatttttattaattataacataacaatgtaaaaaaagaaatggaataatgaaacgagtggttgattgaattcatcgaatattcgaattcaagtctaccggtacgtatattagagaacgcttaccgcacttccctttgacaccatcgtactatgataaacagctcatataattgaaatgagggtattaaagctagatattattaatcactacaagaagaatggtcattagcgattgaaatttccacggtatttataaggagatccctgggtgttggatattatcgcaatgacgctaatgcgcgttggtaataaattgtcgctaatgaagttttatagctgcccactgatactccgccgttattataattaatagcgacagtcttgccagaactatatattgtcatatgtgtaaactatggtactttattttaaataatatatatgtattttgtgaataggttaacttaaattataatttgtgagaatattttatatatatatatataaaaataaaggttaatttaaatttttgcaccttgaatttcgacatataccaaatcatttcaagttgttaaaaattattgaggttgtttgatttaacgatttttatctaattttactaaagaaagtatgacgtgcgtgaatgaaaattttaatagcacaatttaatccatgttaaagttcaagagatttgatttgatagacaaaatttaagggcaatcgtcactgttgtcgagcaaatttcgcaacaccaa

SEQ ID NO: 296209 - DNA, 5995 bp, Cannabis indica
tcaaaaccaaaaatgtataatgaaacaaagcaaaattgtaaaaaaatagagagaacaactggaatacaactagtatacaaactaaataaacaacaaatatcaaaccacaatataatgttaaaaatcagaccaaaaaataacgataagcaagaaaaatacataaataaagattaattaaaaaaaaaaaggaaaaatacgaatagaaataaataacagtttataaagaaaaaaatcaaaaaataacctaaatctaacaaatatttcaaacagtaacaatatatctaaaacaaaaattaaaacaaacaaaaaaatataaaagcctaaaaaaaaatttaatgaaaaaacaaaacctagaacaaatataatatttctaagttagggcaaaacgaaaatgaaactaaaataaaacctaaggaattttatcttattgtttcttcaacttcttagtctcagggaaagaactatttttagcatcattactttttgatttcttctgaagagggcaacgatcacgtttcgttacaagtggagaaaaatcagaatcaccttcttcattaaggggtattttcctttagctttattggccagaaatttaagatccattttttttagattttttcaataatggagaagggaaagatgaagaccgagtcacaaccatctatattaagtggatagaaaaaaaaaaggaaaaaaaacatgggcaattgctaaaatggaagttagagatgatggagggaagcagttcttttggaacgaaagtgaagttttgatcttaaggatgaacattttgagcaaacgaaaaataaaaaaatgaaattgaaatcgaaaataaaaaagaaaatgataacaaaagagagggaaaatttattgagtgttaatctaaacacatgacgtcatcaatggatgcaaaacgtgtgtaaaagatgtttagataaataaaataataataaaaataaaaatattattcaatctatatttttgaattaaaatgtcattttatatttttgatgtaaattttgctataatcttttgtagtccaactaaattaaagagaaaaaaaaattaatgatggtggtacgtgcgactctcacacgtgggactggaacatgtcgaaacgacaagattttcaacgtagttgataattgataccaacgagttacttctcgtatcttcttcatttattcataaagagccaaaaaaaaaaaaagacaatcttcaactgtaaatatttattttctcttttttggtttgggatttgtctgaaatgaacagacgagttttggcttgagggtattctttacttctcaaacccttctctgttctctgttttgctctagaatatgtataagctttcttctcaagtaacttaatcatgtcttttcagggttctctttgcagttttctataacaccctctacgtggtgtactctcatctacatttttcttacactcctgaggtttgctttctttacccttttcttttacatttgagtatgttccaattttgatgtgggtttattcaaatgctgaatcgttgtggtgaatttttagataataatatatttgctgttgcaaatttactaagtcttaattcattggtctatttgaagtgtaatggagcattagaatataggggaaacattcatgggattgatttggcatttgagatttcctcttaattcttatttgtggacccttgaaaatctgtggattcccccaagttctttccttgtttaaaaacccttctggtttatgttattgtataaactaattatttaatgtacttttagtgtaattaattctggtagtttttagttagtcccattgtgtccataacatgtagaattatttgttttttgtgataaagttgactgtattaacttaagaaattatgatttaagaagaggcctggaaatagtcaataatctatattttgtttgatttgcattcatgtgtttcagtaatttcttactagcttgaattctgccttaaatgttcataaagttctttaatgggtttctctgcaacatgtattaattgttagggaggacctatgttgatgtgaaatagaatgaagatgaatatagaatatcaaggtaatatggcattatcattattttcacaatatatctcctttttgggatttagggctctttttgatgtatctttccaggtgctgagtagacacctgaaagaactagtgttttgagtatcatgtgaacctgaaactaaaagcttcaaatcttcaaatacagagctggctttgtcttaacagaaacctggttattaatttgagtttatttgacaggatatgtggaacactatccaatgtgcttataccatgcaatgagtagtgcttatactattatatgcccactattcttgctttatattgcttctatctaaaactgttagtatataagcatgaacaaaatgaaccctcatttattttatatataagagctgactacaatttatatatacttccaacagaatattgttggtacttagctatattggttaatggttagtatagagaagtgatttggtaagaaatttagcttctctgtggagatttgcactctaatttttagataggttattctgttagggatgaaaaaaatgtccaatgtgagaaaacttaataatgttgtgatgtaacttataaattatacaaatgccattaattaagctgccaattgacactgcctgcttttgctttaggctgtgaaaatatgattgtttgcccttcaataagctcatctgcgaaaggtgctgtgtgcctgagtgggtatatccaaacacagatgggcagcaagatgtcttctatgatgtcccgaaggccatctagttcacgctgtttctgtttcaatcctgggaattcaaacacaaagtatacacatttgtttgtctccaagaatcatctgtctagtgttagtcgaacatctcagagaaactttgtcagctcttgcttctccaaagaaacaggcaaattgtggtctttaacagctaaagatttggttagtgctgaggggacccggggaagaaaccttaaaatttcaatcgcaaatcatgctttgaacatgagaattgtagtgcccaaaggaatcaaacaaacaatgcttcccaaagtcagttgtaatgttggaccaatttcttggccatcgggctgtgcctctgccggattaatttgtgggttattggtttgctattcgagttctgaacccttgaatgctgaatcagcacaaggaggcaattataagaaagatgactgtgattcaccacacgttaaattgtcacatgggaagaaagtatacactgactattctgtgatcggtgagtttagattgcctgtctttttcacactgtactttatgatcactaagattaagaatttgtttctggtcttccagtgcttgtacaattgcaacaattctcttctgttttcgtatattgatttgatttcctttttggtgtcaaactgtagataactgctccatactgcgcaggaataccaggagatgggcgatgcatgtttcgctccgttgctcatggagcttgtttacgagctgggaaaccagctccaaatgagaatttgcaaagagaattagctgatgatttaagggccagagtaagtttcattaacatttgtcatgatatttcagtttgtaacttactatccatatttcaaagagtgccttatttgattgtctcattatatattcaggttgctgatgagtttatcaaaagaagagaagagacagaatggtgagtttctttttttgactgttctgtaagcttcataatcacctactttcttactattgagcttaaagtttccatcaataaaattataaggatttttcacttgtatcatagacaagaggaacttatatcttcattacaacactcctgtgtgttcatagtttgattttattgctagtatatctcatacaattaccatgtcacaggtttgtagaaggtgattttgatacatatgtctcacaaatcaggaagccacatgtatggggaggggagcctgaactattcatggcttcacatgttctccagtgagtctcttcttattgtttttcctgtgctataccaatatttcataattgagtaaaacttcaatggtcacactgccttcttttttcatctttttttaagctgcactgaagggatcaatatctgcttaatataaaaaattatttttggaaggggtttccatataatttttctctattgaatttgcaatgcaaacttttgtctttaaccttttttctttcttgtatttaaaatttacgatacaaatgtctaagtttgaactttcagatttatttatttattttttctcagtacacaactctaaaaaagaaaaaaatgtacaagaagaggataaattgttatcacttctggctatttaaatgtacattatttttttattcagttggaagggttgtatttgctaagtttctttagctgtttggactatatatatacattgtagtgaaatgattttgacaagttgtattggccattgtgaaaaaaaaaagctgaaaataaaaagccatcaattgtaaaatttcaaaacacagatcctttgttcacagttgaagacaagtaaaatttcaaagaattgattatgcaattggcattggctctttttcatttgtgtgcatcgctcacttggttaggcgttgttgggtgtttgtatgtataattagagtgatactaggtacacaattgtatttttacatacaaaatgactcatcatactgctgtgagaccaaattattttgattggcggtagttaaattgtatgccgtgtaagtgttggtgattatgagtgtgtagagttgggtttcggggttgacttgatgaaagccatgatgatgatgattttgcaggatgccaatcacagtgtacatgcatgacagagaagctggtgggctaatcaccattgctgagtatggccaagaatatggagatggaaaccccattagagtcctttatcacggttttggtcattacgacgccctccaaattccctcaaacaaaggtgctaattctagactctagaatagcacttatgttaagctttttgttaacacaacaatcttacgctttctatctataaccaatacaaatctgagtctcacacatgtttttatatacatttgtatttgtatttgtgttcgttttgttttaacaaagatgcggatgaaaattaactgtatttcataagtttttttattattatttatccttctttattgtataatggacattaaaaatttaaaaatatcaattttattcattttcctttttaataatatataaataaattttgttgtttatgacataagttgttgattcagtttgaaatgagatcaaaaaaattcatagcaggtagcatcacaaatagaaagaagtgtctcaatataggctagtgcaacataagccgtcattgcaaatgttatttatttattttgataaatattgcatatcttatttgattgatgtacttatttataaagaaacttcttagaaattagaagtggatagatacaaataaatgcttatttcacaaattactattgttgggataatatagtcccgtgatatgtgagtaattttaaggcattgggtataattatccaatccaataaccttaagtttgtgcccaacttagtgttgttgaacaaatgtctctaatctcaccatttgtcccaagctccaaaggggctcttaagctttcgttctcctttctttcacttaccctctcattcggagttagatgccattattatttaattattacataacatgtattattggttataggtcacacataaagaagataaagagggtttgggacatgatgagtactacgtccttagggccggtctaagtattttggggaccttgtgtataattttaaaattgagctctttaaaaaaaaaaaaccgtgtacattaaaattacaatt

SEQ ID NO: 296210 - DNA, 5190 bp, Cannabis indica
agtcaaattacgaattacactaaagtaacccacatacatcaaagaacacgacattccgatttgagtatctatcatgacgatcaatcccatcaaatctttgagggaattggacatagcagactttctttcctgatgtagggtccatcatgaagcacattgcttctctaagtgccttgctgttgttgatgtagtgatcacaatcaacattgagtaggtaaggagcatttgaaataactgctgaaactctcatctacaaaataaattcaagttagcataagacagaatatttaggaaaaaaaaaaggtgatggtctctgtatacataaatatataaattcagcttaccaaagcattcatggcaccagcctttttgtggtgatcaaagccaggtctcttctcacgagaaacataaactaaacgaggtaactcatttccttcaagatcacggacaccattattaccaaggaagacctgtacacgaacactttcttaaattaatgcttaaaaataacaatagtatgaaatggaacagggccagctgatgtgacataatgataggccatttaatttgcaacaaaacagcaaaactgatatttagtaggcacaaactaggaaaacattgcagaaaaataaaattctgtcttctctttcttcagcttaaaaatactaacaaatttataagaacccgcctatttgattgatgaatgtaccttggaaaactataataaacaaggacaaagtgataaatatccaatagacgaaaagtttccccacctgaatcatgccaggatgatcgcgcacattgttcccaggccatggagacccatcctgcattgtccacccatcctcaggaaccttttgtgcagtggatactaatgcatttattctgactttaaattcttcataatctctctgccaaaccaatacagaaaagaaaaaaaaatactgtcaatttatggagaattcaacagcattttacaactaatccaaaaaactgtggctggaaaattgttgagagacagataataagtttgatatataaaatgttaatgaagtcaaatcaattcagttacatggaaatcaaataaagccacaaaccttcattgcacgtctttccctaacaaatgctggttgaactttatctttcagatagtccattttctgagagaaataccattctggggccctaggttcaatactatatttcttacagaatggaacccattttctagcaaattctgatgtctcagagagtgcttcaaaagtaagcatagcagcaccatcatcagagacatagcatgcaaccttatcaactggataatcaacagcaagaatggataaaactgtgtttgcagtgatgaggggaggttctttcagagggtccaccgtactaacaaatacatctatattagccaactcagatggctttccttctttttcatatctgcaagtatcagaagtaaatggtcagacattttaaaaaaaaaatccttgaacttcatggaaaatgataaatttaatccagaaagagattaaaattgtaagtacatccatcaacagcactagacaaggctaagataatatttaccttagtgataaacgatcaaggtatgtttctcgatgtataggataccatttgggaaattgatcaagaatccatgaaacaccaaaccatatttcacaaataactgatgtcaaccataggccatatgcatcattaacaggatgtagaagtctataatgaaaaaataggccaaggattgcaagacggagaactatgagcaatctgtacgggcttatcttgctagaagagattggcttcttccttgacagtggctgtctgccttcatccatcctaattacattaatgaaaaattggttaaataaacaaaagaataaagtatacaatgagataggttgcaagcaaagttttatggaagcactcacattggtaactctggatcatctagctcatctccaaagtctccaccaccattgcctccgtgatgctttactacttgaagcttatcattctgcttctttttccaatcttccatccgatctttccaggctacacttccatatccatatactgcaatatctttctttggaaccatcggtctgggttgcactgcaatattgcacttattaataatctaatactgatgcttaaaacaaaaaacctattttgaaatattgttgaagtcaatatgtaccaaacagaatttgacttacaaggtgtggatgaatcagaataaggcattggatggactctgtttccatgacccataaatggtggtacaattagagcatgccgatcagaagaaatctcggaatcctgaaaggatataagaggcacaatgtaaggagctaatagcaatgcaactcacttgtattggcaatactacaaaaataaattagatatcaacttacctcctcgccataggtcaagagagggatttcagaaccagggggagaggattcacgttccgggattgcagaagaatgatattgtgaaccatagcgagaagggggcactccttcagtgacttgatgtgggaaggcatcatagtttccatactcaaattcattgtcaatatcatcaatatcatcttcttcttcatcaccctcaacacgagggctacctgcaagtcatattaccaattagaaaagctttcgagatcaaacggcaattccaaagataagcaactagaaataaaacccttacctttaagacgtttatatctggttttacactgtgggcaagcttggtttccttctcttctttcatactcatagcagggcctacaaacagggaatgcacattcattgcaagcaacaaatagctctccatccactgtaatctcgatgtcatctccacaaatatgacatttttgcccactcaattcttgcacagactttatctgtaatgacagagtaatattggtgagtgctcaagaaaaatgacattttccatcccaattgttctcaatttttttaaacagaaaaacttatgtaaatttcagctagttataataaataaataaacacagtgttcacgaagaaagcagaaacacgtgagcagagaacattgtttctccccccaaaattttcaatcttgttaaccagaatcaatcctctcattcctataactttcctccaaattaatcatcatgcaaaatcactgtctacggaatcgttaactcaaatggttaaattatttcaacaagctcgatgcatacaagtgctttcacaatctgccgacactaattttccactcatccctttagtgtgagcacaagtaaagaactaagtcagcattatcatcttgatttcttgtctcttccacctagatccaagtagatcttgagaaataacatgctcaaaatgtcttgtagtaaaacttactgtataattccattacaattttcagcaaatgcaaaactaaacacagctagctgaacttctaatatgataatttttccagaaacttaggagagtaaaggagaagaaacgcttaaggaagggtagaactctgaaactcctgactcaaaccactaaaaccaagcaacatttgaaaagaaacaaagcatttagttacaggaaaaaaaaaaggtcccttttaagcaaaaccacggaataaacaatgactgatacaacaaataaccattgaactagaaaacaaaaacccacaaactaaaatccccaaaattccaacatcactcaaaacccatgtccaaatttaaaatccgcagcacttccaaaagtgctaaagcataatacaacatgaaggagcaaatgggtattaccccaaattaaaaaaattagtccaagtgaggtgatttcaaagcctcttacccgtgcattttcatccgcattgatcaacacaaactcgttcctattgtgagacccagcaacaagtctacccgtggccataactcgccaaagataaacttttctccaaatctacaagggaagcttcttcaaatcaaggaaacccaactcaaaatccgatctttaacgagtctgaaggcctcaactcgtctaaagatccatgttctcgctttagaccagtctgttcaatacccatgaaagggcatccaaaccccacatagaagcaaagaaaagaaaaaaccaaaatgtatggggggaaaatgtagtgttaaaaataaattattacatataagaaaagaagagaagagtagtagtagaaggcgtgctagtaaattgattccttcacaagccaaatctcatctgtaacctggctggtccttattgtggtcataaaactacgacgcgtaagagagaaggagatgaagaagagaagagagagagaaagagagaaacaaagagacagacacagagggtggatagatagatagatagacagatcgagaacataaaataataataataataatatttattaattaatttgtaaataaataataaaaaaaataactattattattattatgtaaaaaataaaaataatcaaaaaggaaggtgggtggggccagtacacatggtggtggcgctgggctgtgcccccaccggagttggtaagtcaagaaaattacaaaagctcttttagggtgaaaataatgaaaatggaaaaatgagatttctttacttttatcttccccatctttccataatatatttttcttaaaacaaatgcatcattttatttatttcccttttaacttccttaaatgggtactattttgctaggtaaaatttattgtgtgtgaatgagtcactaacgttagggtttcttctttttttttttctttataaattttggaactttgtgtcgtttgtctataaaaaagtcggtcgtatgtgtaatttgcatatgtatttgttgagtgtaatacacataataatacataaatatatataagaagtaaaaataaaataaataaatgaataataataaaaatacctaggaagtaggatctgctcacgcggcgtagattatgtccttagtcctttctctctttctttctgtggtgtttttcctctgtctttaaggtatcactacgactacgcgttttcaccttccttttttaattttatttaatttttcttaaactagctgtagtaccaaaaatgaataaaaataaaaacaaactatttttgttttttcaagtttaaccctagcctattattgaaaaaaaaaaaaaaa

SEQ ID NO: 296211 - DNA, 9812 bp, Cannabis indica
ttttttttttttttgtcaaagtaggaaaacctataaaatttgctcttataaatagactagggaactaagccacgttttgcacggtgttgtcaaacttttgtaatcttttatatatatattgcacttatacgtagtgatataatttaaaatataacattttaattgtgtgttattacaaataaagtattagtattgaaattaaaaacataatttactttcttttaaaatatatgaaaagatagtaaatttgtgacaaatattaaagattgtgaaattaacaaataaattataattacatgtgttttataataaaataaataaaaagttaataaatactgaatttaataaactggtcttctaactaatgatgcgatgatatcggctgaaatagatttgccttcccatcgaaggacaacatacaaccaagttagtaatcaacaattgagggtgaatccctagacttgttggaaagtaggagggaagcctcccaaattcgattggcaacatacctagacgtgttatgtggtgtaggatagggatgcttttactagcatcatttcttgcttgggtcaagggtgaatccctccacaatctctcatgggagagattatgcttggtcctttgggtaggctagcttattgtgacagttgcatctttaatgggatgtgaaacctcaaggtgcataccaaagaccaaattaagggaggatgaggtataaaatccatataactgacacgtgattcttaaaattgtctaatctattgaagaagtggagaagagatttgcatgatttgatgtagagttgaacatttggacccaaaaatccacccgacccgaaacctgacaaactcgaaaaaaataggtttaaaaaattaaaggttgggtttgggttacacccggttaaccatcgggccaggttcaagtttcattaatccaaaattcgaaaaaacaggttacacccgaacccacccaaaactcgtgtatgtaattttttaattttgttttatacattttataaaaataataacttaaaacaaaacaaaaaaatttaaacaatgatacattatttttattttctttcttttcactttttttttaattgaaaaaataaaaaatatacaaaaatgatattttttaaaaaagaaaaggtcggcccaacccgaaccaggtcaaacccacccggatctggtttaacccaaattcgacccatttgcactcgaaatccaatcacacaaacgggcgagttcgagttactaattctatataccgaacccaaaaatctgaaactcaataaaaccccacccgtaaattattgtaatatatatagatatatatatttttaaattgattccatgtggtggagaacattattataataagactaattagcaattttcccctcgaattttaacatgtactaaatcatgccccttgaactttttttggccgtgaaaaattcccctgaactattaagattgttaaatttaaggatttttgtctaattttagtaaaaaagttctaacacggatgaaagtttaggagacatgatttaatacatataaaagtttgagggacatgatttggtagatatcaaaatctggggagcatgatttagtacctgaaacagtaaaattgaatgaaattagacaaaaattcttaaatttaacaatctcaatagttcagggaaaatttttaaaaattgctaattagctttttatatttattattttcttttttattttttttttcaaagaaagataccaaacaaacaatactacgtacggtccaaaatttgggcagatgtgttcagtgtccaacactcgaaatttccaactatacttcttctttctctctctacaaattctagagagagagagagaaacagagtgtttgtaacaatggggattgaaatcgttgagccgaattcctgcataagaggatgctgtaacagcaattccattcctcttcatcttccaccttcctcttactctctcatttcccccattgctcgaggtacgtatctatcttattcttcttttttactttcatttcaactgttttgagattgatcgattgattgtaaatctaactatggttatgaattatgtggatgtgagtataggagctgaaagtgttgtgtatgaagctactttatatggaaagagagttgctgttaagaaacctgttttgtcaacttctgaagatattgataagttccataaggagttgcaattgttatggtatgtctttatatctatatctatattggaaaattcttaggttttgcccctttcatctttttttggttataaatgtatatattataattatagttgtttttttttagaaaatttgaataatttacagtgctaaatatatgattcaaatagatattttgtactcatgaaactcaagataatttacagtgctgaatataggattcgaatatatatacatatgtatgtattatagttattgtaggcattctgtttgatgtgatcagactaactaactaactagctgatgtgatcttaaggaactaatttgaaaattgaatgctaatgagtacaacagaagatagtggatctttttgagcattaatctcaaattgggtctctaggagatcttttggggagctgttgagctattgggtttcttctgatacatgttaaaaatccataggttctgactcaaaaaatgaattgataatgagtggagtaacttgtggcattataagtttgttgatattttttagtaactaaactgtccagttgatattcttataatgtatacatagctagatcacggcctctttctctttttcgaaaagaaaaaaatgtatacatacatagctatgtacatatctgtattggattgaaggtgttgagtttgtttcattcttgattgttgttcaagtaagctagatcattgtgggctggccaaattgattgctgcacatgctaagccacccaactacatgtttttctttgagttttatgagtccccgaatcttgcggataagttgcacgtcgaggaatggactccaagtatcgatcaagtcctcatgatcgctattcgcttaggtattatgcccttaattttgcatatttccttgtttttagacattccttgtatatttatttcacatttaaacaaactggaatgataacaaaatagaaactatgataacttgatgtagttgaaaatggaggaaaaatctttatttattttaatattgatatattttctgctgaaggcttagttgtatgattttttttagacagtcttacatttccaacttcttcatttcttccagccaagtccttgcaatatctacacaacctcgggattttacatagggatgtgaaaccagcaaacattcttgtaaatgtctaccataagtttcaaatatttcattcgagttgtttttcggttttcatcttatgtatcacacttgtaactgaaagcaacgtttgtgcttattatgtagttggataaagatcttactccacacctagccgattttggtttagcagagcacaagagtgttttgaaaaaagtttctgttgagaattggagatcatccggaaagcccactggcggttttcacaagaagaatatggtgggaacattaatttacatggctcctgaaatattaaagaaggaagtacagactgaagaatcggacgtctacagtttcggtataacaatcaagtaagaactgatttattacagtttgctttttctagcagaataccacgctcttttttcccaaacaagttttatttctgtatgaatgtaactttccaaatgtttctgctgtttgttaatgtgaattataaaacattttgacggtgcatattaggctttgttaatgtgaatttgtgctgatgtgcatgaaattttgaatttggacaccatttttgctgtatgatatggcaagctttattagtgtttctttatcatagaattgggaatatagagaaaaagcattagtcttttcagtttactatgtttagttttgcatatatttgaaaggagtggaattagtgtatttagtctttcctttgcttaaaattttgccaaagcaaaaggattaagtggtattctttctttaccgaagaaagattgctcaaatggtcatgtatgtggtttgctcctacaaggtctgaggttcaagtccttctggggtacttatatagcaattgctatagttttctagccccgaggaacctatacatgttattaatcatgaattcttaaattaggtatatcaattaatcagagccgggaggaatgtagatcatatccttaaagcttttgttcataaagtttcatgtaatccagttttgtttaaaacctttggtgaattgtttttgctcttatcattattgcttaagtttttattagcatatttctgtataattattttgcagtgagctcatgactggtgttgttccttacacagatcttcgtgcagaagcccaggttagtcctctatttgaatttaattagttttctgtactgaattatagtataaattgtttggatgggaatgtttgccaagttttatgcataaaagtttaaccttctcgagtaatttatgttccattcttctatattttgtaacatagattagcttaagcctttttcattcttctgtacatttttgtagctttccaactgctaaaatgttggcatgagcttctgaatgaatctatttcaaaggtcatattttagtcttatgtttaattttctgtcttgtgacaagaaacaaaaaatctgaacagattttagtccaaaataagccacatttcaatactgacttgttattcttaagaattaagagggctttcggagaacatctgaaagtataggatttcttgttctttatcccattcaaacaatgatttgattgacttttttcttctcagagtaattggtctttttgcattttcttttaatgaattcattttatgtcataagggactaggctgctagagtacattggagatttctaatatgtattctgttcaacaagactgtatcttgtaaatggtcaaaacattaagctactgggtttactgtaatggtttgatttttcaactttcaattcatgacaatggacgacattcaactactgatgtacttgtaggctcacaccgtactggaaatgaactacaccgagcaacagcttactgcagctgtagtgtccgatggtctacgaccaattcttgctggtcctgagtctggtgcgccatctactttgttgtccttgatacaaagatgttgggatccaaatcctcaaaatagaccttctttcaatgatatagttgctgaactcgattcaatctcgcaacacagagagaaaacacaggaagaagtagttcgtcttcctacttctgttggtgatgatcatactgttgacggtaccagcaaggtccaatattttcaagaggatattaactggattactcagggtgaacacttattgaaaagagctgcttctgaagttgattcgagtaagacaatttggctggattctttagataattctatggcgtaccgtccagtactctcatggggctcctttgctacatgtgggagaagggagagtatggaggacacacattttcttatgcccaatatgtgcaatgaaccagatattcatgctttcggtatcttcgatggtcatagaggtacttaaaagagtccttgttgtgaccaagtttaaggatatccatttaatctttatcatcatcatgatgcaactgttttttgtgatactgaaattatttcataccactaccgatggttaatttgcgacataattatccaatgttttgagtttgtaactgacatgtgccattgattgtttttagtgtcaaaactaaaagtgtaattccgtccaatttcatctcaattgattctgtttgtgagtttgtatggacacgtgtattaatacatatttattaatacacgattaaacaggtatagatcgtgttcttacacgtgtgcacacaactcacaaacagaacagaattggatgaaaattgacgaaattacacatttagttttgccgataaaaaaaattagttacaaacccaaaacattgcatagttatgctgcaaatatctcttattttataatgcaattatcagtgcaactcttctaattaggaatttgtttagttaatatatcaatgcaattcttattactatgaattaaactatttatcatgcagattattatttgactgctgtaaaatgttcttgcttaatagtgtatgtgagtggaagttatgaagaaaaacattgagacgaaggtcccgtgtttatgagggaccctcgtctcaaatttattaagaatcctcacttatggcgggaaaaaaccgctgtaacaaacatttattagtatatcaagattcttcttttagaatcagagagcatatttcttgttcaatttctaactctatttcctattttggttataatcaatgaatacggctacgaaacgtgcaggtgcagcagctgctgagttctcagtacgagctttgcccggattcctgcaatctttgggttgcataagcagcaggttaatttttgggatttcattttcagttcttccctactcgaatatgtacctatgcattatgcatatacatgtctatctgtaataacttattttcatgtataacatacagtcctgctgatgcattgaaggaagcatttgtgaagactgattctgcatttagaagtgaactagatacttatcgtaaatcgaaaagagcaagtcagaaagactggcatcccggttgcactgcagttactgctcttatagttaagaacaagctttttgttgccaatgctggtgattgcagaacaatcttatgtcgatcgggccaaccaattgctctaagcaaggtgagtgtgaatttcttgttatttgttctcttctttcggtttatctttatgttctaaaatgtcctgaaaaaacacattcgtacacaaatcaggatcatgttgcaagttgtcccgaggagagagatcgagttgttaaagcaggcgggcaagtgaaatggcaagttgatacatggcgggttggtgctgctgcgctccaggtctgtccctttatcttctatgatgatcgaacaacaatccacaaatctgaaatgtcaaaactaaatcagcaaagatgaattgaaataaaactgagaaagaatgctaagaactaatgctgtagcataaacagaaaaggaacacgaacaaatacgagattcaatcacgagtcagaataacttggatctaatcctcgggagaacaaccttgagcaattatttacaaattctgcaccgaacaaattgattacataaacctctcgatgagaatcttgtgataaaacacacacaaattctgtacaactctcctttctctctttggaattggtactaagaaactagacaagtccagcttatatagctttcggcttctaagttgactagagtaacagaattaactaaaatatgacttgcaaacctttaaaactggttacgaactcattaagtaaccggtgccctgtagtgttattactctaatcaatctttatatatcttgggcaacaattttcaaccacaaatatgtagttatccaaatcttttcaaactcttatctaacttgacaaacataaaatctttacaaatatggccatatttgattgttgagttgagtaactaactaatgagatgtaacagaattaactaacagccatgaatctctacagagttagttagtcagttgtacaactgtattgattctttcatttgtattagcttttgaccatttcatgttctctctttgtgtttctcaacttcaattattagtgtatgaagcttttcgaaactttgtttttgttttcctctttcttaggtgacccgttcaattggcgatgacgatttaaagccagaagtaactgcagagcctgagatatctgagactattctctctgcagatgatgaatatttggtaattacaccattcatttaatgagttgttatttatttttatttttttctgaattagtgagttgttattttaatacgagtaatttgcggcttaaatatttaagtttaacttccagttgcaaataaataatttttcgcgatagtaatacttaagttataattttagaacttctgtaaatttaaaaaaatgacacgtgaataatgagttaatacttaacaatcaggtacttacggaagttctataaatataacttaagtattattaccgccaaaaattactcattttgatatcacctagtcagaattgcgatttgctctcacaaaatctggcgtttgagatcttctcgagcatttacgtggcaattgctatagtttcttcttctcctcaaataaaaaaagaggttttttgtttagaaaaaaaggaattctagacatagactcgggttcatggctcgatttggccatcgctaatttcgaatattagagcgaatatctcaacaaaaatgttttttaaatgaaatgatattgtttgttatgaacaggtcatggctagtgatggattatgggatgttgttagcaacaatgagatagtaagcataatcaaggacacagttaaagagccaggaatgtgttctaagagattggcaaccgaagccgccgagcgcggtagcaaagacaacattacagtaattgttatctttgttcgtcctgtatccacagcagagagaatttactaagaaaataagaagggagtgatagtgaaattgagtgcattattggttgtgctaagaaaataaaagtagaacatttatggaatttgcaataattgttagaaacatttccatttgattctataattcctacatgtaatttattcaattaattacatatttattaaatgtgaattataggttacaaaaatgttttttaggattgtaacttataattttttaatgtaatgtaaccataattatagctgcccaagatgatgagtaaaaaatagttattgtttcaaaaggatgttagaaagtcctacattgttaataaagataatagaatatataagatcaaggctactccttttattgtcaaatagttttgagataaaactttatgtattttacaattctaacaaatttttaacttttttgctaattttttttagtagtattttaatctaaagtattattagtttataaaattaacttatatttgacaaatttaaattataaaatattattaaaataattaaatctaactaaagtaagaagtataattggagtaataataataaatatagattctatatcttagctcttcattggagatgcgttaacatattatttaaaattatagcgaaaaaagacattatttaaaaaaaaattatggtccaaatagagatgggttgaaaaaaggaaatctacaaattactattttggcaaaaaaaaatttcactttttactttttttatatttttacagtgtttaataaaaataaaaaaataataaaaaaatcacataaaaataacattaaaaaaaataatatacaaataataaaaaaacaacaatacaatataaaaaatacatgaaaaaaattgtattttatgtaaataaaatcttaaaaatcataaaatgtttaatattacatacaaccctacttttataaatttttggctaaatagtaattttctcccctgaactttgacatataccaaattatgccccatgaactttttttgccgttaaaaattccccctgaactattgagattgttaaatttaaggacttttgtc

SEQ ID NO: 296212 - DNA, 10442 bp, Cannabis indica
cgttcatatctttaaatgaaaagaacaagaatctcaaattatttctcatcaaaaataggggaaaaaatgaataagaatctcaaattacgtagagggtgcaaatgaattttttttaattaccacgcaaacattagcatcaattcattatagaaaagttttttacaagctgaataaacaaggggaagaaaggattcacagtgagctcttggcatcgagcatcgatccggttgtcccccggaaaaagaggaaagaagacaggaatattagtaaaggtaacccaatcttcattttagctttagcatcttctgtaatttgaagctaaattcccaaggttttcatggattgaataatgtatttttaatatagctgaccacctcatctacattcactgtccaagcaacagagatgggagagtagcctgtccaagggttgcttgtattccatctgtataccatgcaagagtaaaaattaaaaatggaaatgagaaaaaaaaaccaacaacaatcataaaatttattgtggaaaaaagatactaaggaatatggtgctcttactttttaagtccttgatccattaaagtatggcctgtacataagccctgcgttttcaacccgcacaacaccttccttgtatgtaaagaggtcgggtcgaactagtgcaacaaaactaaccgggtcatgaagaaaaatacctgtaaacagtttaaataaatttaaaagttgatggaaaataataaagctacaaacagggcagttgaagcatctataaaacatgacagggagtaccatagacaccatccgacttcacatgccagtctctgtagaatttggtcatggtgcttagaatttgagcatgctttccttttgattgctttaagtcaaggaggtcatcatctgaaaccaacaaatttgttattaaattctataatgaaatggaatggaaacaattttcattccattcctttgtttgattgcgctttaaagtattagaatgccattttaatagaatggcttttttactattttggtggaatgactatttcattttgaaatagaaggaaagactatttcaatgtaacatgagaaaaatttaattttttattaatttttttttattaattttttttatgcattttaaattttattccatttcattcctattcacatcctgttcctatgttttcattcatcccaaccaaatatcgcctaaatgatactatttcagaactcaaatattagtgagaaactgatctgcaaatgtcacctgtaaacttgacttgagttgtaatgtttattccaacgacaacgatatttgccccagaagtaaacacaatatctgcagcctctgggtctccataaatctgcaaattagacagatcctgttatttacagttggttgacacttgtaaagtgaaaatttacttgagatttgatcgtaaattgttaacagataaatatggagttcataatcaattgtattaattaagaaaatgttactactaggggaaaaagaaactaaatttaccacgaaacagaaagataaggaaaaaaatttagcagcaataaaccaaaacaaggtttccattataaccaaaaattattccattttagcaaacaagatatgttgcagaatgtttgattagttttgcctgtttcctgtttcgtgatgacaaacaaaggcaatgtaatgcttacatttgcttcagcagcaggatttacatttcccaaagcaaagaaagcaccaccaagaatcactagtctcttcacattctttgcaaaggaagaatctcgtttgattgcctaatcaagataaacataactgtaattaattacaatgttcagttgtaaagtctacaaaaagaaaacaaaggatactaaaacttaccaaagctatgtttgtcaggggtcccaatgcaaggactgatacttcaccaggatattcagagaccttgtcaactaagaattcagaagcatgcttttcaattttcttcgcttttggagaaggtaggaacatgtttcccataccatcagagccatggataaaatcagctacacgtggttctcctccctattccaaaataaacaagttcaagcataatgagataaataaggctcctcagactaattgatctaataaagtaaaaacataaaagtaataaataagaaaaagtgcaaatagggtataattggttaattgtggtgaagatgtatttcgttataaataaggaattaaagttagaataaatcacctttagaggctcaggactgccctccgccacaggcaaatctgggcatcctgcaatctcacactatccttttgaacatcaaaacattaatcgatcacaaatttataccaaaaagagagtccatgaagagaatcaaagctgcacatacaagaatttaaaatcaactaaaacgatcacctaccagaagcaatgcattccgtgtggcatcttttgtcgtaacattaccaaaaactgtagtcatgcccaaaatttccagtcctggagtttgaaacgccattaagatggccatgctatcatctgtgaataaacaaaaacccaccaaattatctcaatgtgttaaaaataagtaacaaatgcataaacaaacaaaatctttctacaagagggcggactatctagcaacattagccatcagaagataaaacaaatgtttccccctttttatttgtctctgaatgttaaaaccgcagaaaaggatccaaatcaaaatcttttgattgttagtaaaattatgtaaataacacaagacaagaccaactgagcaaatgggtttaacaagtcacatatataaaagaaaagtcttcataaataaaccattatttaagtcctttatttttcttcaagaaaatgaccttttttggttctagtttagacagtaaggaagtttgctttctgggattaaaaataacaaaaccaaaataaaatttcacaaaagaagcaaaagtcatgaaactttttcggaccaaagaacaaatcccgaaaatttgtatttatttatcttaaataaatcctttacgaagaaagagccatgtctttttcaagtcacaatttaatggagaatgagaatctcttttacagacccactcgtataaagggaaacattttcagaccaaaacataaacctcgaacaacttcaaaaatgtgtaatgaagaaaataaacggaaaacaaacacataaaaagtgatttaaacacattgcacagttccaaattcaccaaaaaaaaaaaaacaaaattacagagtcaaaataagaaagtgaaccaaacccagcctaattcaatcattcttcgccttgtttaaacaaaatcatcatccagaaactcaaaagtgcttttccttttcccgtattaagaatctcatcaacaacaaaagcaaaacatagagagagagagagagagagatgtgaactcaccgattccgggatcagtatcgataatgagcttctcaagcttcgagtgggaacccaaaactccgttgtggcaattcatggcgagatacaacacacaatctcttagagctctccgcacaacacaatctgaatcgattaatcaaatcctaataaatatatatatgcatgtgacgttactatatagatagagaacgaatatttatatacatatatatatatataattgtatatgaattgagattatgagtagattagggttttgtcgtgatcgatggggtgacgctgagctgagctgcactctaaatgaaaatatatacaaatggtttatagagtcttaaggtaggtatgtgtacgaagaggacgaagttttgttcagatttaatatcaaccaatgagaaactgccacgtagtgcatataaaaaagtattatgttttttattttaattatttattaaaaaatattatttggatattcccggagatcgctatgaaagagatgattcacagcctaactactctgattggatgataaaattcctattccaattttatttaatttatttatttttccataacgtgttactctttatttataattttaataacgtttttcgaaatgaaatataaaaataaaatgaatatttgtgagtttgtaacgttgtacatggtttctatttttagcttttgtaaagaaaaaaaaaaggtgagagaaacactttttcgcttcttttgcttaggtcaaaaaaaggcaacaaataagtacaaatattgtaaagaaagtccctacaacttgagacatcatacatttatggttaccaattttgaataaaaacattgatgaagaagctaggggggagcctaatttttatttttcttcttttaattttaaattttaaaatatacattatatgaaacttttttataatttttattgaaaaaagaaaatgtttgcctgtttgcgtctagaatttccatttaataaaaaaatgacttccctgtgccatgttgatggttttaacttataaaacacatgtgattacctattaattcatgtgtaaaaataaagcttcaaaaaaaaaaaatcatgtaacgtgttgaaacttgtattattaaaaatatgcattggattacactaaaattattattattattttataagacttaatttattattattgttaacctcaaatttggtgtccctatctgttacagctaatgcttgcttttacatttggtgcaagcctggtcatgttcaacatggttgaattttggacatcaaacttgaaattcatataatggtccactgatgaaagtgaaagattgtactgcagtggggatgaaattattttttttatcccggaatgttaaatgaagcaaggacgaagacagcactctccatcttaagaaacatccgtttaatatttgaaataaacttctaatatagttttatatttttttcattttcacttcaaaaaaattttcttttatatttttttacataattcacataaaaaaaaccatataacaatcaaatcgctacgaaatctacataacaattcacaaaaaaattaccagaacaattcaaactgtaaattataaaaaataataatatatggggtaattacctttttattgatacttttttctaatgtattaatatttttttattttgaataataattagtatatttaatgataaataatttttaatattttaatttttatggaaaaccttttttttttttgtaattaattatgtaatttactaatagcaatcaactaaaataatagtttacaattcaatcagacatctccccaatttgaagacaaccaagattagaattagaaaaataaatcaaataattagccatctaatttccaattcgtttgacaaaaaactaaaaataaaatcaaataaaaagtttgcaacatcacaattaactttaagaacaatattcaatttcatatagtgcttagaaggcacaataataaaaactgttgtaacaagttcattcaacctcgtagcttgaccactcaactattatgcaaggcacgtaactacactactaacaactccttccttcaattgtataaaacttgttattcccaatcactaacgataatttgatggtgaaccatcaaagaacaaaaaataaccaacaataaaaaaaaacaaaaaaaaaactaatatcacacattcaaaattaaaacactaaaaatcatatcatagaaacaagacaaacactcaaaatcatatttaaaaaataagagtaaaacactcaaaagtcaaaaccatgttacagagacaagactaatcgcagtagcagaaattgaattgcaatagcaaaacacaactccgactgagatgcacatatactcaggaaaggctgacagaccttgccggagaaataatataacctcctataactacaaatttaagaacaagaaaccctataaaaaaaaaaataaataaattaaaactttcgttaattctcttatataattaaaatttaaatttaaactttaattttcatggcaagaatgaaaattaaaattcttaataggaacgagagaggcactcacgtgcatcattacaaaacagataagtaaaatttataaaatactaaagacaaaattttaaagaaaccaattgatttttgtgaagagaaacatataatggaggcatggtctattcatagtcttttttaaattcattgactaaaactgttacataatttggcacaattaattaaagtaacataccttgaaaacttaagttgttggtttggcacatgatacactgccaaatgttttggtgtcccatcggatcatgtatttttttttcagatttatataacaattgcatgtgcacacacgtgtaatgcataattctctacgacagaaaatttgcaataacatcatgaacgaacaatcccacaaaagagcatgtatgatgataattgacaaagagtgggaaataaaaataaataaaagcactgcttttaaagaatgaacaaaaatggtcgtcatttctttcttctgtttttctttatacacaacttaagtaacaacattttagtttgcccatttccagcagacacaaactgaaaaaatgataataagatttaccaagttgtcccaccatttacatcacagttaggggataagcaccagaaagtttgtgcaagcaaaatggatcagtaagtgaagttatcatatggcaaatacatagttgtgtatggatatggaccaaggcagacttcaaaaaaccaaaatttgactcccatcatcaagtcagaacttcattctgcagaacttggtcacagatgttccacaagtttttcgtgaaaaaattgcatgtaaatttggcgtacctttgttagcttaaaattactcgaaagaagacgaactgatcaatgcctttggtgtaactatattttgacatttggggagcctatgacattggcaggggtttttgtcaaacttcctttggcgtttccagtggcttgtccagggccatgtctggtgtttgttgtctcggttgatactatggatttctttatctgcagaattgtatacaaatggttgttttagaaacaatgattctacgcataaaacataatagagaatatgcatataaatatacacctctactagcaacttactgctgcaaggcgttccttgtgagtatcattaacaagctgcaaaaccattatcaataagatcatcgtcaaaagccaaaattctggcacgatatagcacagtcaagtacatgacaattcttacgggttttctgtagcttttaatttcatcaccagcaaacccaggcagagttatgctccaatttcgttctgcatcaaaccaaatgagaatatattttgagcttcaaaggtccataattgagaaagaacaactatgtctttcccaacaaaactaaccaagatgtataagtatatcctttgcttccaacgttgttgactttcgatgcttggccagtgaacaaccaaatgttgtaatctaccaaacaaggaaaaaatattattgagactagaaaacctatcacatacataaccaacttgaaaatggaaatatcatgaaggagataaactagggaaggtaaaaaaaactacatagcaaagtaaacaatgagaaaaagaaaataataacaataatatttctctacaaacaaacccaaatctaggtagctattaaaattatacataaaacaagacaaataaataaaaatttagtttgattacttacagactcaacaaaatcatcggcaatatccataagaatgtcttcaacttcaggatccaatttttcagaaggatcaatctgtccaataaataggagacatttaaatggggttaaacgaagaaaaacttaaatcaaagaagatcattatagaaaaagaaaagaaaaaactattggttaaagtaataaagtgggttcataaagaattaaggaatttagcactgcagctctgtctaaccccttttaaggcaaaatcagagagtattatttgtccaaaaagaaacaatataaaaacataatgaaatgtaaaaccattttcaacaaatataaagggtagagctaaatcacaatcatggtggcacaaatgttaccccaaatgcaaattagatttcttctaacattatttttggcaattaacattgctacataacaaatttaaattcagaaggatttaatactagcatccaccaatttcaaagtaatctagcaaagggctgctataactcacctggttgacgagctcatggatgcttcttttgctaagaattctattacaagtttcgtcagtatctgtagtggctattttactctgaagcccaggttgaactgtgctaggttgtagacttgcaggagtagaggacttctggtttgctaaactctgaacccttgtaacctgctgctgatggggtaaaactggttgaacccttgattgtggaacttgttgcccaaaatgttcatgtgcctgctgtgatgaagaaggttgctgctgctgctgctgtggctgttgttgctgcaaaggcgacatatgctgttgctgggaagtcaaaggcagagaatgatgtgattgctgttgaacatgcgatctctgctgcagagattgtgctgtcaccggctgcctaaaagatggggatggaagaggaggctttccttgtggtccagatgccaaccatggctgattaggggactgcataccttgggacgtagttggtgaaggtgaacttggagataccgctgatgagactcttagaaggccaggcccttgataattctaatccagataaaccacattaacaaacaaactagtataacaggaataggaactcataataatcaggtatctcctgtaaattaaagaagcaaattgcaaaggaaatatgcaagcaagtactagtttcaattataaccaagttcaacgcagaaggaagatatattcctaattgcaccattccaatatatttgattttaatcaataaaaaagtaagtaatatgttattccagcactaattttggcatcttgcagtaaacagcagttgttattagttaaaaaaaaaattgcagtcatttctccataaatgatgaaaatgtaagtttatctatcaatacagaaaaaagaaggattttttctctgctacgaaaagtgaaatgctcatatccacatgccttatagagggttctgaacgtggaacaacctactagaacttctaaaataatttttttgttctaccattaaattttccttccaaaccttaaccacgaaaagttcatcacttacttcatctaatgactaataaagcagaggtattgactatttaaatgaaaatgaactgtaaaaagaaatgatactaacttgagacgaaggaagctgattactgggagtagatactggccttagcgaagactgtaaaggtcgctgttgatggtgtgccggaatcccaactgggcgcatttgagaactagaattgatcgatcccaacatccccattccctgcacaccttgcatggaaggtctcacctacatttacaaagacacttattgttcaagaattgaaatggaaatatggccatttaaacatagaaattaaagcacagcctgtaatccttgtatagctgctgatcacaaaagttgagcaagaaacctcaaattttggttcttttagttacaacgacatttaaaaccttgaatgaaaatttgttgttttaaaggatcataaatgaagtgcccactatagtacctgcgaagcactggaatttgaggagggttcgggcaaattgaccccactgcgacccaagccaccaaaatgcccatacgtagacgaaaaaggagcaggctgcgatggcgaagtggtcggacgatgtgccggaacgccaatagcaatgccacctctgggcgtcggcgcagcagaggtcgacggcaacgtgggagtcgatgaagaaggaggcccagccgaaacagcaaccgaaggagaagaagaaggaggctgaaaatgggactgttgccaagctcgaaccaatgtggccggaggacggttaggaagaagagcaccgggaagggactgagaatgctgcagctgtgactggtgagactgaaattgggtttggggcttagggttaaggtttaggctgggattggggtttgggttagagtttgtggagggcgtcgcgggagtagagatcgacggagctgtcgtggacgatggaggtggtgcttggggcggaggttgtggaatctgaggagggggttgtgcttgtaatggtggtacggtaggtgggttggcggcaccggtggcggaggtgggtggtggcgtgggatttggttcatccatttggataaaacggagaagaagtgaccctctcagttttggatgctacagacttcgtcgtcccctaaatttataatattagggatttattttttttatttgtgaatataataactaatttattgctcaaatcctattttttttttttttt

SEQ ID NO: 296213 - DNA, 3370 bp, Cannabis indica
ttttaacaagttttttccttactcttacactcgttagtattctgttacacatttccaaaaatcgtaaaatttcatggggacagagccaagaccgttgtgcatcacatttctgttggacgagttgatagaaaaagtagttttatgcattaacaacatttaaatggaaatagtaaaaatctcatattcctgatagtggtaccactctgtgaaatgtggctcggacccatcttggacccatcttgaaatattttttgccactagtcacaatgaatttgtgctactaagacctgaatatgaaaattagactaatatacaatagcatattacttttacttttaacacttacatatttcaatcaaaattaataaagaaaccatgtggtaaattaaacactcatatatgattgaaattaatgagaaagagtgctttccttagaaaaaacctctaagcacattgttgtacatcttgactcctcaatttagtcctactcctaatgaaataataggtaaaaaaattgaaaggaaattgagcatttgcctataatctcaatttcttcaattgaaaaaaagagtattagagacaataataaaataatagtgttagtttatagcttttgacataaagagatctcgaagtgtaaatagaagaatgagaaaagtagctaaaatattaatcaatcataaaattatgcaaaaagtttagaaaaattgatcaaacaacaatttgctaacaaagaagttggaacaaagcaaatatgatgacataatagagtaattaattcggatactcgagaaacatggtatatgagatcatttgttaaagcaagaaaagaatgaagcatggaaacaaatcctttagaaaaagaaatataaacaacatttgcatattttttttacggttttgcttgagaaaaagtagaggattgctaacttttggagatgagttttcaaaagcatctcaatttctttttcttcttcctattccacataaaacaaaaccaaataaaaatttgtatttgttgcagtaattatataatgaattataatacgttctaaggcaatagaacattacaaatcttcattaccttcctgtgtagtttcaatccatgatatagattttgtcaattatatatttttaatttttctttaattttctcaattataggattcattattggatttagagaattatagattatttaacattattgaacatattaaatgatttacgtaataaggcaactaattatggtaattgaaaagagaatttacttacaatatttacaaatttatactatatatgattaaaattaaaagtgaattctatacctggtacctaaattgctcttctttttctttataacttgaaagaggtacaacctcaacctatatcaattttggtcaactataagaaacatagttaaataaaatattttcaaaggtgaaagagaagcaatagtttttatagagtatgacatctaacattaaaaaatttactcaaaggagagtttctataggtggttgagactttggtaccaaggtccatatctgacaaagaaaaaaaataagaaaggaaagagagactgtgagagtaagaaaagttttcacactcttaagtctaacaaacaaattaagtaatgaggattttaattcaatacaaacaacctcactcattacctaacacaagaagtgttagtaactaaaaagaaaaattaaagcaagtgatagaacatgttaagattaatgaatggtcttctataaattttaaaagctttaacttgaccaaccaaaaacagagagtgctctaaacatttataaaatatcataatcattttaatattgtgcagtatcaaatagcgatgctttaataattaggtgtaatagagcattaaatattgtactaaatttattggttataacacaaaatttatatgtaccaaatttatggtgggcaaatttaaataaaaaagccctttaaattttttattaacttttatactatttttattatttttattattttattagtgtatttagtttatatatgtttttaattattttcataacaatttatttatattttaataaaatatcaattaaacattaaattttgcatgaatagtataattttaatatgaacaatgttattgtgcctaacactttttatagatagtgccacacaggtggttagtgatatttcgtaaaaattatttttttaaatgaactaaaaatttatattcttaaattatatgaaaccgataattaatttgcagtagtaggatactcaaaaaaaaaaaatagtaagttcgaataatactttttagttatctctctttcaatcggtttatggtcgaaatatttagacaaatgtcttttttttttctttttgtttattcattcacgtgtttaacatataaaattaatttttgttcaaaagaaaaacaaataaaaaataaaattgatttaagaaagaaatattaatattaatattaatattgtgaatgtggaccattgtcttcttctcttttatcttttattttttgttggttcagcttccatttccaagctccgaacaggtacattcaaattcaatctcccatctttcttagtatatgaaattatgaattcatgatttagggtttattttgaggaatattctctctttcaacagtcttttgagttttgagttttgaagtttgatattttcaattcaaatttcaatcaaactgaacagaagaatggtggtgttacaaaatctatcattaagtgctgtggtaacctctcatggtaatggtaatggtgtttttgggtcatggaggaggaagaaacatttcaatctaaccacaaaaacccacataataacacactctttgcttctatggaaactacaaaccacattcttaaaccccaatcctaatcctaatttatcatcaaggaaatataataataataatcgggttgaagctggttggctgtttaaaggggttggtggtggtgatggtttggatgcaacctctgagagaagtgagaatgctaatgaagatatcttggtattcttttttcagttagaccttgcaactcgagttcaggtccttttctttcttcttctttttagattacaatctctaagtttttttatctaattatgagtttaattaacagtatgctctgaatgtggaacaatatgacattgcccagcagttgagaaacaagcttactgaggttagataatattgtaattttaattggtatggatatgtaaagggaaaggtttaggattggccataacttactgttagtatggatgaggtaatgaaatggaacttttattccatttctttgtttgattttattttaaaatattggaatgt

SEQ ID NO: 296214 - DNA, 4480 bp, Cannabis indica
agtggggttttggtgttttccatagccagaagggccatggacatccctagtgtgcatgacaatgttcctcagaaagaggagagagaagagaaaaattgaaaaaaaaaattttgttacttttgtctagtttgtcaaacttacttttcaatataccaaattgctcaacagcctgactaaatttaccaaaccaaacatggggactttgtttcaaaccatataaagatttccaaagacgacagacttaccgtaactccccctgagcaataaacccaggaggttgttccatatacacttcttcctgaagatttccatgaagaaaattattttttatatcacactaatgcaaatgccaatgatgattagttgtcatggaaataaacagtcgaacaaatgtcaatttagcaacaagagaaaaaatgtcacaattgtccactccataggtttgaggataacccttagcaacaagatgggcctttaatcgagcaattaatccgtctggattgaccttaatcgtgaatacccatttacaccctatggctcgttttcctgaaggcaaatcaactaagtcccaagtaccattcgcatctaaggcattcatctcttttatcattgcaataagccaatcaggatgagatataacttcatgaacagttttaggaatcaagatagaattaagggaagcaataaaagagcgaaaagacaaatgagtataagaaacgaaagaaaaaataggataattaaacttgtctttacctttatgtggagcaatgagaaggtcatcactgctgggctccagatctcatgacaaagaagaaggttcaggacataaagcaagaggtggacagttgaagtgctctttaataggaggtggaggcatgtcaagagttgtgcttgagaaaggttaagtaatggaagactcttcacatagtgtggttgagataggttgggtagtggaagactcttccggaagtgtgtcagagagacaggatgaggaataggagactcgtctagaatgatgtcaaggtcataagacgggataaaatataccaacaaatcatcatccttttcttgatgagtaggaattgatagagacgtaaaatagggtgtgttccatgaaagtaacatcaatggagacaaaatatttgttaagtctgggacaatagtatctataccttttttgaagacgagaataaccatggaatacacacttcaatgatttgagatataatttggttacctatggacgaacatcatgaacaaagcaagtgctaccaaaaattcttggctcaataggaaatagtggccggaagatcgtgtatgaagatcgtggacacactcatattgagtgtttcttagatgcagattgggcaggtttcgaggatagaagatctactctaagttattgtgagattggtctctttaaagatgagattcttctagtatcattcccaataataacaatatcatccacatatactactagtagaatgataccaatagaatattatttatagaacacaaaatggtagacttgctttcatcttaccaaatttctcaatagccagactaaatttgtcaaatcaagcatgagggctttgcttcaaattgtatagactttcaaagatgacaaactcgccctgacttcccttgagcaacaaaaccaagatgtacctttagaagatgaccatgaacagaaacattcttgatatttaggtggcataaaggccaataatgaatagttgccatgaaaataaataatcaaacaagtattaaattagcaaaaaatgtattgcaatagtttacactacatgcatcagaaaatttattttcaatttattccacataaaatctgaaatgctcaggatccacttctcatcctctttatggtttttatgcatcttttggaaaatgattctgattgaaagaatctaacttcttatgaattgaactagacatgcttcgtaaacgtgatatagttttctttaagttatcaaattatttgttgcaacctcttgagtagaactcatttccaaagattagtctaagaaactagggatcaattaggtataaaccagcaactaaccccacacttagtcaaggtgggatcctaacaatacaccggctcaaagtcgacgtccatgatggctcactagcccactaggatttttttgagggtgcatgaattcgatactatttgttacgactgaggtagaactcactcctaaaagactagactaagtgaggagggtgtccacgtagttataaaccaccaaccaatccctcactaggtcgatagtgaggagggtgccacatacactcaaaaaatctggacattactttataaagaacttagactggaatgggttttgccatgtttgttgacacaggccctactaagtataccggtgggaagcaaaagaaaagttaagctttggaggactacaatgttagcactactttgggctgtgtggaatgagtgaaatagcagcatttttgaaggacaagagagatcagcaacctttgttttggagagaataaaattctggactgccacatgaatctttaaaaccaaacactttgaggccttttcttttctagacttatgcagggattggagtgatttgatgtgaaactcgggatttctttctttttgtttgtttggtcattcaatgagctaactcattgtattgttataattttatgtaccatggttttcctccgcaacaagtgaggctttaataatatcgggggagccttgccaagtgggctccttctctttttaaaaaaaaaaaaaaaataccctacactaggtcgatatgggatcctaacattcttttgggtccagatccaagctgtcctagtcacaattctgttgcccaaatattaatgtttcttcttatttctaaaacacctgatgatttgaatgtctctcatcatcctaaatggtgaacgaattaaagactgggatcggctacttttgtgttgaatgaacttatgcatattgagtgaaaatttatgtaacctgcttttgaactttgagatctgcaaaaacaaataagccaactattatgacactttgttttcagagtttttgtgacagcgaacagattactttatgattatatcaatgataatgagtgaaacaggtttccaactgttttagtcgtatcatactaggcatgaaagaaatatttagtcagggcctgtttctaggatgtccggagatgtattgacttgtgaattgtgatagactctcatatagacttttggtttccaacccttactgcacatgcttgacttgattcctgttaaaatcccagaaatagcaagggaaaaaaaaggaattgacaatattatgttttctttttaatgataatgacaatattatgtttgacgaaggtattacttggagttggaattattgtttctaaattagtagttattatttattttatattttgctgatagaatttttttaatgctgtacacgaatattaattacaaaacatttgttatctgcaatacttctttgaaacctgcaatattattgttttctttacgcaccttgcaagttccttagttacatgagtttaaactcttaaccaggtagctaaggctccggatgggaatggaggagtttatacaggtgtctttctgttaaatgatttcctagtgttaactattatataatgttagttaaatgccattgttgccttccttttgtttctggttttctttttctttctttcttgatcctgctaatattagtttttgaacagctctgaagtcctcaaaattattagaagatatgtccatgagaggaattaaatatgtggattgctatggtgttgacaatgcattggtgagttctcttccttccctacaataatttcagctttataaccagagatagaaaagaagggaacctctttcatcatctgtttggataaagaagagatgaaatatacgctgaagtaatttccaaaattttcccacctgaagtgttttacttttttaacttacatagaaattgctatagtttttggtccccaaatattgtagggttaggtggaactttcattagattttaaaatcttgcatagaggaataacatctgctcataagtattttttttattgttattctcttttttcttttttctttgtagaaaaaatgtctcgttaaaacctcaagagtaaatccattcggaaaaacctcaagaggcaaaatcgtgtccagaatatattatgtaatgtcatccagaaataacaacatgaatacaaacaaggtaagccagaccacctaacactaatgataagtcaatagagagcgctagttttacctaatgaatgtgcaaacactaatggcaaatcttaaagacaaaaattataagagatactagtaaaataattacaataagcaagaatatctctaataatataacccaaatacgaagaatcaatttggcggttgttaatgg

SEQ ID NO: 296215 - DNA, 3100 bp, Cannabis indica
caaccaaacgccaccttaattcaatgcttagcattaatggagtgtgcgcttgttgtgtgaccaaaagaggtacacaagagaattagcacagacatgaaaattatgcaatttttttttttgaatgaaaggtggaaacttcattatcttataatagctaaagccattatacaagaatgtactgcactaggatatgttgacactcaacatacaatctgaccaagaacaagaaacgcaagcaagataatgagtggttttgttagtagatcacgtaataaaagaaacagacacattaaccaaccagtttaataaacgtttacaattagaaattataagatcaaaaatagaaggcaaagataaagaattttaaatagcctgaattgaaacaagtgaattagattcaacgatgacattcgactactttttcatcttgatcaaacttaaaacctttttttttataagacaaaattatgcaatttatggatacgattgcatgggattattataattaagcggttgatttagatgccgatcttcttttcccatctcaatcaaccaaaagaaagagtagccccatctgtgcaagttatctctagtctcaataaagagtaggtacattctgttgaaatgatccttggttgcaaaggtgctcctccctttgtgatatacgatcctccaggtataggtaaaacaaagactatagtggaagctatcttacaaataatgaaaaaaaaatgctaagatacttgtttgtgctgcttcaaacagtgttggtgatcatatactagataagatcattagcaataatgtcataagggtgaaagaaaccgagatatttaggctaaatgctacaagccgaccttacggcgatctacggccagattatctacgttactgctattctcaggacagtgttttcagatgtcctcctctcaatgccttgctgctttacaggatcataatttccacttatatgagtacttcccttcttcatgtagaagggggttaagcatggtcatttttctcccatattcctagatgaagttggccaagcttcagagccagaaattaggctaatctttgtagaagtgaaacaattgttgttctagcaggagatccaaagcaattaggtccggttgtgtattcacaagatgcagtagcttatggcctagggaaattttatctagaaaggttatttgattgtaaacattattataatgaagatgaatcatttgtgatcaaattggttaggaactacaggtgtcatccaaccattctagacctcccttaaaagctcttttataatgatgggctacttccatgtaaagaagataactcttcctccaaatattctcaagttgacttcctgccaaacaaacgtaatacttgttggcattcaaggatgtgatgagagggaaggcagtaacccgtcttggttcaaccaaattgaggcaagcaaagttgctgagataatcagaaagctagttgccgttacagaattaaataagacaaattttgaggtgattacaccatactaccagaaagtagtgaagatcaaaaaaatacttgaaacatgggaaatgcaagatatcaaagtaggaagtttagaacaattttagggacaagagagagagagagattataattgtatccactgtaagatccactgtcaaacacaatgagtttgacaaaattttcagtctgggatttcttagcaacccaaggagatttaccgttgctattactcgcactagatcatcgcttatcatttttgggaatccacatgtagtttgtaaggtacttcaatatcagttgttgttatgctttcaagtttttttaccattggataatattgtactatttgactcaactgatctaatggtgcaactttttggctccatgagcatgcatatgaactttgatacactaaccactcgtgtaattaaatgttaactgctgtaatttttttctggcaaaacccttattagaacatgcttctaaggtattgttctgatgataactcttaccagggttgtcctctgcctgaatggttagcacaagaccttgaagaggaagagtatggtcgataggagaaacctgaacctgagcaatgggtttgagaatccttcttattgtaaagcttaggataaataattttaataagaaaaaatttcagatggtttggtacagatcttataactacacagtcctgaagctattatatgtgtctatttatgttgagtacattaacatagtcacatgttttacagtttcacatggaggctttctacagtagttactctgtttgtgctctcaaaacatgttcaatgatctaaatgaattaagtctggaccggtttgacaaatttcgtagttatcagtcactatatactaaacgaggattgagaagtgttagacacatatcacattaagcttgttagtcccacatggaatgtttatgaaaagtagagggtcagtatgactataagtacatagtgaataaccaatattacatacttacctggacggggtcaatgggcgatcaataaggcctatggcctaggctggtggtttccattgcacttaggagaggtgcctccctggcctgcgttcgcgcggcccatggtttataggttttatagcaaatttaacacaaaaagtaatggaaaatttacaactttagtatagatttttattatatagtagtaatttattaaatatttaattatcatatcttgcttttatgagataatattaggaaaaagattttttatttatctggatgagaaaaacgcacttattttacaatatacagtgccttatataagcaaaggaatttaactctaagaatgaaaaataaatagagtatatttctaagcttaatattttccttcaagatagattgtacaagttttgtagacccatcttggagacaatatctgaaaaaagactaggagaaagagcttttgtgagaacatcaacaagattttttttttgaggagacatgaatcattttgatgagtgattagtcagtattctgtcctataaatatacccaatttatatattaatattcttaaatttattctttaaattattgattag

SEQ ID NO: 296216 - DNA, 1761 bp, Cannabis indica
tagttacaacataaattttttgtgactaaatgtgatttttagtcacaacaaaaagttacatgtaacaaaacatagtaatatatagatacaagtactgtccataacttatttttagtcacagcaagtattgtgactaaaagcacatttagtcataacaactgtgaattttgtgactaatatttttagtcatgtcactgacttttagtcacaacataaaaatagtaatttataattaatcacaacttttttacatttagtcacaaattttgttgtaactaaaagtaaaattatttgtagtagatattgaattcactacaagaaatatcactttatgtgctggcaaaagttggttgtgctggtaaaatagaatttacttgtgatgtgttggcaaatcaatgttggtattagaacttttgccagcataaaatgaaaagtactgacaaaaataacttttcccaacgtgtaaatacgttggtgaaaattagattttagccactgcaaatgtacgctggtaaaactttgacttctttgccagcgcagtttgagaaatgtttaccaacacagtagcgaactgtggtggtaaaagtgacatttcttgtagtgattacaccaatagttatattgcacatgatataaaagtgttaggccctcttagaatcttttagcatttctctactacttaaagttgcttctagcatttttcaaaaagaaaaattacgttatgagacaggttaatgaaaaataatatatgtatgttaaagcgtaaaacatcacaaaattaattggcatatccattagtattaggtgtttaattttatatttgaatgttctacatattttaattagatactcatactactgtaatgttggagacctgtcaaatagcaatgctccaacttacaaagaaaaacataatatagaaagacttaaaaagaaaaaaaaaacaaaaaacaaaaaacttaatatagaaagacttaaaaataacaaaaatttaatatagaatgactataaagaaaaccttagtgtaaacatatattaatgtagagacgacttcttcttttaaatattaaataataatattttttaaaaaagactcaacttgggcaacaaaagtctttatttaatttaagaaaagtcttagtcaatgtatttcgcttattaaaaactataatgtcacaacagtaatgtgtgtatctcatttcctattacactaaaaataatgtgatttaagaattcatgtaaaatctaaaaagaaaaattatagctttatcgcttaaattttcgatgacagttttgtcttatgtcccacaaagataatattgcggtctatgatttggctaaacatgccctttaggctagacaataagttatatgctggtttgaagagattctagcaccaattgttaaagtcttctcaagaatgtcctaatgtaatccagaattcatatcacgtttttcaaaaaaaaaaattgataacttattcttattaacaatactaggaaaagtacaacacttgcaaccagtggcggaaccagacaaagacccgaggaggggccaaataggaaggtcaagcgaattgtatttttaccttttttttttagaaaataataataaaattaggcgatttaaaaattttataaccttgaactattacaatgatggtatcgtaccttttgaaattttttccgctaaaatatgtcaatatagttgatgtgttattgtcagcgccacatatttaatttaaaattttaaaatatattt

SEQ ID NO: 296217 - DNA, 5681 bp, Cannabis indica
tcaatcttgtgatcaattgccctcctaggagggagttcttttggcaactcatctgacattgtgtcggcaaactcttccaacaactcagccacttcatcgagtacttctacccactgatctggtttaatttctttcaaggcaaacctttcttctttatagaattttcaaaatgcattattgattttaacacaagatctttcccttttttctaaattgaggggattgcttcaacaaagcacgagcactcctcctcataaatcattacccctttcaaatgaggtgcaaccattgccttggttgcactcaagaattctacttgagaatcatgtcgaaatcgaccaatgggactaccataagattggactgagcttcccacgatccaacttttaaaatgactgtagcagatccttggattggttttgcctctgaatttactactttcgactgggttgaaatttaaaccacttccaaaccaagtctagtcccctctttttgagccacgaagttattcgttgcccccaagttcaccatggcatcacttccctcccattgacaaacaccttcacatacatcaagcctttgaacagacttgatttttccgtagtgatggcattgagaagttgtaaaggattcattctagaagttggttcttgctcattgtcgcttcgtccgtcttgtgcaatcagggcattcaacttttctcaattaggacattccctcgccatgtgaggaccattacagatgaaacaaccaacacctttcttagtgtttgtctgtgatcctttttggttattgccaccagtgccatccttcttcttgtgttcctgattttgcccacctttgggcaaggaaggctgcttgtggttgttcttctttctaactgttgatttcttcgaattatgaccttgtgacggatttgaattatacttgtaatccaccactacacttttcttagtgtttatctgtgatcctttctggttattgccaccagtgccatcattcttcttgccttccatattttgcccacctttggacgaggaaggcggcttgtggttgttcttctttttccttgttgatttcttttaattatgaccttgtgacagatttgaattatacttgtagtccaccagcttctcggaaaccacaatcgctgagggtaaatcaattactgcctgccttcttaactcaacctgtgcccaaggctgcaatcccgacaggaagttgaacatcttgtcctcctcggacatgttctttatatccagtaataacgaattgtattctttcacgtattcttgcaccgaacgagtgtgagtatgtttccttagggattcatgagcaatccatgccgtgttgcatggaaggaactgatctttcaatttctttttcaacacgcccaagtcttaatcttgggtcttcccaatgttcataagtaaataaatcaattaagctaacccaaaaaaataaaaaataaaaaatcgaatttgataatatatgagatattggtcactttctgtaaataatttattttattttataaattaacccacactaactgtaaaagacaagaaaagaataaagaggtatgtaaactttaatagaacctgttgttttatatactagagtatttcatgcaaacaaaaaaaaaaaggacatcaatggaaatatacgaaatggttatacgaatttttcaaactaaaaaggtgtatgcgctgatagtatatagtaggatatcatcctaaatgagccatggtagtattttccaactgtcatgttactatatggtagtattaatttagcaaattcatacaacctggtttcttacatatatatctatatctatatatatcatgataacatgaaaacttaaaagtgagtagccaaccacaactaatactaacttatctaatacttgatggaactttttataagacacgaattaacacaaatataaattattagatgaataaataatattccagattatgcattcgccacaaaattagtgtttgattttttttttaaacggaaaaaagacaaataaatataatcatagaggtcaatctgcgtgtggggggaatattgtggccacaaatttgactctagaaaatctgagccgttgattaatattaataatttcacctgaaaatgtaacaagttgctagtttattattatgattaatattctttttaactacaaagtggtagttcaactgtcattttcttgtgccattaattcaattaagcattgtatcctaaccactcaatgtacaatgatatttggggtataatgttgttacccaatgtgactaaacaaattgaaaaagacatccatattaaagacctaccaactgtaatcttaccaaagcaccattttttttttgtatatacattgaagtgggattaattagtttagtttaatcccttttcttaaaaagttcaaaagaaaaaataaaattaaattatatcccagaaagcaaatgaattagacaccaaactgcttgatcatcatgcctatttcgggccatcatgcattggatgccacagtatcataataatgtccaaatatagcattttgcattttggtttccattttttttttattaattaagctgatgcataatgtttttaagaaaattccctcttagttaacttggccactaaataaataaaacaaatgggtatatatctatttattttcctcattttttaggatgttgaattaattatccatagtttgattgagctcttttttttccgttctttctattaataaggacgatagcatgtgttaacttgaatatagtcatagtgtcagctagcatttaagcaactgcaatattgtaacagatcgcattaaaaatattagatcgataatgggatatgaaatggtagggtttttgcaagaaaagcttaaaaatggaccctacatgtccaaatatggagcttaacacactggatcgtttacaataatatatctcatttaaaagggggtttagtgggttttgatgcattagtcaatatcttcaatttttcaacagtgtatttgttagtcattctatggaaatgttaatgtatatacaaatatatttataaggcgggtctgttagagattaagggaaaatgggagttttgtgttgcttaagtgggcttctttttattatgagctaagcaggaacacataaataactttgttaatggtcttcgtatgtggatattatatcaaccggaaacgacacaagtttgtatgccaaggtcaaactgatattattttattctcttcttttctttcattctatttgtctctcttcatttacatgtataaaatgtatgcatgtatgtatggataataatgataaatcataaaattctaaaaaagcatgaaaatatttacttgccatattaatttggctaaatttaaagcatcttcaatagagtgctgatgtattgttatagttttagcacacttaaaagaaacagaaaattactattccaatgttttataaattattaaatttgataaattctataaggaaatgtaaattatgggacataaaaacgacattaccatagtaatattgacaacactttatgcttctaattatgacaatgacggagatgaccttatctttaaccttagtaacaattatatttctaagtttaactgtataaatatgtctttgttgtcaaaggaatttgaacaatacaaaaatttgttcgagtatttaattctattgagaacacatcaagataaaacttgcaagtacttatttaaagtagtgagtactcaaagaattggctactaacaaagagaacataaagcaaaaaaataacaagaacacaaagaaagtatattggttcagttagagcttgatctgcttagtctattgttacaaagatttcagcttagtttatttaattcagatcactcctttatatagaaagcaaatgtccttttggttttacataactcatcgattttagaactgttttacaataaatgacagcattaaattaaaaaaataaatgaagaacagtttaatccgtctttgcttgaagtgtggcaacgtatgcgacttgcttagcacgagttgcttgttcgtattctcgcacgaactcgcaggtttttggtgcattttgtattcactaagtggctcatgggcccatcgtttggatgtttgcgttcacttaacatcgcataaacggaaatctcgcatgttgacaacgtgggacatatgagtccttgacaagtcgtcgaacacgatcagttattcagaccaatctttatgcaaagaaacgatatttactagtcgcaggggaggtctacctagttgtcgcaaataatatgatatatacgcgacttgtattaaaccctcttgatcctgcttgtctttgactatgcaaggcatagtacgctactagaccctgtccaggtagcatcatctcgcgagttcaggtcattcgaggctaacactttgagagtcatcaattaacaggtcatcatttcctcgggaattggatccacatgtcaaatttataggagactactctcgtatttttaggcaaaaaatttgcactatagcatatgcccctaatttcgcgaatgacaactgcatcatataggaaaattattaaagagaggcagacgagttattgtcacaagatggtgacctttagttgtcttgtcgagggtttcaaaaagacagctgtattaattattttcattttcccaagatgccacgtcatcgaaacccatcagggtgtgtgtaggcatgctcgttggtgaccgttggattcggtgacccttgctattttttctgccatgtgtctgtatcccaacagatagggatttttttgattgaaccccctcatatacaaattgatcccacttcatttccatctcattcccattttctcattttcagagtacttctctaaaaatttcaaacttcaaaaacctttcaaaattttggactgtcactttccaaaaatgatttttcgaaggcttaagaatttctagagtgttactggaatccaggagaacaaatcttcgtacaaaaggttggtttttctttctcaactcttttataaatatattctctttgattgtttgcatacctcctgggtatttagggatagaaattacatgagatcaatagacttactaagagaatcaaaatttaggacaaagcaaggcaaaagtatagagttttctttaaaaattcttgcttgaaacttgaatactcgcatatttcatgatgaactttgaatattcgcatctttatagtagaacccttttgcatactcgcatatttaggttcatttgtctccaagtcaaaaattagcaatggttgggtgtttcctagagttttaatgcttatttctcttggtaacccttaggtcactgacccaaccactccattagtcggttcttttacgtggatacatatttttacatatcaatttgcaattagaactaactgagttttgaagtgacaggatgtttcgaagtgacttaatgttcatttattcgcatgacccttaagatattgagatacacccaaccactttttgaggctcaaacattagttttgttgctcttgttgaacttaaaaatttgttgttcaggtgaggacacttcttattttaaattgcactagcaccactgtaacgtccccgcttca

SEQ ID NO: 296218 - DNA, 3708 bp, Cannabis indica
gactacagggaccgagactatcagagaagaagtcgcagtagaagttatgatagatatgagcgtgaccgttaccataggagggacatggattatcatagtcgaaggagaagcaggagtcctagttctgattataacagaagggtaagggaccgctatcaagatgaaggaccgagtcggggtcagagtcgcagtcacagtcgaagtaacagtcgcagccgaagtcgaagtcgcagtcgatctgttgataggtttgaagtagttccagttattaatgcttttaccaattttacagtgcagcataatttatattcttcaaattccagttacatgttggtgcccttctgttttgttttatagtgcctccccagctcggcgtggtcgtggtcctgaaagaagtctttccccacgaagaactccatcaccaagtggtgaaagcttagatggacggcggaggaatggaaaatcttcttcccggagtgtgtctccttaaaatgatttctcaaatttcaaccctaagatattaaaatgctgaggtgagtagatacaaaagatgtccagttttgcttattcttgcataattcagattcaaaactaaattaattgcacttatttttggtaggagttatgttattagggaagatggaaactcccaagagggctttagtagttgcttgtagctgttcagttaatgatgaggacctttgatcatcatgtatgtttcttaattctagcttttggtaggattgaacttctttactgtcaactatttcagtattaactccactcgataactgatttctaaatgatttttcttttttgaaagtttataaccatgatccttgtaagttttctgtcaattcccgttttctcttttcccatttgggttttatagctaagccttggcaaagattgaacagggtcatacagaaggatgtgtggctgttcgttgctgcaactttgatggctgattttagaagaatgagttgattttgcagtttattgatcacagaaacaataagttaagtaatttttacccaatgatatcattattgctgagacttaaggtttagctcataattttagaaagtattgtgtctttaggatttctttttcaataatcacattgctacaatttaaagaatggtaaagacctagatgtaggtttaggttgttgccagtatttttggaagtacaaaatattggttaagaataataatgtagtttaagattgatttgttaagacttgaagattcactgtataataggatcttaaaatagtaatgataaatgtatccttattataatatcaagagtttcaaccttttacctcaacaaaaatgtaaattagtgatgagaaagagaaaaacaataatcataatttgaaagatgttaaactagtgtaaagaaaatgtattacatcatgaaagtaaatgaaatttataaactaggaacaatatttattgaatgctttatttaagagcctatttataaaagatttggaatgttaaatgaatgcaacttggcagaatttaaagtcggtttttatggttttgcacttatttctaacttttggaactattcttgtttagttaaggcttagtgtgctcaactgagaatatttgggtaatgcttgattgcgaattcatttatgtttgtggtccaaaatggaccccattaaactagtgaatattaaagttcttgttcagttcaaatgatccaaaaaatggattgatcatctgttctacattgaaagttgtgctcatttttccaaaacatattttgaaaaattattataattttagaacacattttagttttagctcaaaacaaggcaaatgcacaatttaagggatatatggaactttgattgtaaaaatatgatttcaacatttaataaatatgaaccttttcatgtttcatcacctattgatgaaactttagtgtaaatttttattaaaaatttaaatcataattttacatataaaatttcttcaatttcatgaacttatatatagggttggtatgacaaggatttttttcccaattgctatgtcttgcacttgcagttgtgaaggcaaagcttcttatcaaaagtatttattttttttttttttttgcatgtaaaaatataatttaaatataaaattaaataaaaatttaatactaggactcatttaaattatttttacataggtagttaattacaacaaattttactattttaagtttttttgtccggtaataaataaaattacataagaaattcacaattatcccaaaatttgaaaaggttagttttgagtttttattagttgaaaattataattatggtggataaattggtataattaaataggagtattagaaatggtgtatttttcatgattaaatctcaaccattatatactttacatattgataggaaaaaaaagaaaccctctttgtatggtttgagattaatagtgtatatagagagggtgcacgtagcatattactcatattatctatacattttcttgattttgaaggtgagttttcctaaaattgtggtaaataatctttcttttataaagatgacacatatacttcaatttagaagcccttaagaatcactattattaacttgtttgtttcgactaattactttgttcctcccaaaaaaagtttgacttgctacttcacaagtttatagggcgaagtttagccaagttaataggtctaagtaggattacaacataattggatatcaattaattatctatatatgtcttgattttgaaagtgagttgtcctcaaactgtggtaaattattttcctttataaagatgacatatatttctttttttagaccatttaaaattggacttactactttgtatataaaaaaaaaaagttggatttactacttcacacaggtttataggccgaagtttagccaaattaataggtctaattaggattacaacataattgttgttgtcaattgattcctgccccaatatgttctagtataaaggaatctttgcacattttaaacagaacattcaagtgatgtctttgactttcataagtaatgttgtttcttttcttttctttttttgataaaatggtaaaattcttgataatacgtataattttacccaagagtaattcaactagtcaaaaataagatttgcctccacatgatttgggattcaactctctcttgagcatgctattgcccttattcttagttggtttctttcaaatttgtacataataaatttctttttcctttttttccttagaagagaaatattgcaattctgttgctggttaaggtagatagatgttatgaggccagtttgggattcctttgctgtatgtgacatgagtcaaccttcgagtttcctgtgctgttgcagcccattgcttggttccggccggcaaaccggcagcctgctacgatttgttattggctaacttgctgatgtttgtgctgattcaaagatgagtttatgttgaatcctcaaagtttgtttggtttttattttggcttattatttgtttaggtactcattgcagcatggttttagtactttaatcatttgtgataaagtgaagttttttttttttaaagaaaaggggtatttgacaaaattgtctccttttataattagtttgtagagtgaataatttttgcaaaatggctttttttttttttttttt

SEQ ID NO: 296219 - DNA, 2791 bp, Cannabis indica
atcgccagatttaggagatcttcaaatttctattggtcaattgttatgtgttctactcttttatgattaagcatcacaacatgattgaacatgttattttctttatttatgatttaaataatagattattatgtcttaattttattgcaagatcattaactaatagtgattcattgaatctaaattctgatacagttaatctagtttgggaacttatattttctttttttaacgaaaaaaaaaacaaaagttcatatttaacaaaaacacatatttacaacttaccttttataatgcttttctgtctctatgtacttacatttttatgtttcgatgtaaactattttacaatatgtaactattatatgacatgattaataaaacaatccgaaaactaatatatttaaataaataaaaaattgtctaaagatagtttaaatcaaaattaaaggttagtggcaattttttaaaatgaaaaattaattctcaactgaattaactccatcaaaatttaatttatccaaggatccaacttaaggctacaaaactgtgggggtgtaataagctttctcacaccaaaaatctacattatattatagacatcaaaataaagctattttggctcctaatcatcaactgcaattgtcatgatcagcaagaaccaccaaacacctataaagatattcatatacaagcttcagtgagaagttcaaaatgaaatatattactgaatattgataactgatgcttaccccagctaggatatctttagaaagcttaggcttattatctgtttcgtttttcgcaacaggttgtttctgtgggaattttcgaaccttcaatgcttgattgctaacaggaagatcaggatcagtacccggttcttgttcgagcttttgcttctgtacatgtaagataagaaaggatatgctcagagttattgctttaactaccaaacaaaataaattatgttgttgcatttgaaagcttgttatgtattatggtattactagataatctttcattagtcaaaataaaggatcaaaagcaaaaattcttgatcacagaaaacaaacctaacatgttacttgaaatatcataccaatctacaaattgagtaccttctttaatcgttcttcgatggaactgaatgcacgggcttgatcaaccttagagagatagaagtcccgctcccttttcgcagcagagatttctaaagccagtttctgctccctggcggctttcttgtaagctgtaagaaaataactcaattttatctcacattctgtacaaactaaaattagggcaatgcaaaaacaatccaataagagatcatataccaatttcttctgtgagatcatcccacttgaatttgcttaggtatttgatattccacaagtcataatagaaggatgactttttcttcccacctaaacatacaattttaaagaaacaacagtcagattaaaaactctaaatttgagtatagcctcaagaagacaaactactagtttcgttctctatagaaaaattaaggctaattaggattattttcccccgaactttgacatgtgtcacatcgtgctcctagaacgttcaaaattccccctgaattagtacttttgtccaattttactaataaacacctaacgaaatgattgttaatgtaccaaatcgtgtcaccaaacttccattcacatcaagcgcccgttagtaaaataaaataaaaatttacaagttcttgaatctaataatctcaatagttcagaggcacaatttggtaaatgttaaagttttaggagaaaaatactaattctccaaaaattaatcttgagctttagttcataagaatatttcactacaaagagaaagtgcaatcataagttcataacaataaaatttgatcagtataaaacatacctatttgttcaccatttaacatatcagcaactcttttagcaacccttttatcagaaaactcaacccatctacattgtacaaaatttcaacaaacaataaaaaatggtataagaaaacaaaagaacaattttccaacagctaaaggtgattcatttatgcatatacatacccttcggaaaatgcttgatcctgatatcgaccaggacgcttgcgtcgaacttgggcagaatctgcaataaattacccacaaatcattaacactaaacaaaggaattggatagccatagccatagcatagcaaagagtatggtagttgtaagtgatttactttcaggagtcaagtaaatcctttgaatatctccaaattgagagagaatctgacgaaggttgaaagggtccatatggggaggaatcctactgaggtagcaaattccacgccgtctagcctccgaagcttcctttaaaagacgtctcttatttatgttcttcttcttcatcgtgatttcatcagtgttggcatcaatagaatccatatcctgctcctccttctcctctccggaagggttcttatgaaccatatcgatttaagattctcaggctaacagaacggtaagggttcgaaccgttggcgtttggagctgagtctatggagaagaagaagaagacttgtctgggtttagacgattctcgtttctagggttgtgaacaataaaacaaattaaattgatttggttctaaaaaatattataattattattaattttatttttttgaaaatagatattatttaaaatagatttaaaatttagtttttgggaaaaaaacaaaaaatacaaaaaaggaaaaaaaaattacaaaaatactttgggcc

SEQ ID NO: 296220 - DNA, 4153 bp, Cannabis indica
gactgcacaggttgcttcatccatcagaccatttcaaatcggaagtcaatttttacacgaaccttaaatgtaacacaaacaaacaaaaaatacatacctgactatgataatgaatagtatttgtacaaattactagaacaccgccaattggcgaaggaacagcaagtagcttgtaggcatcattgggcagattctaaagaggaaaaaagttccaaaaacaaaacaatgaattgtaaatattatttacacaagaataaaccagcagaaaatgatatttccttcaattgttttcctaataatattagcgcaaaacgttaaaactataaattaaaatcttaagttaaaaaaaataatgttcgaacttcatagcatttaagtaacttgcaagttgcaagtacaaagtcataaaattaatcaccatttaaatttaggttttccatccagaatgatacaaatctttgactatgaatgtcatattttcgattgccaaaatttagcaaataatactattgaagttatcaacaacttgaactcataagccttaccccaattgtacacttataaagctggttgtgtctttcataagagtctccattggagatggcatgcattgataaaatacagctaacttggcaaaaaatcacctccaatggtgttccaaaagtttggcatacaatatagatgcaaaatttgcatcacaataaatactttacttttatgccatttttattattttataatttataatataattgtatttagttatgaataccaatatagcatataacgaccactttcaatgattagcttaagaattctgatattttattcataatacttacaacagctgaccaaataagaggatgttgcttcaaagatgtgctgatactaagcgccgaaatcatacaagtgtggtgtttccaagagacacgcccagcccaagtaagctctcgttcatgaaggatgaccatcacaggctcaatataacctgagtgaaatttgtccatgaataatataacataaaaagccacctaaagcaaaataacaataaatctaacattaatgaaaccttaaagtaaaaggctaattaatctaaccacaaaaaaccttatcaacaagcacattcactttagttgtatattaagagcttattctaattttctaatcgtacaagttacctatgcatagcattttattataaaataaaacttgactttctcctcactttacaaaagaaaaatcatcattgtgtgcacagtataaattttggacaaaaatatagatttcaagcctagacaacaaaatgtaaaagatattacatttcgaggaacaagcatatgaactttttgaaatcaattccagatggtcaatcaccaaccaaaagccaaacaatgacaaagcaataaaccaattctactttttggctactcaccgtgtacgaaaatgaagtcttttatatgcttcatgtcaagatcacgcagattaattatgtaagatgattcgatgcgagcagaaacagcacctccagaacccaaagcatcttcttccccaaccaaaccagaaccagcctgacaaccatagttccaacattgcaggaaagaggcatacttaaattactttttaaaagaaatacatatatgaaaccaataggccaaaagtttattgtcaaaagtagaacttgcttgcagaggaagctaaaacacacccacccccaattatttttaaagaaaacaaactttcaaagttatcgaaattttctcagaattagcccttaaagcaaagaaaagtttcatgcccagcacatttctttctttgcttcaaaatctttgggagtatttttacatcgtgtatgcttagcgccttaacaatgaactattttcatcgcacatagtataagattgtgatagaagttgaaaagataattaaaacaaacctgagtgggtttgagcattatcatttgtatatcatacacaagaacacttgcacatcttccttgaggatcaatctttaccaatggacctctcgcaaatgattctctgcctcttttcagatgaagccactctggaccctcaaaacagtgcatagagctgaaaattcaatactataattaagcatcatagactaaaaaaaataaaatcaaaaaaccacgaaatgtaagctaataaaagaaaaattgcaggcctgttaacttgacaaaagagtagagagaggtgggtggggaggcaaaatacacaactacaaacaatttgatggttcctctagacaacataaagtatcgagccagtaagattttaaattctaaagtcaccaaattctcagaggcttttcttttcacccaatgcttgaattcgatcttttaatgctagatactttctatggggacagaaaaggcttcgattactaattttcccatgtgccaattttctaaattatatcaatctcaggaacattattcaaaccaaaaaaaatgcagtaataaagaaaaacactttgccccatgttaacagggatcacctttccccaccttgtacgaagtccattggtagaatcatcaaattctaaaacggagattttggcatctcgaaagctcaaaattatagaatctcttcttctagagccatcaccacttccagaaggtattactgccattgtttccacattaccatgcaacctacaaaacaatgtcaacgaagctgataaggcttcaaacgcacctagtaacaaatcaatgacttggattgtaaattggggaagaacctataatgacaagcaagctctagagaaacccctgatatgccatccatgaatccaccacgtttggactctgcctgagccttggaaattctgctatcctcttcttcttgaactctcacaatgtaaacttcgagaacattgccagcggtgacaacaaggtttggtaccggaccaatttcgcggtgagaggccggggggacgtcagagtcgaggtcatcggactgaatgggagtgacgcgagggacaaagtccgcgcgagagtgagtgacgaagcctgaggcacaattctcgatccccgtgggccaatgcatcatcttgtacgctgcgaaactcatgtttggaatggaggaaagtgaaagctagggttttggagggattgagggtttaaaccagcaaacagaacccaatgttgctgaaaattgtgatgacaacaagcaaatattatgagtaaattgcgataaaactcccaaaattttaacttcactatcaattaaccctcaaaatttaaatcaaaatccccaaaactcatgttcttttagcatttagccatttccattcatcttttgcagttaagtgtcacgttgactatccatatattaccagtaaattgcgccaaaactctcaaaattccaaactttagcaacaaaacctccaaaacttatattctgttagcatttagctatttccatctgagatggtatacaattgacacaatttaattgattcacgtaaataaatattaaaataaaaaatatacatataaaattgtttgaaaattaaattttatttaatgaataaaagaattcaattaaaaacttaaaaaggaaaaccctaaaatttagaaaccttaaactagacatttctcatttgaaaaccagttaaaagaaaagcataacaattagcaatataattctcacaaacaataagaacagtccaaattacaattcccattcatagcatgaaatggatgaaacaacgtgtcaaggactatttcaagagcatgaaacaagattgggagctcctccattcatagcgcctgtcaacgttaagcattgaaaaaaataagaaatggatgtcgaaatcatagagctcacatagatgccatgaaatctcggctccgacgagctcctaacggcgacgggataatgacatgcgtcttgggattttcgagggcggaggttctccgatggtgcgactgagagagtgcggctggagaacaggatgaaggagagtgaggctgagagattgggccagtgggcctgtgggccaatgggcctttgagcctctttggttttgctcaaatgcttgctttttaggggtttttacaaaaatggcaaatttacaattttattgtcataatttttcaaaaataccgtatttttataaaacaatcgtaaaa

SEQ ID NO: 296221 - DNA, 3663 bp, Cannabis indica
tattatattaaataacactaatataatataatacaatctaatacgatgtggtcacttatttacccaaatgtaaataaatacttaaacaaaaaatagaaatgaaaaaagaagaagaacattaatcaatatttttttgctaagaaacattaatcaatattaataatgtgtttgtagatatcctgttcgtaaaaagaacaccacttttctcttccccaacagttatgtcatgtctacttccagaaaaaaaaaaaaaaacaagtcaatgactacaatctcgaagatggaggctatttttctttatgacagcgttactaacggtcgttaagaaaagctaagtggtaaaataaaggagagaaacggcgttatgttgtctataaatagaataaaagagaataattgtattctctctcgctcgaaggacagctccttttcttcttcgtttagagagagagaaaatcaaggacctcagagaacgctctccattgccacaacctctcttcttttttctctcttctcaggtaagtacttctctttctctctctcattcgatttgattagatttcgattgttctcaactatcgatctctagaaattgaagttgctgtaagtgcgatctgattacaagagcatctgatggccttgcaattgctccgatctacatttagatcttcaatatttctgatttattactcatttaggatctacataatattgattccgatgcaatatgtgcttatttggttgcttgattttagattcagcgatcgtttttttttcttcatgattttgattcttcgtatatgtattggttctggttcatttcgatccgttcctgttctaattcacatttgacgatagaatttacgaatcattgggaagaaaaggaaagtctttggtagatttgatggtcgtatagaatatagaccccatttgtgaccttcttggaaagtgagataattacagcattaaatgtgttggatatttggatttcagaatggggctgtctttcaccaagctcttcagccggctttttgccaagaaagagatgcgtatacttatggtgggtctcgatgcggctggtaagactactattttatacaagctcaagctcggggagattgtcaccaccattccaactattggtatattctttgtcttttatactaatctactgacttttgttaattctttattctgcatttatttctatgtctacgaattgggatagggtcttgttaatgatttttttccttttacaaaatagacttgccataggataattcagtcttcactatttcaatttgtggtgtcctaatttgagtaggcattaatccgtattctcctaaactattgccaattaaaattgcttgagaagtggaaacaaaatgctcttcaactcttatcatatttgttcttcacaaatctacgtttttattattttccttttggtaattgcaactgattctggtctatttggttaggatttaacgtggagaccgtggaatacaagaacattagctttaccgtctgggatgttgggggccaagataaggtttgtcactagatctaattaatacagacattagtttgattctgctatagtaaccttgataattgtaaatagatccttttgttgttattattttcttttcaattttgttatatccctgattcagaagttattttgcttaaatgttatgtggataatctatgtccgcccattagaatatcaaaggagagactggtgcctgttgctagttgaaaaaacataatttcattttctttgtgagcgtacttctaaacatacagaatgagtctgaataatttagaaaatatatgatattttcagatccgacccttgtggagacattatttccagaacacacagggtctaatctttgttgttgatagcaatgaccgagaccgtgtagttgaagccagggatgagttgcacagaatgttgaatgaggtattatgccacttctgaatattttaacctttttggttcctaaatgaaaacatagttacttacctgaagaaatattgataggatgagctcagggatgcagtgctgctagtatttgcaaacaaacaagatcttcctaatgctatgaatgcagctgagataactgataagctcggtctccattcacttcgtcaacgtcattggtaaaaaactgattatagctaactatatctttctccctctctctggtgggtatgactaaccacggaagaatatattataggtatatccagagcacatgtgcaacctcaggtgaagggttgtatgagggacttgactggctttcaaacaacattgccaacaaggttctcttcctacttaattttgttgttcttttctggttactatttgttaaagttgttgctttatcgtttattttcctctaatttattgttgtttaaatgtatttgcaggcgtagatggtgggcggcttcattcgcaattttttgttggctgaagtacaagaaaagattatgatacattttgttgtgtttgttattgttctagatttggtatgttgttaaagtgccttcgttgtacggtgtttatgctttctcttgcaaacgctgactttttgttactaaatagtgttccataataattcatatttcctctttgaaagatttctttggatatattttacccggttggtgttgttatcatataatctagtttgaagaaactcaacccattcacatcgtggcctcctttgtaccagcaatgtttgcatatcagaattcaaagaaatgaggtcaatgtaaatgtaaaactgtggtcgagggttgagtaaaatatgaaccgcccaaatgtgctcagctctgactagttttgaaggttatttggcttgtttgctgtaaagcttcacaacggcaatggtgaaggtaagagcaagaagaaagttattgaaatgccaaaagaaagccaaaaactaaccaatcagttaactaacttataactactaactaatcggttaaggtggtttgtgttttagatattggaatttgtccgtagttagaggtttagtaagagcatttgcaacttgatccaatgaaggtatatatcgaacatatagttgtcttgttagaatttgttccttcaaagtgaagatcaatctcaatgtacttgctacatgcatggaacacaggattagcaactagagatgtaacacttcgattatcaacccaaaggacaataagttgaatgaagcgaacttaaagcttaaatcaaagagaagtgttctattttatttctgcagcagcattagccaaggctcgaatttcactctctgtgctggaacgagtaacaacctgtcgcttttttgcagactatgagataatattgcttcccataaacatgacatagctgccagttgatctttgatcatttatacaactggcccaatcaacataactatagtcctgtaaataaagaaaatctgatggatgcaactgcaaaccattagccaaagtacctttaagatattgaagtaattgtttgcaagccacccaatactttgttgtgggaacatgaataaattggctgaatttatttatgatgaaggcaacatctggtcgcgttaagttaagatattgtgtggaaactgatcctctaaaccaacttatatccaactcatttaa

SEQ ID NO: 296222 - DNA, 1525 bp, Cannabis indica
actttggctttggaagggcttcaagacattacacttttaaaactcatcgactccttgggatattcattttcaccttcaccaccttgcaggtaaaccatctcacgtaaatattaatttcaattttgtagattgtgataagatagtgagctgacattaaggctatatatatatatatttatatattggctggtttaattttgtagatgttggcattaagattaaggccaaaaccccatgatgattataggaaatattgggacatgtaccatcactttctggggtatgccttgctggcagtgatctcagtaaacatgttccaagggattgccattttgaagccaaacaccacatggaaatgggcttacattgctattcttgcggcattgggtgttgctactttgacactggagattgtaacttggactaagttcattaaagagaagaaaaccaaaaggaagaacaataatgactcaaatcgagaaaaccagcaaagccagtctgccaccgataataatgccactaagtagcaacttattcaaatggtgttgtgcttttttgtccccccgcccccttctttttttctttgttctcttctcgttccatgaaatgtaattagaaagtatgtgataaattaataagaaacattttatctgttgatgctatttcttaatgtattgccaattggatagtgattcatatgatttcttagtcaataaaaaaatcattttatttttaagatttatcaaatcaaatcaagccaaaataaacggatctgaaaaattcaatccaaaatgtaaagtgcacgctagtttgaaaaattaaaatgcgtaaaataatttttgatccaggttgatatttgttaacctaggctatttctaattgctttttagaagtattccgtacgtattattctctgtttttgcaaataattgagatatgagtgttttcgggaatcaaacggagccatttagtaatgaaaagctagacccagcgcttatgttgacaatttatcgacttaggatatttccaatcatttttcttgaaaaatatttcgggcatcttttatgtctttagaaataacaaagatacaagtgttttcagggagcaaacgagattttttgagggtcaaaacagggacccagcgcccaggttgacatgggcattgggccttgcgcccaggttgacatgcaacctgctttgcaggtttccactcctcaaacataaattatgctctgagcattcttcttattatggtcaaaaataagttaggagacctcgtttgcaatcttaaaggcattcgaagtatcaaaacgagccctgggaagcacccaacacccaggttgatgtgtgacctagtgcgcttggttctgcttatcagaatctaattctgtcttgaccatcagactattttttcgtagtaagcgagagctacgacttgtgataggtcaaattcacactttcacattgttggaaatattttaccacgatctagatttactaccatgtatgtttcattaacatccta

SEQ ID NO: 296223 - DNA, 2104 bp, Cannabis indica
aaactctaattttttcttttcttatttttcttgtacttaaaaactttttttaaaattttttcttttaccgatggaacaatctcagcccctattatataaaaatgagagtattttttaattagataagaaaaattaagcataaaaactacaaaattttacctaaattttaaaaaaacaatatatatatatatagttatttatagtaaataatatacatagttattatttttaaaaattaaaaaaacgtcatataaaattttagatttattatatatattgatttgaagttattagtttaaaaaaataaaaataaaaaggagaaaataaataaaattgtatattttatattaactaatatttataaagttataataaaaaattaaaaaaaagagagaattaagaaaagaacaaataatactaattaaagagattttaaagtgtcacgtcatcaccttatatctctcctttatatatatgtagatatatagactacttctaactactttatataataataataataataataataataataataataaggcaaattatacaataccccatcatctttttgaggtgtttgacccaagcattatagccttagattaaattaggagttatgtttttggtatcttagtgctggtatttgtccaccaaaaagaaataagggtaattaaagtttttttttgtttttgagaaaaataccattatataaattggaaaaaattacataacagtcataagtggaggtggacattcctccaatcaaaaacagtcagtatccaccgtaagagcaaacttagccattgcatgggcataagtattagcagatctagaaacatgagtgatttgtgctcttaggaaaaaggatactaaaaagttaacatctttcaagacagtgtgaaaagcagaattacaagtagtagtagctttcaatccttgaaccaccacaagtgagtctgtttcaatgaagtctgcagataaattgagagtgagaagccatttaagtgttagagagagggctagagcttccatctcttcaggcttgaaacaacctctgatgggtttagataaggcagtagtgatggttcctatggaatctctcaaaacagcaccaatacctacaattccaattgctttgtccacggctgcatcagtatttagtttaaacatccttgctggtggtgttgtccattgaatcttcacgggaacttttgttgtgacagctactagagacatatcagcagcaacatgtggtgaagagttcatgaatggtgccgtaatagcctgatattaagcaagctatgcagtagcaaaacgcagaattgcagccggctgctttgctggtttatcatggtatttggcattgcattcataacatatactccaataaagaactaggaaacattcaaactatgatgttgatgtgttggcagagacatatagcaagaattcttcagaggtagtcgttgcagccatctttaaattaaaggtcaattgtgagaggcgccacacctctttggctattgtgtagaagaaaagtgcatggttaatggtttctttatgtaatttgcacaagggacaaataggagtttctacaatatgctttcaattaagctttgcagcaacaggtaaggcattatggaaaactttccaaacaaaaatgcgaagcttcaaaggaatttttaatttccagaatgttgtccaccaattttcaagagaagagttgttgtttgtgtcttgttgatcaataagtgaagtagcaaagtgatacctagatataactgtgtagttccctgagatagtgtcgttccaaatcatgacatcattagtgggaaaaatactgagaggaatggagagaattctgttgatgtcagcatggccaaagtttgcagaaatagctgttaaatcccatcttctatgctgatcaatgagatcagaaacttgaagagcagcattggtacctttaaaacaatagggagtgaaacaagtgtaaccaggaagccatgagtcttctttataatttatttgatcacctgtgcccactctccatcgtaatccttgaactagaagttctgtaacaccctaactaccttaggcg

SEQ ID NO: 296224 - DNA, 6337 bp, Cannabis indica
attaaaaaaaaaaaaattaaaaagaaaaaataatttataaaatatgtttttaaaaaatatttttatttttttattaaaaaataaaaaattaattaagaaaatagtactaaatgcacccaatacttttacaaatgaaatgtagtatcccaaaacctaaaatatagataaatatgagttcagcaaatgagctgaaatggggatgtatgtatgtatgtatttcacgatttatttggtcgtacttcccctaaaatcccctagttttctataaatgaagtagattggggtggtacaatagctataaatatatgaattacaaacaagtacaaaataataggtgaggttaggttaggttaggttaggttagagaagtgtttcatgtactatggttaacttaacttgtggttatactatctggtagtttaaaacaaaacatcataccaaatcaaggtaaacaaatggacacaacactctccaacacatcttcattccaactaaattaaatatactccatctccaatctaaaaacacaggagaaataagataaacagcctagctatagtatgttttggaatttgtgtaccactttcaatagttagtgttttttttttaattttctttctctttttcattttaaacctaggaaactagtccaaagaatgaataaatacaataaactactaaccaaaaggtaaaggtacatttacatagaaaaaagtaggaggagataataaatattatttttgttttgagaaaagtgagacctaaattagtaaattaaacttacattagattacgtaattgtcttgttatggcgatttaatcacgaaagacaaggactttgcctcctctattctgctgctgctgaatactactaattcgtctctattctctctctctctctcgctcactacaattcttcttcacataacaacttcaaaaatcaatgaaatgactccaaaactatttttcagtttggtccactttcacttgccctaattcaaatgctcaagttccaatgaccaaatggttttaaactatagtttttatattgggtatcagtagtgtctagaatcttttaaacgtgtcgccttatgattggttaacaatatttcataaaaattattatattaaactatatgagacctgatacttaattgtatcaataacaatattgatatgtaagagggtattagtactagtctttagcatttctcttttataaactagggcaaaaaatatttactaatttatttgtacatattgatatttctcataatagtaaaagatgaagctcggaccatatgaacacatcctttcaatcaataaatgatactttaatatcatttagccatatttgaatatgatcaaaacaaaggaaagcaaaattttgagcttttgacattacattatatattatatatattaattgttgagtatggaccactctattattatcaagaaaacgaaaacaaataaaagatttggtactactatagcctcttgcttgtctattagtactgtggaagtcaattcttggcacatagcacagcatgttgttaaagtaatgatggtcagggcagtgattgtgaactgagctgattataactccttatttattaatagttatatatattagaaaaatttataataaattaaagttgttgattattttttaagttgggtctagggccgagtacaaggcccaggttggggtcggagtggatcgtggtcccgattctggtccaggtctgaatatgggtcgacgtcagggttcgggttgtgttgggtaaattttataggcttcattaatttattgcatagattaatctatctccataaatctcaaaactttatctaagttaaataaattgaatgctttgtgaatttactacttaggtaaaatagttaattattgaacgcttcaccttaactacatgtaataaaaagattgggataattgactgcttcaactttatctgcggaattaatagtttgattagaaattgaaattatattcattaataggaattaggaatgattactgagggtgacaaataacctttaactagtttctcttcgtagtctcacttttaattcgtttttatttttatttatgctattttactctaaacctcgaaatccccattttttaatttttgttactaatttttgagtaattaaataaacatagtcctcgtgggatcgacccttacttagaattatactaaaataattggagatattaaaaataaatattagtaaatttgttgtggcttacgacacacatcaaatttttggcgccattgtcggggactattattttattttattattcatctttaatttttttactaacttgttcttcgagttgtggttttaattttcaacatggcaatgtaccattaataatactgtgatccatattatatctcgccacaagtgtatcaatataatcattactacgacacttacacacacaatcaacaatggtgagattattctagcacttcctacagtgggatcaatcaatatgttcaactaacttcttactatcctcatgtagcaccaaaagatcaagatcattctcttattaatctgctcaacactttggaggcttctactactcggatgcaacaaaataatgtacaattttaacaaccttctcatgttgcaccatatagtgaaaaaccaactgctgctgagctgattaaaatgttagcagctaataccttgcagtttcaataagctttcatgaaactatgcagagccttcaacaatatttgcaaaagttagagaatcttgtagagtcaatggaaacatctatgaatggtcatgaaattcaaagttcaaataatttacatgcaaatgtagaaagtaacccaatgaagaatgtcaaggccataacacttcaaagtggtacacaacctgaatcaccaccacaccaagaagtacataagttgattccaactaaaagagttaactattcatcccttgaaggatcatctccacctaaggttgaatctcctactttagttggtccaccatcactgaaaaagccatacaaaccaattgtaccaacttatgtcactcctccaccttttccaagtagattaaaaaaatctaagaaagaggagcccatcaagaagattcctgaaactcttccttccatggctagtctcttcacttttgtagcatcgtcataaatctactaatgtagtcctttaagggctctcccggcatctgttttactttaactaggtgctctaactgacctgggagctatctgaaagaggagaactgtgcgtgaaactccgccataaaggagttccatgaactgaacttccctggaataacttgaagtaccactactaggtggcctccaccaaggtagttgaaaaaaattctacattgtacatcaccttttacagcttgtaaatctatttgcatctcaaagtacttgatgtgagagagtgaatcttctttgcccgtatagatcttccatgtgggcattttgaacttgtgcggaagatcgagggctttgatttgtggtgaaaaggtttatcctcatattcggtcaagttctaggtcggcgagttttgggcaagttaggctttgtatgaggttcttaagttgatctaattaggtatgcactactggatcaacttgatctgcctattgaccgacctataaaccccttagaacttcaccaggcacatagttgtccacattaattggttgaatatcaggagggatgaaatgtccatcctaacctcctcttctgtgattcaaatcgtatcctaaatcatgtacgagtcccaacctgttgaagactaattcacctggaggccttattttttggacgttatcaatagttgattagttcggtatattcgtctaaggaagaaaattaaactaatcattcccctgagataatagactggaaaaacttgctcgtctagcgtgtgacacacagtttgatcctatggcctcggattggatggtccattatcttgggtttattgagtatagttggtcgaacgttcttctgggccatactacggtatgtttatgatataggtttctttccctctattcggatctagtctagaacaattatcaatcatttcttgttgggctctcatgatctccatctattgatccatccatttttgctatttgaatgccagattcatagctgcttgggtatcctcctaatcatggtgaagagtgttggtatgttcttgcatctgccctaaggaatcttgcatattttacaacttagtatcatctccaatcacgaatcaccactcgaggttctctaatagatatctcctgtaaccggcccaatctcttcgtcatgagtagtggtggttccagtttcctgtgtgcccggagtaaatcaagctagagggtttgttactccctgtcctgctaatggtggaactcgtggaggcaaacgggtgcttgggttaagatttgtgaccattggattgcttcgattaggaggagttttcacattaggatccgtagccattggattagttgtttcagtagtttgggaccttttgatagttacaaccatcttcagatgatatagaaaggatcaaagcgataaacattgttctttttgctcttaatgaaaatacaaaaatattgacatcgcttttagccaatgacgctaagtcaattaaagtgatgaaaataattaataataaataatataattaagcaataagaacataggatatagaggttcggccctatgattatggtaatagtctactcccattttacttgtattacttcgaagaattaatttgatcacaagaagctggctaagtgagtttcttaataactctcaggaaaaagttacaattatttgacatcataagagctctctaaaaattatgattttatgcttgtgcaatggaatgactccactatttacagggaaaaaaaaatacaataattaggtttcacaaaattgataaaactaaaaaggaaaactagaaaggtttcctattttttcatgtcagtgcaagtcaatcccataaaattagggatttaatcaagacctaaatgccagaatatttaagggaagtatctctgaagatcttctcacgtcgaagtaccctgctcgaaagacttggcatttttagataatgaggatttgtgtgaacaaccacgtgcaaattttgtctggatgatttctcctgaaggtgtaaacttgacagttttaagtagaaagttctctggtcgggccattcagggaaaattattcgtctagacttctcgatgttctctacgtgtcaccatactggatgccacatcaccttgtgtagaatttaggataacacaactaaaagaagagtaggctctattatcacggggctgaaccttcataaattctttgtgtttttattacttattattattattttattagtaattgatcattcaactcaatcattttaaaaaataagtgttgttggctaaatgtgaggtcaataataatatttaaataattaaaaatatgtgtaccattcaaaagttgtcatgtgtacaactttgtaccaagtcatctattcaagttagcatttaacataatttttggataaaaaagtaaaaattaaaatagaatagtagtttggaggttttattaccaaacaatccaattgtgaggctaaatgtcataaaacctatatacaatatacttacatatatttatattatgttgagtgactatgacttggcttaatagtttgcaaatcattattttaacataaattttggtctagaaatttgatgaaaccaatgataataaattgtgggtttgaatggtaaaagggtaagatggtaaaagaggagaagagtaggaagcagcagcgtagtacacgggagcaataatttggaagtacgcacgacccgaccttctcagtttgtgttgtcctttctttgttgtgtttgaaagaaagttaaaatagatacacaaagtaagctcaattcacgagagactctctctctctctctccactcactaattccaattatgtattacatttctctccaaaaccaaatgattctttctttctttcacttacatacaattaagctcaagtcaccatcttccttcttttcttcttggctaattattaatttttactttgaatttgagatgtacgaaatcgtattctctgaactttgtctaccattaaaatttctcccgaacagggacagaggcagaagttaagaataagggggccaaaagataaaagaaataattaaggggggctaaatacataattttttgaaaaaataaaatttttaacattaaatt

SEQ ID NO: 296225 - DNA, 7597 bp, Cannabis indica
ggtcttattgttttctctccttctgggaagctctaccaatatgccagccatgagtaagtaattctacttcaataatttcccactatatatacatctaaatatatatatatatttctccacacttataaatatttatatatatatatatacatattgtggatgatcgattgttgtgtgctgcagcatggagagtagcattgtgagatacaagagtgaaatgggattgctaggatccgctgatgaccaacattctagagccatagaggtatatatatttatataaatgtcatatagatgaacttgtttttgtgatatatattttaaggaattaatttggatataaattagattattagtccaatatctccatgcccctttaataatcgctttcggaattattagttatatatctaacacataaaactaatatgtgtgtgcgtcagattttcagcttaacttattatacatattgttgtttaaaatattattgattacacattctttaatacaaaattaccccactaggttcgtcgaagactttccaaaatatattaaataattaacgtttgtgttatatgtgtcgataattgatttattgggatgctataatgatggtcgttcattcccatcatatgatattgtgaaacgaataaagaaaaaaaaataatatatagtaatatatgacggacgcttagctctgcaaatctgtacaaataaagtagtggatgtaattaaacatgtgaaatagatatatattttgattcaatgatattattcatcaacatgaatgatgtctcttacttctccttttcctattagctgcctaaattcatgataattaaattaaaattttgatatatcacattggagcttttgtctttatttatgcactagaaactaacaatagtgtaatgttcataattaagaaatatatatacaataaatttcaaaaagatctaaacgatcgatcaatgaatgagatttaaattttttaggaaaaaatattattaatttaaattatgtataaacatatattcataagaatattgcctttcgttagttgcagttctggaggacaagaattgaagaaatgaaaagatcaacagaaaccttggaagcaaatttgaggtatacatgcatgattgatcccttcccaatatccactctatatatacctcatatatatactaattaatataatgtttgtatataggaacttagctggtgaagatttatcaacattgggcatgaaagagttgaaacagcttgagcgtcagcttaagattggggttgaacgagtccgctgcaagaaggtatacatatcactttaagaatgtatatatatatatatatatatatatatatattagttttatgatgatgatacaaccatcgagttcactacacagaaattttttatttcaaatataggttttttttctaaaagaaaatttcaaatttaggttttaattatcgaaaaaaatattaatatatgagattaaaaattccggttactaatttttaattgattagcattatgatgatgatgatggattaattgttaacagagaaggatcctatctgagcacatcaactacctgaaaagaaaggtaagatactaactaatatgtaaagcctaaattaaagaattttgttaaatggaaaataattacttaatttgtggtaacatgtatatactcatataccatgtttgacaatattatattgaaaagataacttgaataatgttatcatatataatatatatatataaataatttgttgtataaatacttaaatttaaattttaattatatatatatctaaatatttaagttaatttttgatgataataattcttaatttatatttcaaaaattaaacttatattcaaccgattattaaagttacaaattactcatatatatatatatattatatatgatattaataacttgatcgatggatacaatgtatagtatttattactaacacctaataaatttcaaagtaatttaaagtaactttttccaaaaatattaatgatatacattttttaattacaagcttaattaattaatttcatttatatagtccttttccatatatatctcgttctattatgaagtaattaatagtaaactaatttagagattaaagatatttgtatattgcacgatggtacaagacccgcctgaagcaggaatacatacactccccccgtccacaaatatatatattcactaattatttaattagtgcttacatagcaacgatgaccttattacaagctatttcatcgatctcacaaaaagaaataataataatcagaaaaaatagaaagaaaatagaacatactcgacgtgatacctatatagtaataattgcatgcttgttaaggctagctttatttatatgcagcgaataatattgtgaggtctaataactatatataataatcttgaaataatatatatcttatatcatattatcaatattgatcatattttctttgtgttttgctaattaaattgattaattacagcgtcgagaattgctagaggagaacaaacggcttctgagaaaagtgagatttatcttttcactgaaatcccgtactcttctatatatatatatataaattaaactctctaattaattaatatatatcatatatatgtactaattaatttcataaatatatattggtgtatcatacaaaggttaagctagatcaacagatagatgctgtcaattaatccatccttaaaagagttggcattcaatgcaatcttcaaaggtagttatgaactgaagtactttatattttattcatttgtttatatttttttgaataagaaagagcactatgtatatattttaaccatttgtatttttatataaggactacattgtgtagttatgattaatgtgcgtagacaatgtgtaattaagtgtatatacctcaaatacatatatctatgtacaaaaaacattacaatgtccacatattattgatcaggcactaggaaatgcaagaataataaacaaattattatgcaacctcgaatgtataataatacaagaaaaactaaacaagagatagttggccattacatatttcagtccattttattaattaattgtattatatttatttttaggtatacatatattgttcttgttaaatttctgtttgtgtgtacattgtgggccttttatatatatatatatatatatataatgatgcatgctttaaattcttgaaatgcaggtttctgaatttagtggccaggattcaccacaagtgtactattgataagatatctcaccagccactttgttgagatatatatatttatgctagcacgtagtagtagtagtaatgttggatatccagtataataatgaatatgatctatgtctatataatgtataatgtatgctttcatgaattgtgtgtgtatattatgccatcaccagactatatatattaaatatctatgagatatatattaattagttatgctcatcaaaacttcatttaccggagttcgttaattaagaatatgtattagtactgcagaagtaaagaaagtagagagagtagtgaaatgaatcagttctattctattattgatgattgattgagagaatacagtaggtaaaaagctacttatatagtacgtagttggtaacttgtaacagacatatatagttgtaaccaaaaaatataaataaatagataaataaagctagttataccaactaacatagacaattctaacaaactctactaaccaattcctaactatgtcaagcttgatactccctcaagatgggctatacatgatctttgaacccatattgtctttgaatgtcttgaactgattagaaagtaatagttgagagatgagctatcttgataagccctttttgaactttctatctaattaagtgacaataagtctctatatatctggtcctcttatggagaactagatttgcagttgtgtgttgagctaacttattgtcacagtgcaataatattgcaggtccaacatgttcaattttcaactcctttagaggttcaaatgttcaattttcaactcctttagaactgataagagccaaataatttcacatgttatattagctattgtcctatattctacctctgctgaagacttgaaaacagtatgttgtttcaaacttttccaggaaatgatggactttccataaaaataaaaaatcttgttgtagacctccttgtatcaaagcaatatgcccaatttgagtctgtataggttctatttttacctttgaattagtaggaaaataaacccagacaagtcttgacatattgacgcaccctctgcaacattcaaatgactaacttgaggtgttgctaagaattgactcatcttgttaactgagtaagaaatactacaactttccaataatactcctatacaatattggatctgtcatgtctattttgtcatcttgattgatttaatgttgactctcattggtgtattcactggtttgcaaccaagaaaaccaaggtccactagaagctataacgaatatgatctctgggacacaaaattcttcttgtatgatcttgcaacttccaggccaaaagaatacttcaacaaacccaagtctttcaatttgaattgagcgttcaatctaatatttagagcctctagttcttgtaagttgttgatggccaagataacaccatctacataaactagaagaaaataaatttgccactaaatttttcatgaacaaagaatggtcagtagcagagtgacaaaaaccctcttcaaataggacacttggaaatttagcaaaccattatcttgaatcttgtttttaagccatacaatagttttctaaacttgcaaattggatttggtggtaacttccttagaattacacccttaaggtagagacataaacacatcctcctttaaatctccatgcaaaacactattattaacatccagttggtgcaagtgccaaccttttattacagcatgaggaaggacaagttcaacagtaaccaacttggtaactggtgcaaaggtatctgtataatcaattccatcctgttggttgtagctttttacaaccaacctggccttatacctttcaatgcttccatatgtgatcttgtaataacatgttggtcatcaggtaagctcacaacaatccaggtgtgatttgcttcaaaaatttctatctcagtgcccatagcttgatcccactcaagaatcccttgagcttgactgaaaaaattaggttcaaaatggctcgaaatggccagcacagtagccttgaaagtaggatacaacctgtgataagtaatgatctcagataaaggatgaaaagtaattgagggaaaatcctaagaagaaacaatagtaggattagtagttaaataacaatgtgatagtcattgatgagatatgatggtttagtaatgtatctggttgatcgaccacagggaggagaagaaacaagaagaagttcaggaatagatgaagaagtttctggagaataatgactagcaggattaggaagattggagaaaaaatttcataagagggagctaaacctccaaaatgcacgaaagtgaagtcaagtgatcatctttgtcaatactcctcagatacaatcgaacagtcttactccattccaaataattcgaaccaatcaatttatggtccgtgattttagacatcacgggaaccacatcagaaacaacaattgattttgaatctgattttatctctgtcataatctcgaaaccaaaaaaacaattgaaagagaaaaggaagagagcaaactcaaaagaatagatacccaaatacaaagaaggcaaaagtatcaaaccacaaaatgccaagaaccgccagaaactgatgcaaggaggacgagaaaggggcaggagggtgatgggcgtcgaccgtcaccggagactattccggacgcgccctcacgcgccggggcgtgggatttcgggcagcggcaaacggcagcgcgtggggcccacgcgcagtgaatctggacaccagaattttgggttttgcagtgcggcggctgggaagtccttctatgtgggcggtgagaaaaaattttcactccaaatagggttttcgaaaaacaaccctaaactcaaaccctaatttttttttattttttttttttgaaccctaatttcgaatttcaaattttgaatcagaatgctttgataccatgtagaaaatagtgaatcgaattgtgtatatatttcacagaatagtacatatttatatacaaagctaggagactaaaaaataggaaactaccaacaaaataggaaactactaaaatacaagttaccttaattcttttacacctaatatacagttaatactctaacaaaggtaaacaagatcaagtaatttgtatgctttcatgcttatggggtacccaagaaaaatgcatggcgaagatctaagagagaacttagacctagactgacttaaagtagatgcatatgctagacaaccaaatgcttttaaatatacataagttgatggtttagagtaaagaatgtaaagggtgacttattattgagattaggtgttagtgtcttattaattaaataggctgcaatagttgcaaactctcccaataaaataaacataggattgaaacaagattgctatagctaaattgagtaaatgttggtattttctctctaccagagtttttgcataatcccaaaagttttaaacaaagtcagcaaattgtaattccttttcattatcagatctaaaatctttaattttcttgttgatatgatttcagaccaattttataaattggagaatgacattgtgagaatcagctttatgtttgataatgtaaagtcattttttgacaatttagttgttaaaatattctttaattaattgtgaatactttatgagaataaaatattattttctcgtgtttcattgcattttcatgactgtctttttctttagggaaaatttatataagagaaggaattctctttatgaaaaatttgcttaattggtttatttttgaaaaaataatgttctcttttgctagttgctcttttcaatttttctatgaatatagcagattatataatctttatatggcaggaattaaagtccgaattgtgatcttggacttatttggatagtttcccgattcatcttgatattctactacaatgtgtgattttgttgttgtaaattatgacttattttaataaagttttgtacagctgtgaaaatatgtttatggatgtctctagagttactatatgttataaataagatctagagagcagccaaacattctcacctcttctagtttcatttttatattttcatatttgtgaggagaaactttcttttgtaaaaactgagagtgattagctagtagtctttatcattattcttaaaataggttgaagagctttatttaataagagaagggtcttcaagaaaagacttgtccaagctatacttcaagaggaagtaagcacacacacacatcaaaagtc

SEQ ID NO: 296226 - DNA, 1115 bp, Cannabis indica
ttttaaaacaaaaaataaaaaacaatatcaaatatgctcttattaggtggcgtagttaaggcatgaatttggcagtagcaatagcatttgcattgtcattaaacaccactttgcaattatgaaattcgcaggagatgtatccacagtgatatatagctcactgttaatgattttagatgatggtagcgtcgtccaacaagtttcaacgttatttttgagaatgtacatcgtgagaggtgaagttcctccaactatcaaagcttggaaactgcctctgcctaatccatcacttgagaaattgccaccaatgatctgaattcatttgacttgactaactgatggaagttaattgaaacaagattacatgagtttgtcatcaatatagttttgtctaagctatttataaatggacggaagtatcaactgatcaacttgttatagaggaagcaagtgatcaagagttctgtgaaaatgtcaggccaattgtgttctggaatttcagttctatgttaatggtatgctaacaaataacacactttagataaaaaaaataaataaaaagaactacacataagccaaatcactagtttagaacagtgccaaaatgcatggaatactaaattcaacttataaaaagccaattaagcactttcctaaaagaacatgagcaaagaaaaggaagagttaaataataaatataatgtgcaacaatgagtgtacgtatcattttggaagaatcacacttaagctaatgaaaacttgattactatttgtagaagaaaaataaactcacttaaatttggtgaaaggcacggtacacataaagcaggtattatcaatatttacatatacatgtatataactcatcaatactcatcatcttcaacaaaaatccaatattttatttagggcattaatgggcaataaaaacatacctcctaaactcatgttatctatttgagttatttgatacttctaatcttcctacttttgaataacatcttccacaactggaatttcttcaataacaggattctcattaacaataggagcttcatcattaataggcccttcatcaataataggaccttcatcatcttcgatatcgggagcaa

SEQ ID NO: 296227 - DNA, 1429 bp, Cannabis indica
aaaaaagtatttttaagaccgatagtagtttttgtagtagtaattgggcctgaaaatcgaacattagctcatgcaactacataaattttattttatagataaagttattgttgaatgagctgaagtttcatttagttgcgcgttacgtggtgtaacaatgtaggagcaagtgcactagcttcaaatcatgtatttcataaccaaacataatacatagaaatcgatattcattatatgcgagagtgagatagtactacaaaagatgttggaggtaaggtacatcccttctcatgatcatttaatttagttgattgtcttacaaaaggaatgtcacactctcactttgagtttctagaggatgttaagaatcaaccaactcagcaagcctcatcagcataccaagtcagcaccaatgctatcctaaaaatcccctacattggttttagaatattgtttcaccattataataaaaatagtatagagtttgttatgcaataggtcgtgtggttccaacaatttttgatgtgatcattattaggggattatagttataatatgtttcttgtttctgtgtaattgtgagtcaactataataaccactctttattttttgtgtaaaaatcttcatctataaatgaaccatattcaccatatcattatttaccttcatactctctattttatcttaattaccattaaaaatagaaattaattgcattgatttttgcataacataagtattatggcatatatatcgatccctaataatttaaaataataattggcacacatgtaaaattgctcaatacatattttgaaattggacactagctatatatactcactcatgtgtatttgttttcttatttatcatgactcattggatatttgaaagtgcactcattaatggtcatgacacttatattttggaaagggcaagaagcaactggttattattaataataataatgatgtatttgataattaatgttattattttcgaagacaatcaactgaaagaaaggtgcccttttcttgaatatacaataataatttagcaaagagactcttgccataacaattatgagggtgtgtatagtatagcattgtttttatcgagtacaattgtgtttagtaatttttagaatatcattttataatttgttagcgatatttttttaaaaaaaatattatattaaattttataaataataatacttaattacactaataataatattgacagaaatattaaaaaatcactgacttgttttaacatttctcgtgtctgtgaatatatatatagaacatttcttaatgggtattacccattgatggttactaaataaatttaagggctttttcaagttttaacaaaaaaaagtaacaatattacaaaaatacttccagctggccaaataaacaaata

SEQ ID NO: 296228 - DNA, 6918 bp, Cannabis indica
aatcaaaatctggcacatgtatgattccgtacatgtcaatccttcaccttgatacttaactgagaagtgtaaaaagcaaaacagaagtaatattcagaccaaaaaatcagtttgtgaagttaattgtaactaatgcaacgtgtgtagtgctcaactccaacttggatagacgaaaaaagcatataggctacaaaatttctaagggcaagtttaaaataatcatgaacaagttttcaaaattcagtaatcctattcgctgcaacttaaaaatgttctccgactcttctggttcatactcatatcaaccaagttgaaagtgattacaaccatttgagctataaattacaacgaatatcacggcatttctaatgtaattagtctagagatttatgaaaatgctcctcacttgcttagggaaagatctatgtgcatgtaagctgtgctagctacgaagaacaaaaagaatgctaccaccagcattaacggttccgcaagcatgaaaatgggcttgaagttgtagtaaacctgccaaagaaagtagattgagaagaaaagattaacaactgaaaaattataattgaagctttcaagaaatgatttttctgagaggaaaatattgaaggccaacatgatgggtatgctactatttctgctacatttttattttgatatgtcaatttaaatataggtatcaccaatgtatgtggaacggtcaaaaccagaactttatgtccatattcaatatatatagcaagaacaatatttctaacacgatcagaagaaactcatatttctccagagtaggctaaaactgtagattcagaatctcctaattagagagcacttgaggtgactgaaatgatttactaggaaatgcgagaaaatttccaaatatgcaaaggacaggtgatcacctggaaaggagagttgtgctcggggaccacatttttcttttcaagaactaccacggtccgtccaaccacatcaagatatgtatatttagtctgcagagatatacgtataaatatataaaatggcagtaatgtcaaaatccaacttcaactactgttatatgcacataatcaatttattattaattgttaatagagtaattttttgtctaaaccaaaagaaaaggagaaatctctgaaaatggataatttacgtatgcacagtagtcaaaatgaatagcacgaagaaacccagatgtcaatgtcgtggatatgatacgaacagcattgttaggacagggaaaatatgattagcaagtataaattaagcaattacctccaactgctgctctactggaaaaggagtaacaacagacgggtcttttgatccctctggcaacacaacctaaaacacagcaaatccccaaacttatatttccagtgcttcagattgtaagagtgaaccaacaaaataaaaagaattagagcaatttaggatggatatatatcaccttgatggtcaacttgtctacaactgtgtcaataagaggacaaccaaaagtgaagttcaggtatctcctcccatcagatgattcaaaaaggaagtcttgcagtggtagcacatagcctatgacaaaagtagctttccaaccaccaaacaaaggataccttggttcaatttcaagttctgactgcaacgtgcagataccagaagggacacagtcaaacaaaatactaactgacaagcattaatttaaagatatcattttacagagtcttagacttatatgtcacccattttcaagaaaataatatgatcaagaaaaaacttcccacatggatggtacaataattactaaaaaccttctgcaatttcgggagaaataggtaaagataatgacaataaggcagaaattacttgctttactcaaatttaaacatgagaactcgaacttaacagcacaaatttaaactaaaatggtacttgatgtgattattactgtcaacgcaatttaagataaaagaaatgaattagcttaagtcaattaaaacatttgtgtgcaagaaagaaactcaagaacgtactttctgataatctgtgcgtaggcgtgatgatgagatgttccctatgttatctcggtagtatactgaatgaaccctaggtggtagccttgccaaaatcctcttaaatgaagagacaccactctgagctggccttgattgatattcaaccctgccaaacgaaagcatcagagattaagagcttaagatcacaaatggaattttgatgttaagaacaaaacaaaatgtagccgccctgttgactgttgaggccttgtttgctaatatctgaaaacaacaattcttctcctttagtggttgttctccttacagctctataattttataggagcataaaagcataaaaccacgcctaacaggatgtgcagaaaaattgtaaaacaaagaatactagaaataaaatattactcagaaatggaaaattatgacttttcaatggtttagccatttctgtataattactcctacagaataagttttaataccgcatctatgctctaatttttttctttcacgtgactaggaacttcggtagtcatgtccacaattactccaatgaggtatagagtttgataattcaatgagttactaatccaccaaagactatagggttcatatctcaaaatcaaagaagctcatccttctacactaacttatcagcagtcagcacaacaaacctctaagatttgtagatacaacaaacaagtagaaatcaaattgcctttgctaaccagtctgttactcatgttgctacccaaatgaaaagcccgaacaaactgggagtaaacatatatcatataaactatgtccatgcaaaaacatttatcttacatcattgtgtggccaaaattagaagaacatatcaaacatttaaatgtatcttgtatatgattttaaattcccccacattattaatgtgagatagctcttttggttttccttttaggatttggataggatacttgttaggattttgtttgactctcatccctatgttaagaatcgtgccggaacgagtagagtaattcatgtatcctacatatgattttaagttcccacatattatcaatgtggactctctaacaatattttataatagattagcgcaatatcataagaaaataaacacaccttgaaaagacacctttgtgtcgagcaccagcatgaaccagcttataattctctgtgatctgaaggctgccccagtgagatatctccacttcacgtacaagctcctcaacaacagcaaatggattgttattctcaaaatgaacaatgatgggtgaaaacgaatagggggcacgatcactgtatggcccgtactttagttctgtaccaacacgattagtagactccaatttggtgaacgattccaccttagtacttggagtcctaataaaagttgtctgttgcttaatgtagtacggtgacaacaataatgcactatcacggaagtacaccaactgagattccgattggcttatctccaacgggaaaggttcaagagaatgggtcaattcataaagcacttctagtgttgccatttcacctttgcctaatggtttgagcaaggatatactgaaaaatttggctccatttggtgcattggattgttcagaaggtttcacatcgagggggtgataagtcttcttcttcttctttccagcagtgactgctgctttaaccagtgcgacatgatcaacctcggtgggtggaaatgcaaggagtacttcagacacaggagatgtcccagtattttcaatctaattgagaaacaccatttgttcaattgattattattatgaatataccaacaaatcacttcctcattacccccaaaagaaaagaaaaaaacttatcatttgatcaaatttaattaaccgaccctaaatctaaacgcccgtaaccatgatgaataatagtatgtaataagaatatcaaacccccagaaatattacaattttaaaacacattgcaataaattcgctatcaaattagcaaaaattaattaaaatcagatagatttattgattttcccataccttcagtgttaagaagactttaataatgtgagaagtcaagtcaatctgcaagcattgatcagtaaaaatcagagacagtaggtataagaataatgatacacatcgagataaacaactccattacaaattgatctgattatatatcggttttgaatgaattaaaagcgtttgggaagcgaaattgagcgaggatgaaggctcactctgcgctcggcgttgacgatctgaatgtcctgaggggaggaggaagcgttgagaagtgagaaatgagatgagatcgaaaatagtagggctagtactagggctgctcctccaagtctgagctcagctgccatggcttcttccttttcgagttctctccaaaccaaccaacagaaggtttgccttaacaaacttcacacttttcttcgttccccatatgaaagcttagctttcatcttctgggctctttttgggccttctgcgaatgtccattgggttgggcttttttgtgagcccattttcgaatactatgggccgaggcccactccatttttgtagaacaaaatttggagctctccttatccgagttcttcttcttcatcatcttctttgttcacatttgaaggtcccatccatggacgagaaaattcaaggtaagtctttatcttgcctctccttccattcttcttttcttgctccttcacttaatttctgaagtatagaggcacctgaacatgcccaaaagttgtttgtcgaaatgtgcagcttacaatttttcattcacttcaatttctcacttgaaaatacttacttgctgaccagtctgttaatgaatattcatttagagaccattgcgaaaacaaagacataattaacaaacagtattatgattctctctaagacgtttgtgaaattttgacttacaaagcattaaatactgtggaaagtatatatcgtatttttaattcgttttttgattatgtatatgcagtgttgaatttcaatacatctttatattcgttgattaagctttttatcaactactttcttgcagattaggctgtttcgtttgggctcataaatcaagtagagggcatattggactggcctcttgtaatttttgcttttctttgtttttagttccatgctttgaattgaattaaatttactagctaattacaaaggaaaaaaatagataaataatgtcttttgtaatcccttcatcaacatccatgattccctctacttgttttaaccaatgtaaggtttttcatctaaaggccaatcaaactacttgtttatctccttgttttactctttttcacgggaagcatccattttgtattattgaaaatgtacatacaattttcagagagaaacctcttagtgctttaagatgtaattatcagtccaatggagaagatatcatatctttcgattatgaagatgaagaaaaagaagacattgaagacactggctcaccatgggaaggagcagttatttacaagagaaactcttcaataacacacgtggaatactgcaccacccttgagagacttgggttagggaagctttcgaccgaggtatcaaaatcaagagcttctgtaatggggttgcgggtgacaaaagctgtaaaggattatccttttggaacaccagttcacatctctgttgatataacaaggaagaagcggaagttgaggcttgacgggatcataaaaaccgtcttcactcttggatgcagtaggtagataatcattcaactcaatagataattagcttaactgttataatgatggtcattcatccaggcatatgtgctatatgttgaaatgttgctatatgttctctctgggcagcaaaattgtttctatctttgctatgaatttacttatttgattctcaactttacactgtataactgaacttctgaattttgtaaattgtaaatcttatcattcatttaggtttttagttgtatctttttgttagagtcaactagcatttataacatcagaaagaagtacagtgttgaattggtaaggtttcaggatgtttatgagctattttgttattggtgagaacttgtatgcattgatcatatgcataaaatatactgttctttatgtttagtttatttcataaggattttgaatgtcatttgtttttctgttgaaggtgtggtgaggcagctgcagaaagcatcttctccgatttctccttgctattaactgaggaacctgttgaagaacctgagaccattgacatgagtatgatttttggagaaaacaagagcaaagtttttactggaaatggtgaggatggtgaggaagaagatgatgaagcttccattgattttgaggatcggctctattttccccctaaagaaaaggaaatagatatatcgaaacacatcagagacctgctgcacctggagattaccatcaattctgtttgtgatgcaaattgcaaaggcatgtgtttcaattgtggtatgaatttgaacactagtaaatgtatttgtagcaaagaagaggtgaagactaattcatttggacctcttggaaatttgaagaagcaaatgcaatcaaataaatgagttttcctaattatatcaaatttaatatcttaaagctgttgttaaaattcatatttctatttaaatgtcagtatggtattttcatttcccattgtagcatttttttaagtgaaacttagctcatactcttgaaacaaaagaaaaaattaaagcgaacagaattctgggaggaatgaaaatataggaataggaataggaatgagaatatgaataggaatagaatggaataaaatttaaaatgaataaaaaaattgataaaaaa

SEQ ID NO: 296229 - DNA, 1749 bp, Cannabis indica
actatgatatataattaatcatagagttaagatgtgaatcattactattaaaattatttcaaaaataaaaattaaatttattatggaatttttcctttgaaaacgcatattaacaactaagattacatctctttttcacattgactggagcaaattctgcatcattggtaataaccatgtgatctctatttttttctacgataattatattttttaactgatactacaaaagatcaccttaatcatcccaaatatgataaaatcaagaataaagttactttttatttgcttgaatatcaagtttacttctaataaacctactagtcaaaacaaattgtcaaaaccataacccaaacctaccattccataatgaacataatgcaaaatcagccattaccaccttcaccaccaccactccatattctcattttctcaatcttcattcattttttgcatctaccttcctctcaaaaccttttcttcttcttcttcttttgtttttcccctttacaaaatctcagattctgagatgagttcatatcacaaaaaaatactgaaagcaaaggcagtcatctcagttatgtgttccccaaaattttgcagaataatccattatccaggtatgtgaaacatctgtgttcttcgtttattactatttaattatttattttgttgtggaaattacactgtagctaacaaataaatcaatttttccttatacaacataatcaagttgtaaataattgtgcttttgtttacatttataccaatttctgttgaatctgtaaatgcttgcacactagaataaatcaaaaaactaaaaaataaaaaagtaatcctttgataaaatgggaagatttaccaaagtgtctaaacagaataagaattcatacacaaaaaccaaacatttttttttctttttcaatttactttctttcctgctgtttttctgttcatggaatagtaattaattagtaacagaaagtgaacccataaatgagccaaaacaaatcaaaagcaaaagataataacaaacagcagtcaagatcacatttcacaatactaagaaagatcattctttttaacaggatctatatcattactaaaaagaacaaacttaatccaagagttccttaaaaccacaaagaggtcaactttttccctcctttctaagagttcgctcgaggtagataagcatcttgaaaaacattaacacttttgtacctccccgccatttcgctttgttttgctgcagcagattaggttgtgatttcgttctagcgaattggatgatattgtgtgatcccgcgttttggtggtaacttcctcaaaatgaacagaactaaagacgagggcaatatctccactaactgtgtatagaaaaagatcaggagaaaatatataaattcgttatataatgatatgaacatgattaccattatcgattaggaaccaaacaacaaaaaagataaatcatctatgaccttatgtagtaacccttagttattattattataacaatttaggctcgaataaacatgctaccgaaaaaaaagaaacataaatgagaaaccttaccacgtaatatatcaaatttagaattggatgatccaaaacatcaagatcagcagctttatcaaagacgttaaagcaaacctaaaataacaagaatttaaatgagaatgaatatgcacgcataagaattgatgcagaggctcaaaccatttacatttaaaaattaaaaataaa

SEQ ID NO: 296230 - DNA, 2509 bp, Cannabis indica
atccccatttttctttttctttttcttacgtactgctcgagatgatgattagtacgtggtacgtattaatttgtattacagtttataatgatgaacccgttataaataatgtgtatattatgttaaagaaactattggtttgtagaatagtgtaacgttaactactaggtttaacaagaaattgtaatgaaagaataagaatattcctaccttcaatatttctccatattgatatagatcatatatgtataataagcttagttaatgtaaaggatatgctcaccatgttgagatagctatatatataaattatgcttgtgattaataattaaaattattatggctgtcaatataagttttgggaaaattttgttgtacagcataagacaacgaagtctcttcatttttgtttgattacttttattttatataataattaagcgataacatagtgatatatataattattattttggaaattttgtattctagctactaaacaaaacttggagatcttaggtaattgcgtcaagagctggttagctatatgtagctagcccatgcagtcatatattcttattcttcttgttttgcgtactagaaaaacaaaaaaaaatgagtttctaagcttgaagtgacaccccataataaaaataaacactcatatacaattgatataagtgctatccatgattggttgaaattacttattaatagatgtgtgtgaggtttgtatgtgcatattataatttcttacatattattaatctccctatctcaaaaatatggtaatgatttacctttgtatacccatctaacaagtcacaaccaaacatctactatttctcttgactttattctcttcctctccttcctaattcttccatgaaagatggaaaatagggtcaccaacggttctaaatatatgaaggctaagacgatataaatttggaggtccttattaaataaatatacatttaaaaatacaaaaatttccaaaaaaatacatataaaaacataaagccaaaaaaaaaaaaaagccatatagataagtcaagaatctgtaaatttgtaatcaagattcccattatttttttcaataaataacatataccacttaatttttcttgtgacatagttaaccgatttgatcaacctcagttttgaaaaaattgttttctacatgggcaacaataactgaaattgttaacgaaattctataaataatccacacattaaagtaatttaaagctatttcctttatataattcaagtgatccataactcttttttgtttcctttggtaagttatatagcatgtgtaaatcttgatataaatcatctttgctatttgaaacttcactataatcattaagtttgtaagatttgagcaaaaactttatctccatttgatgattttaataattctacatatgaagaatatatgttattatgaattatatacatatactaattaaacttaaatggatatagatttatacttgaataaaaatgacactactgcctctttggtgctcaaacgatccaaaaagttggctttaggtctagacactgaatctttggcaaggaaatacgaacaatgagaaagcaaacttggacaagagagacggtacaaggtttgccatgcttggaccactaagtggggaccatatttgcatgctcatccatgatgttagacaaagcatggacacaaggtctgagtgagtaatgggatcaccatgcactttgcaacacctggtacacccgaccaacaatatgctacatgcatcaccctgcagccactactctaattttttccatttgaccaatgtaccatgtacttggctatccccatggggaccacatgtaacttaagccattagagctcacctataagtagagtcccaaccttcattcaaacgggttggaaattccttgtaaccatagctcttaagttgataatgtaagatactcactttttaccattgttcttctgcaaatttttcttaagtttctcttggatttcatctaccttcttactctttgatatacttgcattgattttccaacaattaacatcatttggcactgtctatggggacaggtcaaaactgcattgattccttaacatttcactaacaatcgaagatgtcaagactttcacagcgtctatgagacatggagatccccgttgatgacaaccagttggtccctactagaggagacccctattagggtttatgccctaaaaagcttgtaaaaacgctaccagtgaaatcttttatgggtcatataattaatataggattaaaggagatgcccgatttgcttttatggcaagtggaagattgtaagggtttatgtcctaaaaagtcagtaaagatatttttgattataaatgagagttgaacattttgatatatacataaatgttaaattattaatattaaatattgaataatttatatataaatattggaaaattccttattcatacacgaggttgtga

SEQ ID NO: 296231 - DNA, 3855 bp, Cannabis indica
tgtggtggccgaagcaattggggtccgggaggagttgagttggatcaaagatcattcgtggctcagtgtggttttagaaacggattgtctttcggttgtacaagttatccgtagctccgtggttatgctttccttgtttggcaaagctgttagtgattgcaaggatttactaagtactttgcataatgtttctttttattttgtaaaacgatcagcaaatgtagcagctcattcttttgtaagggcctctatatctcaccctgatcgcattttcaatttgaacactattccggttgagctattaccgagcttggtaaaagatttattcgtttaataaatgatgactttcattaaaaaaaaaaagttttagatattgatctgattttataatattaaaatatttattttctgcaatatatatgcgtatcttttttgaaggattatgctgcaattatacacgtgattttgtccgaaacaacttttattttggatataaagtccaaatatcaagagtggaaggtacatataaagttctaaactatttcccaataaaaaaagctcttggcattggcattggcattggcaatcaagaatgacagctagatagaaaaagatgttattaccagcaaatccagttccgactaaaaatttacaaactacatcatggtctgtcttagcgaacctaaccaactcctcttagtaccaccacacaaataaaacacaatgatcaaggaaatccacaaaaacacgaccagaacttcttaactggctgtggataaaggaccattcttgtgtttcttcaacgactcgcaaaacatagagaacgcctgtccgagttcattcggaagagggaactgaaggggaagaagggtcctcgacggacggacattgtagtgcttgtgttgcttaattgcagaaaattgatgagccagagctggctgctgcttattaaggccttcaatgataaatgagaatgctccaaaggtaagacagctctgcagaagcgcttggggtgcacctatacataaatggaatattgaagtcagcttgccactaatcacatgtcatttgatgaaaggatatctgtgaatctgagattaaggatgtatggacacatacaacacaagcatgaaaagggcaattatgcaaactttcaagggaataaaatatagatttaaatataaatgaatgcatacgataattgatgtgcctaaaagactaataagacatcaaaagatagtgttgaatttggcgaaaaaagctgtacagttgttatattattatgaggcaacattaggcactgcgctctaatccacaataatatttataaaatgcaagttgatataagaattaactatcattaatgatccattaataattgttgaaaccatttaaatttttccatggcagtaactgaaaaaaaatcatttattacttggtcaaatttggcccaatataaattaaaccaaactttttaggatggccatatttaagagtttttagccatcttttacttagggttggcttagtgaagttcttaattcccaaacaatatcttaagatcatcttccattcttccccattgcctcactttgataaacgaaaaccaaaagcattaaatttcccatgtaagcccgaaaggccagtgattattaccaggaaaactaagagcaagaccagtgcaacaaccagctactccagcattgataactgcacaataagaaagtgagattaaataactgtagcacaaactgtgctaaagaaacaattcggcattcaaacttagtataccatcatcttttcctcgaatcttcttcaatatgcagacaactaaactatgaactccagacaaaacagcaaatgtctgaaagaagtagaaaaaatggcatatacatttaaaaaatgaggaattcaataataattgcaacctctactaaatccactcattcaacaaaatactattatagctaatgcaaatgatactgggatccatagacataccttggcagaggatgccgcttcggaaaaagatcccttaaagccttttttctttacaagccccgcacctaaaaacgcatacatatttatatttatacaatacacaagtataataacacacatcaaaacatatatggtcatttcaaattttacatttataaaaatccattaacaaaaacattatgtagcttgagcactaatattgaacaaaacccacacaaatcacagtgccattttcctcccataaaaccttatccaccacccaaatgcaaggaaaaagtttataagttttaaaggaaaatatacccaaacatagatatcatcacaaaacccaaccccaacccctaataagaaaatacaaatttaacccaataaaaatcacctaaaatttacccaatatatactaaaatcaactcaatatttttctcaagagaacaagaaaatcaactcaacataaatttaagagcaaagaggaagttatatatagagtgaagtaccatagccaaaaacagagcccatgaaagcaccggcggccgagtcaccagcgaatctaaaaagacatacggtggcaccgctggaggagttagggaccaatgcattagaagggttagggttagattgggaatcgaaatcagagtcagaatcgggtattggagaatccgacgttgctgccgccatggctatacctataaactatatctcttctcttactctttagcagagaaattttttaaattaaaatacacaaaactgaaaacagtaagtgagtgagaaaggatcccgttttgtctttacgtttttctattttttgttaggttatttatatttattattcaaaacgacatcgttcgtctgtaaaatatccatgccttttttttggttgacaaaaatgaaatatccatattttgcaaaaatataataaaaataaaaagtacataatcaaaattcaaaaggacagcattttacaaaaaaaaaaaaaactcaaaaagcagccgtttggtatatgtacatagatgactgatattaccaattttcagttacatcacctacccaatttttttttttttttgagaataagttctgttattataaattcaaagagtcatttacaacaacagaaaatatagtaggaggaatctccccaccaaatacaattagaatccatcgctaacgcctgtttagccaagccataagcagcttggttagcatctctacgaacataaaatacacaaacattagggaaattgaataacagatttttaacatcaagaaccaaatctttaaaagttggtgaacaagatgctaagttgctaattgcttggacaagcatcagagagtcagtctcaatttatcaaaaaaaaaaaatttatatcagtattttttttattgattttaattattcattaccaaaaccctattacaaagtttaggagtataatatagattccacaaatcactcccacgtgaacaatgtgacaaaacacacaattattttagtatcttaatttaaaatatactattctttctatttttttgtaattaaattgtataaagttaattaaatgggagataaacatgttaaataactcataaaatggttacaaacgtgtttaacttgctataaatttgttaacatgttgataagttaacaaaaattaaagcataatcttttatacaaacgagccgggttagatcaaccaattattgagtttaggttttagtttggacataattaataaataggttgggtatgagtttgacatttgataataatacctaagcctcgacacgatatgagcacgattcatgaacacgaattaccaccccttactctcaagaagtccttgttggaaatta

SEQ ID NO: 296232 - DNA, 4078 bp, Cannabis indica
aatgcctgttgcatgttaaatttatcaggagtgtagaaagtttgcatgtgattgaggtttatatatctgagaaaactataaattaccttagtaaacctgttattgcatagaaattgataatagggagataatcatattaggccacaatcaatagaaataattgaaatcaaagccctattttctattaactattaatttcctttatttagttatttgcttcctactttcactatttttcttattttaattttctctcttcatcttattccaccaaatagaagtaaacgtttaattttaaagtacttaactacaatcctggtgggatcgacctcactctttgtgagtctattacttgttaacgatacatataattgcatgttgaaaataccacaacatgatcccgatctattgtcttggagcattgttccctgaggaattcgctcttggacatagggtccggcagagacctctccaagcagttattagagacaactctcatgtacccttgttattttctttagtatcggtattgatttcttggcttcctttccttttagttccaatcatgaccgatgaaaatgagctagtagaataaagctgggacaaccaagaggaggaacaagctccaactgctaaaaatttggctgtacaggcagctagcccatctcactaggagatggataatatcaaaaataaattttggaatcactggatgtcagaaggtctccaagagaagcgcggtctccaaaatatcccatgcttattctggagtaggctttctatgggcgtcgagaaagtaagctcaagtgtggatggcttcgacacttggatttgggaccatgtctatgtcggtgctcacttcccatgaagggactatttcgattgcttcctaacaatggttggggtggcaccctttcaattaatcttgcaagggtataagttgatggcaggttggtaaattttttgataggatcaatagatcgagggcccatctcccaaccagatcctttatttgtatagcccgaggtctaatctaatgaggaagaataagaataatatcggcttttacagttaaagaagtggtccaaagtaatcttctcaaccagctcatggacttatcctccagacatgactaaaactttacctctggtttcccgttgaagaggcacccaacacttatgttagatttcaatgttgttggtaagtgtcttttgtttgtttctttgttgattttacttcaggattcaatcgaatctaattcaaaaactttctttgctcatctttgtagatgagattcctcgtttggaagagtcacaatttcttaaagagtgacacactttctatcgtgatttggatcaaaaggccttggaggtttgggatctggtgagtgaaactttaggagggttagtttgatagccttgcaccaaagcatcaactctcctaagttttacaagactagtaatgatcctgatgacaagaaagcaaccacagcagagataattacgaacaaagtaaaataagttattaaaaaagaaaagtgcggaatggaggagatgatgaggctaaatccaaaaactatgaacgagaacacagagctggagactcagtttgctgctatctttctaaacgctggtactctgggtgtcagtatgttcgggagaggtaattttccttacaaactgattcatgcccccatccaaaggattttgccaacatcacgcaaggtgggttcgacccatactttatgaatctggatcactcacggtatccatgtagggacttcttacttagggtagatgacatagtagaaagccctacccacttcattctgccttccttaaacattaaggtatatcctttcaccttgatgcactaccttggattcttctagtaaaatacaaattttgtatataatatagaatactaaaatatgtataataattaaatttgcgcacttgattgatccatagcaattaccgtaatttaacattgcaatactatccactaagtcttcctctatattttatcagaagcacattcatttatctgattatcaaaagtatataattgtgatgacacaatatgtatttatagagttagagaggagacttagctacataatcttagttggtctgggcctgctcaacaaaggcttttgttaattagagaaatccacacttctgcttcaactagactttatatacaaatgttaagcccattaactattgattactaacaatatgtgctaacacaacaaagaactatccaatcagttaaagttttaataaaactaataaaaattaatgtaggagcaaatagaaagtctaacactaaatactaaaatatatatatatactttataattttaattacttttacatattttttagtaataattagacacaatcatataaaaaataattataattattataatttgaatattactattattttgattgataaataaatatttatcattgttattcttattaaattattgaaaattttaatgtgttatgcttttgagctaatttactcatggttatgtaccgtactgtgtcgtgcctaaacatatatcttttcatgtcgtgtcgtgtcgtgtcgtgctcgtgtcaattttatatcgtgccaaaaagctcggtccatatttagagacctaaatgtattaagtggtgaataaattagctaggtgtgtatatatatatatatatttatataaatagttaggcagtgtgagagcattaaagtaatgtaggttttgttttgcatgcacattgaaaaatgatgtgagggctaatgggaaagtaaagagagttccccacataatttaagtaatgaagatttgaaagcaactttagatacacacaaagatacattggttgtgaaaagatttggaaggactcatgatttttttaacattagttaaatttacttttaccactttggctcgactaggctgtattctcataaattttcattttttggtaaaatattgtttatcattagagcttcgtttttctcctctcttttctcttgcttgggccgtacgcacgccatgccgcattctgatcatgccccgcccgagaggatagtaatgggtcttctttaatcgcgggtatataagatgtcaattacattgtatagcactaattaattaccttaattctttatggttttgtttggagtcttagactatggagtttaagagaaaaagaaatgaaatatgctaaggatttttttttatatatttgaatttaattaataaattaagaattctttgtttagaaaaattatcaatatataataactggaaatggtttctgcccctagagagagaaaaagagtgctagagagagaatgagtagactatatattttttactttttttttttatatatatttctatcactggatatagaaaagagaaaagagaaaagagagatagagggaggaagagagacagtgatggaaagagatagagttaatatatagtaattaatgagtaattatacctgcacacacaattcacaaataaataaacttggcctactcttgttgtaagttataacttaagccaatcatatttatttaagaaaggtcccatttattaaaactaacttaccacataagttagtgattttataagaataaaagaaaattaaaactttacaactttattgtaatataatataaggaccaataaaaaaattaaataaatgtgataacaacatatatactacactatatagatattgggatatgattttgtcccgtgatgtacttttacggaatatattccgtggtacattagatgggtctcagggtacattaaatgagtgtcagggtacgtttctactttttaaccctaattacccctaaatcaatctcagccgtcagatcaaataactccctcatctgacggctgccgtacatcacagattacaatccgcgaaagtacaataacatgacaaaatcatatccctataaatatttatgggtgactattcaatggttacatttttattataactatatgattacatttttttttaacatgtaatagaaggttactaat

SEQ ID NO: 296233 - DNA, 1826 bp, Cannabis indica
ttcttgggaagcagggttggaggctgctaactcataactcttctcttgtgggacgtgtgtttaaagccaaatattaccctgcaacaacatttctgaaagctgaattgggtgataacccaagttttgtgtggcgtagtatagttgaagctaaagatttgttggcatctagtgttggacgatcgattggaacaggggaatttgtctctattctaaatgatccttggcttcctgctgaaaatccatttgttatctccaatcattctgctttaattaaccaacctgttagcagtcttatgagaattgactctagagggtggaatgaagatatcattcgtgatcttttccaggacagagattaggctcttattctttcaattcagcttagtgacaatactttggaggatcgatggtgctggaagtttgagaaacatggggaatacacggttaacaatgcgtataaacatctccaagtgctcaagggagcttggcctgctgtacaaccatcgaacttatggcgtactatatgggatcttaaagtgccccttaaggtctgtaatttcttgtggagggatgcttctggttgtttgctgagctgtattcaactacaaaagagacatgtccctattagtgttatctctcatgtttgcaaagtggacaatgaaactatttttcatgcacttgtggcttgtcctgttgcgagatcttgctggaacagatcgttggtcgatgttggcagtataactgatgatgatttttataattggctccagggggcagtatatcgtgggaaggttgctgaattggaggagttagcgatggtggcgtgggcgatttggcgagcccgtaatgaagttgtttggtaacagaaagtctctaatgcagcaagtattgttgcatctgcaagatcatgcctagatcaatataagattgctcaagaacgtagatgattttttctatctcatcttgctacggatggggttaaatctgagcaatgggagagacccaatgggaataagatcaaggtaaatgtagatggagcattgtttgctcaaaaaggacgttttggtttgggatgcatagacagggacaatactgggcgaatgattgaagcttttactttaggaaagacaggtctggtccaacctgaagtggcggaaattattggtatcaaggaggctttgagttggattgatagacactgtaagtgtcgtgttttgtgtggcaaattagatattactgttgtttggtaattctgaaactgcatttgcttttctaacatcttttctgtagttagttgcatctgtcttcactaatttcattttagtgccatgtcagctttctgcaaggttgttagtttgtgccagctgtaccttgctggttgtttagttagttaggtttattatcttcagcatataaatactgtgagaactgttgtactaactaactctcttctgttagaatcttctattggattcttgctctgctagggcatctttttctgtgtttgtttcttgaatgtgcagattgttatttcgaagatcttcttgaggtcgaagatggagatagaatctgcctgatctgaagagagttcagatcaatctgctgaaagtgattcagctgtctgaatgttcagagttcgtgtttacagagatcttttggtgattagatcttgatacttgagtgtgttcaagtattaggtaacattgtataaaagtcaatttagattacattgtttgatttgtagaatcagaactggtaattgtaattgaattgattttatagtggatgttactttaccggttcaagggaacccaagcactactcgg

SEQ ID NO: 296234 - DNA, 2167 bp, Cannabis indica
gataaccaagtatctggtatggaatatgggatatcttgtaagattaagcatagtaagattttgaaaactttcagatagtaatccacaagggacaatctcagaacatttaggcacttgataatttgtcacaaaaaataatgtaaaaatggcggagacctttcaagcgaatcatgtgtttgggtaacttacgaagttcatagcaaaaataattggagtgtctactgtaacaccccatgctccctaatctaaaccataaacataatacaatacaatacacactgagaatgaaaacaaacttctattccaaccaaacaccaaactactaagaatgaaaacaaacagagccaaaaggcataagtaacacactgagattgcagccattaacagtggcataaagtctaagtccgagggaagatcaccgcggtgccaaagggggaccaaaaggcagtatgtctccactacaatcagtggctgagattgatccttaagccgactaagaacctctttaatcccaattgcctcagccagtgctggtggttgcagcagcatccacatttatcttatgttgacagtattatagcatctggtttggtccaaaactcaacactttcatttcattatcatgctaagactcaatcggacctaaatcaaaccatgaaacgcaagtcttgttctgttagcaagaaaagacagggttggaagattatttgatggaacgccaattgataatgtttttcttcttcattggaaatggaatacataaacagtttcttaccacttataagagtcttgatgaagaaaggattctcaagttcaatagaatctttggagcgagctttctccagcgcggaaaattacaacttcatctgtgttgctcttagaacgtgattcaagatttcctgtattacatgaaacaaatatgtcacacttagaattctttgagctccattggatcatttaattctaaactataatgagtcaatttctttgagttttatttacctgagaacatatgatttgttttcattctcttttagagggcagagaacatgaagattctactcctatatatcatccaacatctcaatgcttttctgcaaaacattccaaaaatcattttcaaatacttattcacttcaacccacaaatctgtattataataagtgtttacataagaacagttttaacatcataccttagttgcaagggaattaagcaaatcaacatttttttcattttcctcaacaccttctttctggatcttcatcttccttctccctcatctaaaccaatctgatctaatatccacatgtggaatatgagatatcttgtgccaatcctcccctacttccttctcgtatttctgctccagttttgggcacttcacaatagacaatttctttaggttggttagcctttgcatgctcataggaatacattccaaatccggacaagcatcaatctctaactctttaagagttgtaagatttccaagccaatcaggcaatgatgcaagttccgagaaataagatatgcccaaatattcaagtgaggagaggtgttgcaaggcctcaggcagaacaaccaacccagaagaatcacgtaatgaactactataaccaaaccaatcagaggaggttatggttttcccggacatattcagacgttggagagatatgagttgattaagaccacttggaaagccattcaacattggacaatcctcaagtgttagatctttgagcatagtaagattcagaaaactttcagatagagatcttaatttcttacaaccacaaatgctgattgaactcaaggaacaattttgaaaaattccttcggctaagaactcgagttcaggccaaaaaacgatacttaaacttgcgagtgcattaaggccaatgaagaaatcagtgggcatcttttgaatctttcggaaaccatacatttgaaggtgttgtagactagtgaggttatgtagcattaaggtcatgtcattgttatcagcgattccaagatcagtaagaccatggagattagagatggagtttagtaattcttgtgtcacatcaaccaccttcaaggatttaaccgatcctgctttaggtaaggtcaattttgggcatttttccacattcaaggaagacaaacatgggaacatttcatt

SEQ ID NO: 296235 - DNA, 6122 bp, Cannabis indica
caattttttttaaatatgtacagtaacataaataatagagcctctaaataatattgcatgtatatatttaatgagaaaccaagccataatcccaaaaaacaatttgactatattatataaataaatatttcatacattatgtaattgtctaaattactggatcacatgtaaaaataataataaaagtagaacacatttgtaatgtaatgtaatgggatcaaatcaatgttttactccaacaaaacataaggctacctcagcttgggcttgaagctcttccaacaccttcacaaggtttgctctgcacatagtcgtttcagggccctctgctagcattttcctcactcttcatccatgcacatccatcatttaaacaaagtcacacatttatacaaatgtatatagcaaaaagaacaattcaatcaactaggaaatatatcagcatctattttttctgaatttctgtggaaagagatgaaggtcgcacgtctatgatttgaactcctcccgaatttattagggagcctcacttgtggccgtggtaaaaaataggacaatacagtaaaaaaaaactataaactaagagagcaaactacatttctcagtacagaaaacaggcaatgcagttatatatttgttctgagttccttaaaacatgaaagaacatatcaatactttaaagaaccgatcttatctcggtcattctatggtcaatgatactaaactgttagattgtaagtaaattatatgatgtgattttgaaacaggagtgttcattttgtactattgaggccccaaaaaaggaaccctcataatgtaatatgttgtgctaaaatgtcagctcaattcaccaactcaagacaagtgtacacttctgccaatcattgtttcccttctgaagtggtgattgttccccaaaccaaataatattcaatgtccttccctaattgtgggctttttaacaattctaaaattagtgtaaaaaaatatatatgatacttctactatacaggaaggcagaacaaaggtgtaaaatccgcattgtgatttacaaggctatggaaaatattcataatggtatccaattgttcagatgcggcatcaattactctcttagttgggcaggcattcttatagcaatataagagctaaagtaaataaatatttataaagcataaatttatatttaaaacagaaaatgaagacagaattagcaggtatccacagagaaaaaaatgcattaatttgaaaaagtatttgaggtggtaaactgtacctgtggacagttgctgtgtcaccatgaccggtgcaaactataaacatggcattagtaggtaaggcgttatgaagataacggattctagaatccatacgagcaagaatttccttcagttcaggtgtaactttagatttgctgccctttttattcccaggtttatcacgacaggtaagcaaagacatcatctctgcaagtttaacattcaatttctctggattcgctgcttctttcttcagataggaattcaattctgagaattgagtccaaacaaaatgaaccttttcattctttacctagaatacgacataatacatataacagtatgtaagctgcagcccaatgttaaggaaaaagaatgaaggaataaaagacttacctcctttctggcttttgaaagagcttcatcatcagaagatacaggaaacgcatgggatgattctgaagcatatcgtttaactatcgaaacatcatcaatcatagatgagacttttccagaatcacttaggactgtaaggagctttctccttatcaatgatggcggtgacccaaaatcaggacctaatttaataaaaaaaaaacgtccaaactaataatgattaaaccagacttaacttcaccaccttcacaacttagctaacctctattctagataacatgaatactgcagtaataattacaaatacataaaaagaatcactcaccattattaatttttaaaagtgccagttccaatgcagtccttgcatcttcagtgctgtcatgaccatcccccgactgctgtatctccttagaaagaaatctcttggcaagaactcgtaaagcagttttatgagatctcccacgagggtgcttgtacagaactgcagtatcaattaccagattgtgagagatcttcaatgctaacaagtcattttccacagaatgtccaactaagacagtctccttgtaaaccagctttagaaaatcctcctgagtatgggaagcaactgtaaataaatccgaaataatagctttaaaacagaatcaagtaagataagcaattttagaagccactaagaaaaaattgttgagcataaaattatagagaaatgcaacaagagtaatgaacctgaacatctttaagacttgtagtcacatcatttaacatgtcactcgtaatcccactatatctgcataacatagttatttacatcagacaagaggtggagagcggaatagttaactgtcattaacatgaagaatatgaaagagaggggttgaagtcagagagcaggaatggaatggtagagagccctaaatgttgtttcgaagagaaaaaataaaatctctctagaaattgaactaccacctgggtataatataataaccaaggatagtagaagtcagaatttggacaagaagttttgctatttatacaataacaaaaaattaaaattaggaatatccaccttcaaaacattttgacagtattaatctttatatttggacttccatgagaactagaattcatatttcctcttaggctgagcagtgaaagaaaagcaaccattcctaactacttgaaaaggccagctacaataattcccgaaaaatctacaaagagcgaaaccacaacatacctggtgttgtaatcggtaatattgtttgatggtttaaccagtttatctagcacaacctgagagaatcagacgacagcctggttaacatttaaggatatatatcattaaagtaacattagtaaaactaatctcgaaatttacaattccagtttcataaataaatacatcactaaatgagagctcccaaagtctcccatgccagaaatttgaaacaaaaaacatgttaacattttgccaaggcccccttaaaataataacagaaaaacacattttgacaataatcttagtatcacttaaaattaagttgtttaagaacgacatataccaaaatatttgcttttcattggcacattaaaagaaagctttctgactaatagtcggggggaaaaggatagatttaatcaaaagatacctggccttgaacatccactaaggtcactcttgtcagctcaaaaccctcacttgttatgcacaaacaaaacaaaaaaaaaacaaaaattgagaacgagatgacatgaaagcaaaaatgaaagaaaagaaaccacaagacaattttcacaaggtaaacaaattaagctttcaactaaagctctatggcaatcacatcatttttctgaaaacgatatgcaactttgcatctaactcttgtatagtccaaaatcagatccaataactttataagccataatcagtgaaacttgtacatgcaaaacaaacaactgattagtaaacttttcctaaatataatcttagaaaagagtttcttagtaaataaaggcttgcatctactacaggcatcaattcaataaccaatttttacaattcccctccaagcatgtgtgagtcgtattgtcatacttgaaacttaaaaaaattggtttcaatgtgttctacaatcacaccaaaagtcccaaacaagatcttactgacagataagataatcaccaagtgaggacctaactggcgcatggattggaataaaataaataatttccgaaattgtcatttaagcttttcaatagtaaatattccaagtaatgtttgcaaatgagattacatatatttattccattcaaaagtataaacaagatctatatatttaccatctcacaatcaagtgccaacaaatcatatggagatgcttctgatggagcagagatagtagaaataaaacctgcattcaaaatataaagttttaaggtttaaaataatctttcttctagaaatcgttgtttcttataagaaagacatgacatgtaattcatttttcacctggcttattaagacagtagccattgtcttccatctccttttctgtaagagtgtaatatgtaatggggaaaggtatatctttcttaagttctataaaggattgttcaactgtctcagaatcacatttttctgcaaaacacaaatgttttagtacattacataaactggatattctacttttatgataagattaagtactatacaaaataagttgaatagattagagagagagagagtacagttgaagaagaggtgattagataacttataacaggggaaggaggagagagataaaagtacaagagacacgccatagagctttgcaaactaaagtgcatacaagtctttcaagaaggaatttcttaatagtttcatgaaacaaaccttcagatgcataccgatcaaataaaggctgttttttttttcagactgacaaattgtggaaacagtacacaaaatcattgcttcatttgcatatcttaaactgcttaattagtttcaaaagaacaccaacctggttcacttgttgagttaggctccctttggtccctctgatccctctttcttttgaccttgcatgttaggagtgtatcaatcgtttgcattccatctgatatacaactagcaaggaggaaccaaaatttaaaatattgtgaggaaacagtaaacaatgttttcaagagggaaactaataaatattcaactggcacagatgtaaaaaaaaaagaaagtaaaatacataacaacactatcacaggagtagtaaagaatcgcatcaatactaacctaagcgccaaaactgccctgggttttccacagaattctttaagagtgcgaagcattttggaatgtgataagtacaatgctgcatctaggcctggaatgtagagcagaaccacttttgggatgaggggtttgttctgcaaatcattaacagttatgtaagtaacttttgagtaatatttatacaatttgtgattagtaaaaaccactaatcgaatactcatgtaaccagaagctcaaagccctaatttttttgttatctatgaatagattataagttccaagttcaaaaataatactactcattccctatccgaaatgtctagtactacactcctactagtgacatctactaaattcagcttttcataaagagaaaattttcagaatagaaaaaaaaaatcacatagccaatcaagtatagcaaaggggaaaatttagggttccaaacaatttaccttaatgaaagcccatgttggcatgaatccttcagcaagcacccaagttacaagtccttgaacatcctgtacagcagtacatgccagtcaaaatagttcaaacttacatacaaaacaaaaatacgagggtgatcaaggtaccaacttgcaaattcaaagtagaggtagcctctggtactgtaaaaacaacttctgctttagcctgaaaaggaaaataaatcgaacccaatgtaaaatactaatagtctgcttaagaaggttgtatagtttatcataacagaataatcagaaaattcaaaaaaaaaaaattgtttgataaaagtttcagtttggtttagtacttaaaaatgccaccttcagatatgtttaccaatatatcagaacgaaaaagggaaaaaaaaaacttactggtcgctaacttaatatataaatgcgagacatattatataaatatatataatatacaaataggtttataatcatatcattgtacaagcgcttgaatttgaagtcagaatagagaacccagtttctttaaatcaaacaacagcggttaagcaaaagaatagagatagataaagtacctgagggccataaatgtcgaagaaattggaagctttatcgttgtcagcgatggttgaggcatcgttggagcagtcattgtcggcttcggcagcatgaaccggcgaaggcattctctctctctctctc

SEQ ID NO: 296236 - DNA, 2351 bp, Cannabis indica
aaaacatagttgggaatcacaaaggggaaaccctcccttaacttaaattcagaaaaagactcgttacttctcgcaagctttgcaagtgcatcagcttgaaaattgtcatttcttttcaaatgaacaaaatcacaactagcaaaaaaactaaacagactccaaattttagtaactaccgcccttgatttccaacaaggaggaagttttcgactcatcatggactgcaccagcaggagggcatcagaggcaattgcaatggaacgaaagccaagttcagatcccaattgcatcgcccataaaattgccaaagcttcggcttccaaagctgcatcagcaaccacaactttagcagaccaaaaccacttaccattttgtctatcctggcacccaactgcaatgccagccttgccttctttccaggaagcatccgtgaccagaaaaccatgaactgaattcggaatacaccacactttttccttgctgctctggtgcatgacatcacaatcctgcaagttaccttggattgatataaattcctccattttctgcaacatcttatgtcttgcatccagaacattcgccttgttgcttctaaatgtaactgcatttctagagaaccaaattgtatcaaatagtgtaccaacgaaagtcaggaacttccccctctcatcctccttacactgagccccgagatgacaaacaatttgacttaaatcatgatcccccgaattcatatctgcaacaggaaagggacccgagaaccaaagggctctagcgaaaggacattcccagaataaatgcttgatcgattcgatttccccatcacatagaacacatcctatgtccgaaaggaactttaaattcgccctgactgggatacagcctcccagcactctccaaagcatcattgagacccttggatggagtttattgttccagatcatctcccacttatcacatctctgacttgtattgagcttagccaattccgaataagctctcttcgttgtaaattttccatcttgagcattcttccatacaagcatatcgttgtaatcacacgggaggcgtttgattttgctaatcttatcccccatctgttggccaaacatctcgtgtaaaagctcacaattccaatcattaccattcaatgacaaatcagccactgatctcaggttgggaaatcgggttctacaccccatcatcaaatctctaaactcattgtagcttagccatggtatccacggctggtaccatatgtctattgactcccctttccctggaatagatgttgatgctgatctcaaaattcctcttgactgaagaatacctttccacattgcagagtcactccctcgtggttctacgctccaaaaggattggtttctgcaatactttgccttaagacattggacccatagcttgtgattgttggtagccacatgccaagcaagtttggagatgagggctcggtttgtgtcttcaagtctcctgaaccccaaaccaccatctaatttcggtttgcacagtttttcccaactaatcattgcctggtaacgatccctcgtagcgtcccctgtccaccaatatttcctaatcaacgcgtctagttcccgacaagtagataaaggtaccttgcaagtactcatagtgtagatgggcaaactcaaagccaccgattgaataagagtggctcgaccggcaaaggatagaagcttgagcttccaaccctctaatctcttcataagactctctttcaatcttttgtactcctcccttttccgtctcttgaaaacgaacgggttccccaagtgcatttcattccccgaacattcttggacttgcagcgcttccaatattgttgctttcctcgagttctccatatttgaagagaataagatactagttttgggtttactgcacttttgacctgaccatgattcgtacatctccaaacatcgcatgattgttttagcattctccatattagcccttgcaaaaagtatcgtatcatccgcgaacatgagatggctgactacaggtgccgagcgagaaattttgatgccgtggagattgccttccctttgagcttttgccaaaagcttggccaaaacctcatgacagagaaggaatagaaagggcgataaggggtctccttgtcgaatccctcgcttcgggaagatcttcctctgtggaaagccattaatcaaaatggaataagatactgacttcacacatttcattaacagctgacaattgaattcatcaaatccattcgcctggagaaccttggaaataaaactccactccaatctatcatatgctttgtgcatatctagcttaatcgccat

SEQ ID NO: 296237 - DNA, 4135 bp, Cannabis indica
ttcaatgatgaagagctcctgtgtactgacggaagagatatgattgataagtcttactatgatggtctaagctcacttttgttgagttcaccaaatgatgttggtcaagatcagatgaccgatgtaatggaactagaaacatcaacagatccagatatgtgtacgatgaattcatctggcccttgtcatggagagccacatgatgatatggagtgtcacaagggtgatgaacaaatatcattcaattctccaaaccagatgcaatcttctatatcaacttcaaaaattcaatttcctgaattagaagatggcattatttgctgtgtgttaaataccgaggaccctgaaattccatgtaatgatgatgttttaatatcaaatcagccatctgtgatgttgtctgccgcagaagcgaagcttcaagaagcaaataggccactttcttcaactgttaaggatttaagtagcaatcaacgaactagtgatagaggacctcacttgatgcataaagaaagaaaaacccctggagattctcatgtattttctcaacatctttcacaagagatgggtccgagtccctcagttggtagttttggggtcaagtttgcagcatctaagtctgactcaaataatatggcatctaaggttgcaggtattgctagtagtggtctaaattctgcaaattcaagcacaaggatactccaagagactctgaaggaagagaccagagaaatttcaatggccaagcatctcatctcaactgatatctctgtagagaaaccagctttaggctctgcgagctttaaaagctgtccacaaacaaatgccactagtatcaaagaggaacaagatgggcctagatatcaggagtcagtacatgcggaactgacgcccacgattgatactgctgtttctgaaccacttctagacaatcccacagcagagcaggatggggttcttcatgagagtgacgaagatgacataccttattattcagatattgaagcaatggtaaatccgcaaattcttaatgcagaaaagtagaatgaaaaaaacaatagacttagttgcttgtgatttgtttcgtttttatttagattttataataactttctctttcaccctgcaggtacttgacatggacttggatccagatgaacaagacttgcattctagtgaagaaggtaatgactgagctaagtgatttggtactattattgaagcaactaggaacactattttctttggctttctctgttatttgattttatcaaagcatttaggagatgtgatatgttctgtctatagataattaaaatatttataatacctggcataacaaatcaatttgaatatggtattttttcaagtattgcattcgtatatagaattaggacaatgattcctataattattagagtggaacttattttatcgggtggatctcagtttctttaacaggagatgatatgcaaatatttgcttgttcaggtatctatgtatctccatatctgtacataaatgtgtatatattttggtcatttgttttcacgtgatcatgcatgccatatacttactaaattccagattattaataaaacctgttgttgcttctgaaaaatgtgcaccttttcatctttcaacccaaagcctctttcttttgttcccctttgttgtgttgtgcctcttcaacgctcttctctttcttcttattactcttttccttatgtgttttctaatattatcccacatattttagttcaatttacaatatgtgggatctaatattaaattacatcaatcatgtcaaagtggtgctgggcaccatctaccccttatcattacttttttcttttttcgttgtgttttacaattataattttgcatacatacagtctcaagatatcagcacgaggagactaagagggcaatcatacgactggagcagagtgctcattcttgtatgcaacgagctattgcatctcatggagcacttgccattttatatggacgacactcaaagcattatattaagaaacctgaggtaggccagttttgtcactctgcctgacccctgtactttttctcatttgggatctttctggtctttgctatattatcaacagctgtaagtggaactttttggcaaaatttgtattttaacagatggattcggaaatcagattttaagtgccgcaataaatttgatctaaactcaaattaatgaagataagcctatataagacatgaaagaaattggagagtcagaattttattttgttttggcttttctgtttattggtcatgttcctttcttttcttttctaagggttggccagaatccaaaagtttccacaactgtaaaatctgaagtgtttttgcttttctgtgtattagttatgttcctttcttttcttttcgtgttaagggttggctcgaatccaaaagtttccacaactgtaaagtctgaagtgtttaacttgaaatactttcatgcatagaatttaaaatgtgttctggatagcacctttgaaaagtttttgttgtcatctattcgctcaatggttgattcttttattaatcttacataaaattctgcaggtgttattaggtagagcaacatttgaaagccctgttgacatagatttgggaagagagggtcgctccaataagatatcccggaggcaggtaagaggttcttctgatcacactggactcactcatttcagacatttaatatgctttcccctcctgaagtttggataaaattttatatactctctcacacaccttcctggttaagttaaaaggacatctaaatatattggtcaaagacgctagatgtcacataacaccaaatgaaactactactactacatcggcattcaatgctcaaatttacatttatccatcaaccagaattggagatttcataagtgggagtagatctactctttatattttatcctgtggctggtgggggagagggcttttgtggttatgcttgtgttatttcatgtgtatcttttctttgttttgtcttgctaggcatttttaactgtaaccattgatctttatgacatttgatcttcttgtcttgaatttagtttgatctttttattcttcacattttctaggccattataaagatggacaagggtggatctttctgtctgaaaaaccttagcagcaggttttcaatatctatgaacagcaaagaaataggccctaagcagagtcttaaccttaattcgagttgcttgatcgaggtacgttcctttggttccttgtcacgctgctgccttggtaaatagtattgctaaggcccttttgaagtaaataaaatctgatgtacttgacctcatttaaatgctttgtggaatgagcttgagaggttagaaaaatgctttcatcattttacaatacaagagtaggtaaagatttgtaactaaacaattaaatctaaacctgcttattggtatctcactatttgtaacagctttttaaccatagtaggtaggaccagaagtcatcagtttaggtaaaaatataagacccttggacaatcataacagtaatttgagagttgttgctcaagtaatagtttctagaatataaatgccaaacttattttctggcattgtattggaggaggatctttgttgaaatttctctggtcagaagttgtaggcttttttttttcttttttaatttaatcaccattcatcatgtagccttaattgtttatattaaaacaaattaaacacacatatctgtcatcaattacatgttaatcttatatgatatgtcacaaatggtggattttcagataagaggaatgccattcatatttgagacgaacccaactcgtgtgaaaatgtatgtggatagcatgaagactagccaaatgcaggaggaccaaatacaaacatagaggaggtgcaataaaaggtattcctcattagaaggtgctctttttactcatgacaaatggtgaatttttctcttttaatattctaattgctcttccgggtcatctaagtttttttcttttttctcttttacaatctaacagcatgagagcttgaaatttgcaaaataatctcatgtagggtcgcttagtgtacatataggt

SEQ ID NO: 296238 - DNA, 4031 bp, Cannabis indica
acaagacagaatagggacccaaaaaaagcaatactcagaacaagaaaaaaggtagtactagtaagacctacaatataaaaagccttaccactaaaggaggtatatcttctcctccttatacccagacatgtgttgggaaatttgatcttcacacaataaaaacacaggtatataataatgataaaacctcactttctgaggaatattaagttcaaattcaccgagctgaaataatcgacacaggtgcaaaccataagccaaccacttatcaacagactcagctactgattcaggtgtaaaacccattttttctagcaaaggacctgagcatataaactcataaaggtcctgcacagaagatacttgtgcaggttttgtggggaacacagaatatacaatgccccgccgcctgtcattggcagcagcggcgttgaaacatgtggagcttccttgcatccatgaacatccactgcctgcaatagtccctgaaatatagaaagatcagatcatgtttttaaagaaggcaacttcttttcaatagtaacactaactattcaataatttgagcctattaaaaaatacatgtctcaagatcttgagattactcatggttgaccaatgtcattgtaaacctcacatttgaagctttcctaaaaagaaataaaaaaaaaaaaaaagcacctttcatagacaccttatacaagtgggaaaatgtcactcttataccatactctaaatttaaaacacacattttactactttaagtttaagccatgggttttatctgaccagtacaaacatgtatgtgagaatagactgataatcaaacagagcataattcattacaacttcaataagccaattaacttccatatatgaaaaatgaaattaggtttcatagttagaggatcctactcaaattttctcaacttatcatgagttctacttgaaatttattcaaaacccatcatagtataggattgaattgaaaagaaaaatggagaatttaccagatttggatagttgcttagccaccgaagacaaagttggcttattgggtacatagagaggcccgttatcaaaagagttcttgattttaaaattaagaaaggaagaagtgggtggctgggatatgatattgagggccgccattgttgtgcttcacgaagctgaattgaggatagaattggtggcaaatggtggttacggttgaaattaagttgaaagaaagaaaaaaaaaatctaagaggattttgtgaaaagagtgttgtctaatccatacaataaaaaaaatatttacaacacaacatttgtgtgtttgttcataaatatagataaactgtagccataagaaatgaaacacaaaaacttactccccattttaacagattgaaattaaaataatttttgaataaaaaaaagaaaaataaatgagggaatttagtggtattcatttattgtgaagttcctgttgcttatccatcaggaccatcatcaccatgttctaaataactgtatgtaacgatacacctgtaattttttatttatctatttcagacaataaggataggaattttactatttttttttttatttgaaatgataaaatagatattatattttttaaaattttaatttttaataatttcttttaatataattaacttgaagacaattttatgcaaaaataattgtagaaagggtaattaaatataatgtacaatttatcatttaacaaaataaaaaatttaaacattaatttttataaaatataagatctaaaatattatttaacctaaatataataggtgtgagcaatttaacatcaaagagttttttcttatatataagataagcgatttattaataacaagtatagtttataacaacaacaacaatgataagaaaataaactttcaatcattatggtgcatgtacaataaatttataaacgactttactagcttaatgtcaaacatgaactaagaacgtctctaaaaaattataaaacaaattagcaatattaagaattttaattcattacataatgagacactttgaaaaaccagagatctaagctacacaatcaaactcaacagaatgaagaagaagtccaagcataagaaaccaatttaacactacctcaaaactattatttatgcttgaatgacgttgaaactctctacaaggataacaaaaaataattttttgtgatccaaaaatatagaagaaaattagataaaaatatagaaattatagaacaaagggatgtatctccctcccattaacataactttacaatgacaagattgtactagagaagtagtcattttttaaatgaaattgtaattttattaaattagcattcggaatacattagagtctgaagatcagaaggaatattatgcccaaaaatgttacgatcagataaatatcgagcctactagagaagtagttaattgatacaattatcagataatcccaattgctagtcatcctaattatagaccttcttttggataatggaagataagtactactctgaatgaaatcagcaactttcttcaaatttcttcaccgatagtttatgcactagctagatctgtgaaaaacatccctaaatcaacactggaatctttgagaagatgaacatacaaatatttgttgcaattatacataatacattatgtaatacgaaattggtgatcaatatgatgaaaccatggttgtgtaaatagaaaaagatatatcaactacttgaaactaatcttattattaaagatggtgggagtattagagagaaaaagtaataccaacaacaaatatagtgcagtattggaatcgcccttagaatccaaagccacggtgctaatcacagtaatcttttgcccatcatgaattccatcaatacaataaaacaataaccaattgtgaaaatcaccataaaatataaaaaaaaaacaacagcacaagatgaactaatcaattattgtgtcatattttgatgaatattttagataaaccatatatgatcattactcaaattataacaaagcgttggaatcaagctacgttggtcaaaaagatgataaacttaatcatgtgtatgtctcacgcacgttgttcaacatctcatttcatttcttcattttataaaataacaagacttttttactttaaaaatacaatattgaattcccaacacaccactttggatacaactttatcattaattaatttcttcttctttaaccatttttttgaaactttcttttttacctgtttctcaaagtatgtgagcatctgttgtgttgttgcagcatcaaaactttatatgtaacgctcttcactcttttcataattaactctgttcataacaacaaactttattacctgcaaattataatataattagtttctcaaataacatagaaagttaaacttgcatacacataacaaaaaatactaatatgtattacaaaaatcattatttatctatttatgatgagatatcatgttttagcttttaaccagagcagttatgaataatgaaaatatagcggggaacgggtgtgagaggtctatcacgttccatctctgttcccgctcctcagtttaaattttctaccctatcccatctactttttatgggacaggaattatataaggttgaggcaccttagttatcatcttagtgattaaactacattaaaaaaatatgtatgtatgtgtaatatataaatttcttaaaaaagaaaatctaactaagaaaggatcgagatgaggaatatcagtccaaccccactctaacccaatatgtttggtttgagcttttagtaaccttgggaaaagttttagcttcttaagaagactctttctgaaaaactattaaaattaatttatattaaaataattttttagagctaaaagtcagcaacataaatattcttgtaaaaaaaaaagaaaaatttcacatatgcttaagaaaatctttatgctaagtgaatgataatatagtaataataataata

SEQ ID NO: 296239 - DNA, 3882 bp, Cannabis indica
ttcagggattcaataattatgatcaaatgtgttatgtctaacttcttttgggagtctcttctagagtaccgtttccatcacgatcatcatcaatactttataacattaaggtatctccatgagtacctctagatttaacaacttcatcaaatgaacatttactaataatttctacattgttcatttacgcttcaggcgttttcaactcattctatctcaactttgaataatattgatttgcagttggtatatatcattttgaactatattgttcttatatactttgtgcaaggatcatttttcaaaaattatcatcgatcccaactgcttctctccccctgatcgagagaattttttttttaaaaattgtgatatctaataatattaatatactgcatatctaataatatcttccttagaaaaagagaagaaaaggaactagaaaacaaaacttaagcgtacagcgtcatgaatgacgctacacacttgggggagaaggaggagaagtaaatttcttttaagtcaacaaggattagctacacttagatgatgaaataaatatacttctccttagaaggattatatggccgaaagaggttttaaaaggaaacactcatggcattatactagaaagagagggatgcctctcaagcataagcaaacgttcgcaagcgcatgcaatggtgaaagttccaattaagaggttaaagcatgttaaagtaacaataggctccctcacatccaagtaaaaggatgagaccactcaaatagtaatactctctcaaatcaaaatctgcttatcatagtgggaaaagtcatttggccaaagagtgatcccaagagtcactcggccagcttcaatatttaaaactaaagatacataagaagcaaagcaaaaaaatctactcaccatagtaggaagaaccacttgaccaagactagctcccaagtgtaaaatagacaagtaaaaataaagtcttacagtcatccaagagttcaaaagcataaattaaagaaaattttgaagcctctctacacaatgcatacgcacgaaaaagaggctgctaggtgccattgcccgacaggctagcattccgacgatgcttgccttggcatgctacactcttttcaccacattcagccttgaaaacctcaatcatatgaattgcaaaggggcccaagatgctgtaatcgaccccatgattcttcacctaaacaccgtgtagtaggcgctcaatcttttcttcctcttcctcttgctctttgtctttaagatgaggaaatggacacatagtttgctaatctgtgcctggagtttctcttgttagatttgcaaatttgcaaatttgcaaaatacttctcacgaatggagagagattctttaagttgctgagtaagacttgacacaagggattggctctccttcaactcagcttggagacgatcaacctacgcatagagtgggtcgtgttattagactcgacaaagtcatttagaactttttaaaggcaagaaagatcccactcaacagatgaactagagcttgggttataatgctgcaagacaaaagcctacaaaaaaaatctaaagtcaataaatctttagcaaaatattaaaacacaatgacaatgtaaactaacccatatgctgcatttgaaagctgcctcctagcgatcttctgttgaagagttatacaaccaattccattaagaaggagtgtactctctgaggcacctgttgtatccattggagaattggctcacttaagattgagaccccgataactcatcaagactaaaagacggttgaggaaaatctttggtcgagccaattgaatctcggaaaagatgctgagcattgtaaacaccaaaagaaacattggaggcataaccagaacctcccaaattcatctcatcacacaactaaccttcggtaccaacatctgaggatggggcatatctatttggttcctacattttgacatccccaattgggcccgttgttggttttatggtactaaattaggtacgcagtggaagagtttcatattatctgattatcattgtaccatagctcaatagatctttagatgtgtgtacattaaataaaaatatgaaataataagtttcgaacatatacctcttgtagactatcaaggtatcctcgaaacttctcgcatattgtatccttaactccagatgatatggttgatggaattgaacaaacaccagtgtcttctaaattgatccaccacacacaaggaatagtgtgggctattaggataaagtgtataatgctgttcttgttgagttctcaatacatgagcaagaacaattttaagagaaaaactattttccttttctcctctatatttcaaaaataatgttgtgtaaaagcatcttcggatttctcaaatcaagcttctatttacagtagttaaattccattaactaaatcatattatttgaataaataaatatctataactaaacccttgctatgtacaacatcccatacataagaggggcttagccactgaaagaatatcacaactggggcagcgtcccactcccacaggatttcctacattcaattagaaaatctcttctagatgcagcgtcttgctttcagagagctttctataattgatgatgcttttattttggttttgatttttgtgattcgaggaggaacacttgcactagcactttagatttataaactcagtggttatattcttgtcagacctggagcgtgtatatcataacaatacttaactctagtgtgcaaatagtctatatgtgtggtcttttaactaaatgaacttaccagcactcgcactaacactttaggattaagaaattcagttactagagataacatcaacatatcattaaaccatagatactaactcaggtgtgcaaaatgccacttcaactcctggctctcttataccaaggtgtatgtgacatacatggctcgtgtgccataatttttgtgaatgctcatgtaacgtgcaaaactcccatgtacaatctcttattttccccacgagtgatcaaataaatgacttcattggtcacttatcataccgaatcccattgggctttcttgatccaaatcctattgggctttcttgatcatgggtcttaggaagtttttacatatgtgagcactcgtccacttatttggagttaccttaagacctattctacaagcattgttcaacacttgagagagttgtcaagtctgtgagttgcaattgattaataacaatgaagtattaacaagctttactcaacgcttttattcattagatattaaattaaattacatcatcgtgagctaagctgaaagaacaagaagtagtagttgtagacttttgtttttaatcaaagcttaactgaagtgatccccactacactaatgccctgttccaataatagtgtaggggcctgtaaagcccgcttagttaatttgggaattagcagttgtttatgtttaattatgaaattatttatagctatttaaataatttattactgttatttatggaattcagaaatgcatgattatgtcgtcagtagtttttatatttcgcatttccggtgtccggtattttggaactcggcgtttggctcagtagaaatcacaacttagtatgttggtaattgggggaccggtttagacattgggaatgtcgggagtggccgggaattcagaatttcccaaaaatacccctttagtatgatttttgtgattttatggtggaggggcaaaatggtctttttgccccaatgaatttttgtcttttagtgacttgattatttgaaaattaaaatgtttatttcattgtatatttggctgaaatggaattggttt

SEQ ID NO: 296240 - DNA, 2779 bp, Cannabis indica
atagtaaagataaagagtactatgaatggagagaagtagtacttttttatgttattccatattagaagtgaattgaaagaatggacaaaaatttaattaatattatcatttctaacatagttatatctttttgttgtagtggttgagaaattgaaatttgtatctttgaagagaggatctctctatttcttctctccattcctctcaaaggatttcacttcagttagttgttatatcatatgcaagtttaacttattagatcaattaattctttaaaaaacataacaaaatgtaaaatcacagtgtgtcaatttacaaacacctatccacaaattacaaaagtaaatttacatctattaataaagctgaaagagtatatgcccactcttgagttcttacttaaaaaattggtttcaagaccccttgaaacactcgagtcaaatcccttgaatttaccacaagatccccttgtgtaaactcactgatatcccttcagcactttaatctgaactccctttatatagtactaaacaatcccttgttcttctgccatggagctccaagaacaattccagtccaacaatgaagttcctgcaaaaacaattagaggaaataggagagaaagaaacttatatctctaaatctatataaaaaggttaagttgttaaagatcaaaaattgactttatataagtgacttaacctgtaaaaccgaccctaacagaatattaacacagtaataaactaattaattctggcagatggtataactaatatacctatatgctactgattgttacaacttctcctttatatctctccctacacctctctttattcatccttttctcccctctactaattaacagtgttagagatttactccatttataagtaaaattataagtttgagtattccatgtttcaaggacgagaattagacaaaaataatatagctcaagaaggtagaataacatagcaaagtgcaattacaagtttgaaaaaagggagtaacagttgtcaaattataagctaaatctgatactaaactaataagatatcatattctcaaatacatggaggcaccgctgagattgttaaataatatacaaatgaaatgattagattgttcaaatgaagagtttctaaaattaaaataaaaatggaacgctgcagttgttgaagccaacaccgaagtaaatgaatagtatccatctcctctctatgatctcttgatgaggtagccaattaacacacccaatagaccaacaaggccagcaaataacaaagaaaatccacccactacacccttgttcaagcctttcctagccagttcctgttcaatgagaatgaaaatatgtaacattatggcaagattgtgcagagaataaatcattatactgagctgagctgatgcagatttagcaatagaagcagtgcatgaagaggagcaacagatatcaaaatggggctgctcgattgggaaaacagtaaatattgatgaatgtacatatataaaatatcgacacgaggatgtagaaaatagtattccgaatgcattaatataacaaataccagttcttgatggagccgctgattctcttgcaaagcagaagctttctcctcagtcaacctagagatcatcaaccatgcctggaaaaggaataataataaatatatacataaaaaacccagagcaggaggaagttatttttgggggtctacgatagcaagaatgcacagacgcaagttcaaataaaaaaaaaaaaaaaatacaaacataaagtgacatacgagaaagagagaggaaaaaaaaagggtaaaccttgctttaagtattaatccagaagtaaaaataacaagattcaacattatcaaaagtttatgataaacgtccctagtattctactttgaataaaggtcctaaagagttcactacatgtataaaccctgtatcattgtaacaataaaaggaagagccttgttaaaaacaaccgtaaaccagcatgtgattaaaagaacaatctgcctagaaacatcagctccagaaggagcaaactttcaacctggtcaaacatgcacacaaattccacctctcatggatagtgttatattctcatggagtcatggttggtaacaaggcaaaacactatattaacactatatgacaaaggtgctcaattggaactttaaacgttatactatcgttattccaacaatcactattacaaagttctggtagaattatcatatatttacctctgatgatttctgtttgggcaactcaagagatttcgatacctgtactccacaaaatttcagtcaagacttatacaagcagatctacccaaacttccaaaaaaaaatcatgctaatcgaaaaagatcataataagattcaaaagtgaaataaatagaaggtacaaacggcatcaaacgatgatgatctttgcctcccattctgtgttgcaagagcactgggaggagactcttcatctgattcttcaggaacaggagacggaggatttgcaggaatgtaaaccacgcgcaacttgaactcctccacaactttcccattctccttgttaaactacaataaataaatcagaaactaaggtacaattattgaaaagatagaatcaacatagaagagctgaacaaaagcagaaactccatctcaccagttccgaagttatgtccttcgctgttgcagcttctggtgcatatacactttgaaggagaaatttgtccttacactgcatatctagaggagcctctttt

SEQ ID NO: 296241 - DNA, 9051 bp, Cannabis indica
ctctctctctctctctctctctctctctctctctctctctctctctctctctctctctgttgtttttttagcttttcttttaactctcttcctagtgttctctgttttgcttctacaaacgtaaggactaagcaaaagtttggttttttctgtaaaaaaaaatgtctatgatttcacactaacccctttgaatagaaaacgtgcataagagaaaccaagagggaggaaagactataagtgatcgagtgtgtgtattttaagtttaggtttttaattttggtcaagagaaagaagagaaaaaaaaaaaaaaagaaaaaaaaaaaaaaggaatccgatgagtagtaatgccaaaaaacaaatcaaacaaatttggtttagagtttagacaagtcttttgagtgttcctatatgtatatatgtttatatatatgtgactgtatgcaataaagaatatgaatatcagaatgtgcaaaataaatattccccaaccccaaaaaagaatgaaagaatttgagttaaaacctataaaaataagatcatcggattccaaaaccttcaaaacaaactcattggaggaggaaaataatgttagttttcttcacaagggagctaacacaatgaacataaatgtagaaacatacatgctcaaaacgaaggaggctcagcaatgaaagacccagatcagcatttgaaatatccatcaactccaccatggctgaaaaattcaaccagaataaaaaatcccagctctgaaaaaccccttcaaacgttcatggagaaagaaaaaagccaatgaaagccacaaacaatgataataaataaaaaccctctcagcactcaatacccaaagaaaccataaaccataaaaagcccgtatttttatatagtattcttcttgcactactatttcccactactactactactactacttacttacatggccgtcttcatcatcactttctctcactttctctttctctttcttcccctttcttggttcagtgagactgatttgatttacaaagacattgaaaaatgatggccgagtgaaaaggatgttgaagaagaaaagaagggatgtgtagtagtgttgtggccacgagattctgatcaaacggtggagactaaagcctgatcccacatgaccgttggagggtgtcgggaaaatatgaccgttggaatgaaatatatacatggattaagaaggaaagaacagtacggactgggaagaggggtgtaattgcaaataaataaaataaaattggcataattatatatctgatagcaacagcccacacgtgcctgtttcctcattgcccaacctataatacttttcgtttacacacttgaccgttacatcatcttcattcattattgttcacttttttttcttttttttttaatataatttttgtgttaaaaagtgtaacttccttaacttctttgagaaaatatataaatataatgtggacacgtggcgcaatatgagccgccaatgtaagagacaaagaagaaaaggtttaattatattgggtccccaaatataatttctcacttagtagagatgttaattaaggcacaaaattacataataacagatgggattgtgtgagattaccttttcttcctttcccatctatgctttttggtaatatatttttaatatttgattaaaaagtacatttttgtcaaaattatgcggcgaagaaaacaagttttaatatttttttttgcaagttttaatatttttttttgcaagttttaattttgacaaataccaaaatggttttttttttttgttaaagagtggcaattccttcacttgttagttatttgtttcaaaattatccaacattctaaacaggataaaaaattaataatgggaaaattaagtgggatccacaaattcttttcctctagaaattaagaaagataaagagaaaacaaatgaaataagagggaattgtatatttattaaaaaaaaaaaaaggaaatgtatattaataatttaggagtaatattactatcaaaattagcttgacatgtaaagtattgtactatttatttaaagagaacaatatcaatgggtggtagagttagggtgaattcgaaaggagaaaagtgaaaattgaaaaggtgaccaaagaaaaggaggtagtttcctggtgataagggtaacggtaattaagaaagaataagtattttctttttttgaagggagaaagaagaagtatatgataaatagtaataatacattgaaaaacgtaacggttgaatatataaacaaattgaaaaagagtgaatgagaattggattctataacacatatattttgctgccaaagctgagacaatgatagtagccctattggatgctttttgctactctcaaaattatgacacatacactcattctactttacctttcccatttgcaaatcttggtaaacactattttatatagtgtattttgtaaaagttattaattaaactttttattttattaaataacaaaatagattttttattttgttaaataacaaaatagactatgtattttctataactgtacaaataggatcttgaattaattttttgtcaaaataaaacttaataataatctaatctaaagatgttatgataaaattgattacattttctatatctgttgatgttaaaaaattattttaaaattaattatattaaaaaataaaattattaaaattatactcagaatcttatttttattattttaaaaaatataagatctattatatcatttaacaaaataaataatctaattgataacttttacaaaaacatataattcaaaataatatttacccttaaataaataataatagttttgaaaaattcaggttttataattaaactctaaattttgctctttgcaaaaaaaaataaaaataaaaaagtaagaatgtttaaacttcaaaaaaaaaaaaagtttaaaaaataaaaaaacttttcaaaaaaaaaaaacacctgtattagcattctaaaaaatttgagtccatttttatataatgacgtagattgcaattatttaaaatcacaaaaaaattataaatattttatagcaattaaaataaaattcaaataattattaccgcaactatatacaccataaattattaagaatattttaaaaattcacagataattataataaaacaacaatcataaaaaattgaccaaacatcttaatgtcaaaagagataagatatgtatcaaaacccctctttaggtaaattcatcctaaatttcgtcatgaaatcttcaatatcaaatttatggataaaagacgggtcaagcaaaggaaagaaaaagctgccaaatgtaatttccaggcaattctacccaaaatcacgtatcaattcaatggccgttatgctaaacggtactaaaaagacaaaaggcagcagcacaataaggactaagctttctttatgcctttcccaacagtaattgatgaaatatttcacctctttcttgaataaccattaaaatatgtacagaaacatctccatgacccccaggacaacacaaaagagtaccctattgttaatgttctctccctttgttggttcaatcctgctctgcttatctctctcccactcccacaaaacaccatgtatttctcaaccaaacataaagaattcatgtggccactatagctttaattaataaaaaatgttcagcaaagtatataaatttatctctgcaactactattggagtcatctcctatattaactccaaatataaggcttcttgtttgctggtaaggccaagttcattcagtgtcaaagcactctcaccatcttcgaaagcacgcctaggatacggccttacctgctcacacacacacagtattagctcatcttcatggtttctttaagatttacattcaagtagttggcaaaaatttattcagtgggtgataaatatagtaaaggcattgctcaccaatctgtaagagccaggcttgatcactctaccaatatctatgaaatcaaagagagactgcaaggaaaatccaataagattataaattttggcgaagaggatgtggaaaagagatatacaaaacttttgccttcgacaaatatttacctgaagcttgttggtcttgagaaatcgacggccacgacggctgccatctggcatgcgcaccaaaaggttcacagcattttcatcatctgatgatggttcctgtggcaatgtagcttccttggctgccaacagtctctctaattcctgcacaaaagaatcacagataagctatcagtaaacaaaacaactaaatctcacccagaaaagaagttctccttccatttggagggaataatgaaacctttagttcagtcattataattatcataaaagtcaagagcagcttttatgtacagacaagcaggaaattggacaatgcttgaaacatcttgagaaatataagtgtaattatatcaagaagtctgtagttaaatagttaaattgattttctgttatctaacaactgataatagtatcatcataagaaaaagatgcatcaattaagaatacctgctcctcctctaatttcctgcgagattcttcctctcttcgtttttcttcttcttcacgggctttggcctcttccttagctttttgttccttttctctgtctgcttgcagtgatgcaagatactcatcatcctgaaagcggtataaaaccagtagaaaaaaaaattagaaacactattttcagaacaatgcattcaacaaatttctccagacatcagacctgctgttcacgtatcaagcgctgcgcagtcagcgagggtgaagggggccgaggaaaaggtcggggataaggaccatcaggttgaatgaactgatgaggtgcagcatacggaaagcgataattagttccttcaggaatcccaccaaacattgcagcctcaagcattacagcctcatcatgttccaaggacgacatacctccccacttcattttggtaaagaacaaggataaaaaatgtgactaaattaccaacacaattgatcaaactataacctgaaatactaatgtcatacagaacaaagtagcatacatcgtcagattgaaaggcctcgccattgtgttgaggactagtactcctaatgggttgtctaggactcaatggtggagtagcttcagcaactccaacttcttgggcagattccacagaacctgaagacatccgcctggatctatgccttacaagaggttgctcttccaaatcttcagtttcatctggaatgaatgagcttcctccctccaacctatagattcacacgacacattgttattagaccatttgtctccaacattaatgaacacaagcacaaagaccaagacacaaagaaggcatcataacgaaaatgtaagatcattctgacactaatgtaacaatacatgactgtaccttccatttgttgctgctatatcacccaactccaccacctcttcagttttggaaactccagatgatgctcccacattcctttccagctcacgcaatgctttctcttgttctgcagtctggattccattcacattaaaataagaccgacaatatttatcacataagaaaactgaaacattaaatagaacagacctttaatgacaaagaaactgcacgcgcaagttcagtgtcatctaactgaggttgtctttgctgaagttctggacggtttacctcctgcattaagatgacaacatcatcatacattaatagctaaagcataaatttcaatatcagccaacataaacgagattcatcagctaatgtgaatgtgaagatgatttagaacataccctttcagccccaaatggctcatttggaaagctttcatcaacctcccgtctagaagcttcaatggcagcacggatcatttgttcttcaatgtcattactagtatcttgcaagtcaccaaactgaggaactgggggtccaataaaccgatcactagctccatcatttgacatgtcatcaatttgctccctccgttgcgcagctgctaacccagcgggaatctcatcttcatcatcaacaatcacagtcccatgagtttcaggaattggtgagtccactgtttcagtgacctcttcaataataggagcattgcctgaccgaccagatggttgattgtcatccctgacttctatggggatccgtctcacctctcttggatgagtaacaagaggttgaggatttgtgaagtcactatcaaatacgcttcttccaaaggctggaccaagaagagaaaaaggattcaaactcggatttgttggttgacgtgacagaggaggccactgttcgacttgaactggttcatcaatatccattaaatcattctggacagcaactggcagttcattgacactggatgtgataataaaatttcagaaagaaatacaaaatcaagaaaatgaacaagaaatattatgtcaaagcacctaattcaaaagaaaaaagaaaaaagaaaagaaagttacagtaaataacatacttggctgaagcgcccctgtctccttcactaaaatgagcattcacagcttcattgagatccccaccatgctcctaaattgaaaataaaataacacacaaatttatacttggttgtagataagtcttagttatcaactaaaccatagaaaatcaaagatctcatccacacaaataattgaatagcgatgaggtagccacagtagaagcaaatgtaagaccagctaaccaaacagttcacatagtacacatatttaaatttttgtagatttcttcccggtgagattgactacacggatacagcaaattcatcatttaaagatcattacttcagttcttacctccctcattattttaattcgagcaattgctctataactcacacaagcaaacaataaaatcacccagatttcaactcattacccttcaatgtataagtaattacactgttgtctaattgcttaaaactagaattatttacaacatcaaatggatcaggaacagagatagcctgccaatgtatctacaagccgaacataaaatgcatctcctcaagtaagataccataatttccaatgactgggaacataaactcatgcccaactatttagcttcccccattcacttaatatcataatgctttcgttcatttacacaagtaaatcctcatcttgctagctataattggcagccaaattctaataccccaaataaagatttgaaaacctaaacaaaaactcatcactctaataagcttgcaaatacagcttagttaatcaaccgaaatataattatttgcaatcaactattataaaaacatcacagtcaaatttcgataaaccaattcaaacaatcaccaattaaccgataagacatcaaatttccgaactcaaatgcatttagcaatgcagcagaaaccctaatcaagagacaaaggaaacattgaccaattgcaatatcgcaccgcatagaatcaaaattcaatcagacttttttcatcagaaccctcaaaatccatctgggaaccaaatattagaaagagaataaagagaaaaaaaaatacctcgagcttttgcactgcgatggcttcggatgcgccagtaatactgatgaaagtatcaattgcttcctgatttggcctcgccattgaaatcaaactaattcagagcttaaactctcacctcttcttcctccttattttctttttccttttgttttcttgtgagtaataacaactttccaaaacttagaacagatatttattttttgcgacagtgaatatatatacaaaaaaattgtgtatatatatatttgtgtataactgggtgttctgataaaggaaagaagctccgggggtaaaacagtgaaaccgctctgatctttctccaatcttctacgcctctatggagagtaaagtatatcaagattcaatttttattggttatctaaaaaaattcaatttttatttttattttggtttaaagcttttaaattcttaacttgttgaaatttttttcttttaaaaaattcttaacttgttgtttaagtacatcaaaaacatagggataaatttttggaatttctttcttttgagataaaagttagaatttaaataatacacatctggataatttgtcttggaaaataagttgggtcatttccttttctttcaaaatcaattgggtcaattgatattttacataatttcaatattttaatatgtaatttgatattgtttatctaattcagtatgttttcttaatataatttgatattatttatctaataagtatggatatttggatgttgcaaccatacctacggaatttttctataatgactttttttttgaaacagattctataatgttttctttttttttttgaaatccaaacaaacagttacacagaattaggcatgtcacgctcgatagcaaaacttacacaaggggaattaaccccaatccacatagtactagctttgttcaacaaaacataattgactaaaccatgagcgacactattcgcttctctatatacaaagaaaacacccataacaacatcatttaacattaaatctctaatacaatctagtattccatcaatatctctacacccatcctcctttctttggattaattggatggcatgaagacaatccgattcaacactaaattgccggtatttcctttgtattcccagccgaagcccttccttaatggctaccaattcagcatgtaacggcgataccagctgctgcaaagaagtagcagtagcaacctgaacagctcccacatagtcacggcacacacaccccatactcgattctataatgactttgaagtctaaatttttatatataagcacgtcatcttttcataaaaaaaatgtgcttataaaacaaactaaaatttaacaggaatatttacaaaaaattatcttaatatttaaagattatttcacaaatacctaaaaatataaaaaaaaaattacaaaa

SEQ ID NO: 296242 - DNA, 2074 bp, Cannabis indica
tccaaaatccaatacttttataaaaattcctataaaaaataagatttttatttctcaatattaaaaacaaaaggctattagtaaatattggatatttactaattagactattagtaaacattgtgtgtattgtgtgcaactttctttctctttaatttcacctttatgtgtggccatgcatgtaatcattataattattcttcttctttacaaaaaggtaaaagggatggacaaataaatgagaatgatgatcaagatcaacaaaatattccttgaaactgatagtgttgttgtgagtcaaatgagtttgtaattataataatattagaaatttgtaatggaatgggcatgcaattcaagatgagcagcccagcgaggaaactacaacaagaataatgtataagacttaatttagttggaattggacccccaaccttctttttttctttttttgtgtatacagtcaaagtcaatctctatagagtgagtagtgacaaattttccctccttctatgttatgatgttatgttaccaaaactgatagagttattattttcatagtcataatcataatcaattttatttgttgataaaatacatggctcattcagatcagatatgcatatgactggaagaaggaataagaatgagataaagagatgccaaactatgattgttcattaataccaaaataaatacttaggttgggttgggttgggttgggttgggaatggaacaagtggacagcaacaaatcattaatcaaccaaacatattccttgatttgttcccaagaaaaacaaggctctatacctgtcctttgtatcttttcttgttaatttgttattgggcctcaactcaactccatcatcaaccaatgtagtccagtcagtccaggcctgtttctttgtttatttgacctcatctctcatctctcacctcaaggctaactaagcattcatacattaacattatgattaggattaatgagccaaccaccactgctctactagtagtatagtactagtctacaactcactattctcatttgaaattgcagtgcctgcatgccatgtgtgtaatatcatctacatgtacctccaagtgacaattgatggtccccattttgtccatttcttgagaatgccgtgggttgcaggcaattccccctgtttttgttctttgctattccaagaattcaatacatacatatacatatatatatatacacacacactctctatgcactcaattgcttcctcatcaggacacttacttatatatatacataatttcaggctaaaataaatatgcttgtcatgacttgtgtggtttgtattcaccctattcgtctaggtgggtcacatttgctgttttaaaaattaataaataaagaaaaaacataaatgagttgatttacaagtctttgtcttttttctccttttgctgtcattctaatctcttctctctcttatctctatggataaagaaatatatatagaagcatctacatgtttctgaattttctcagagtataacatcattgcatgtgtgatctgataactgaaaatgaatattcatacccaataatccaattaatcacactcttatcttaccctttctttcccttattatctgctttacaactactttctagtttctactgttctgttctgcttatccacatgccacacacaatatcaccaaatctcttgtttcctcattttgatttgttatatgaaatctcatcataagtgttataaatgaagttagttagagttagaggtggaaaaaataatacatgatcagtaattaattacgtatgtaccaacaacaaccataaccgtatcatacaataatatatacattacttacttggcacttggcagaggtctatctttttgtccttcacaataatcaatgccatcctcttctaacctcattatcattaaataaaatgtaagcaaaagaaaagaaaaaagaatatcaaaaagacatgtaaagtgaaaaaggtatatttatatatatgaaaattataagagagagagagagagagagagagagagaggtagggt

SEQ ID NO: 296243 - DNA, 3005 bp, Cannabis indica
tgtatgtatctatctattctttcaaaaggaagacttagcctagccacaagtgtcgaatcttatgccattgcacatcctgtttcggcgaaacttgctgataaatatacccacgaagcaccattgccaaaaggatagcaattccaagtaccattagcaaccagaaatttgatgattgaaaaagaggaagaacctgcacgtaatttggcataatagtcaacaagccggggtgagtttcgtataattccatcaaattctacttggattccacaaaattgagagttagcttctcacaaaatagtttcattcataccatatgacactgcaacggcattttgtgcagcaaaagaaataacttgttcataaacggctttggaggaaggtttttgtcagcacgctcaagcgcagcgtgtaacatgtcaagtatcaccacatcagtttctggatcaggtgtacctgtgttgacacatggtgatcggctacaacttacaaatctattatggaatttcaatatagttaacaaaaaccataatgaacagcaggaagtgatgatcaataaatagaggaacacctcacctgggatatcaaatatctgtgttgtaggtgaaatactcagtagctttcccaaatacaaccggacataaacacggtcaaaggtttcaagcagctcaccatgagtaacaacaacaagtggtttgtcatctgtaagaaagaatggaaattgaaacatcaatttgattcaggcattggaggaatagaatccaatcagattagtattaaataattgcccacaagccaaaccagataaatctctaatgaaagggaatacatgaaagtcctttgtggtgtaataacaaccataataagagtaaaactcaatcttaatacctcggaatgacacaaatggacaattgaatgcagatgcgatctgctcgacgtattgtttatcttcatctttggcatgtattgatttcaaaaccgaatatccattaacaacaaatacaacaaaattgaccttgttcctctcattggacatgcagcctttcttgtaagctttaaacttcattctagtcctcaaacttagactatctgagtccctgttaagaaactttcaaaatcgaaaatccaaaactcgaagttgaaaaagaaaataagaactatatggactaaaaattgaccttataacaagctccccatgacaaacacccttagtcatccaatgctctaacattttaaagttttcatgtgaatcattagataaactacgagtgtcatataaacaaaatgatgatgaacctcttggaatcatatacttatgaaggaagagagttccatctccaacatttggttcttcaacagaatcattatctggtaatcccaaaatttcaaaaagtaaagtaatggggtcataataaaaacagaaaatgtatcattaaatgaagctaatgattataacattcatacatacatgatacttgggctctttctggtgcaaacttgtcaacctcaaaaacccttgaaattctattgataagactactttttccagaccttttaggaccaactaatatgagagatgtagtttgaggcacatcatagtcacttaatttcatgctatcaaccttttcaatccatgatccaggcatataactgttaagtttaattaaaaatattatcaaaaaaattaagtgcttaaattagaaacaattattaaaaagatcattaatttaatacctcaagatttttttctttgattttttcaatcccttagtacgattccccaattcttcatagctctttgatatttcattaccaatattttctctcatcataagattggcatgaaaatccaaaaaagataaatcttcatcataacagaatttgtcatcaaactcataatacacgttatctccttcttcatgctcttcatccgattcacttgtcccaaccttcatgatcaaaatacccctaactcattcaaaacaaaacccatgttaaaatttcacaaacccctcactatatcaaactggaactccaaaaaagtacataaataaatgaaaaaggtgacagcttgaacaaaacaaaacaaaaaaaaaaaatcaaattgtggtagtacagtaacagggtttagggttttcgataacttgcctttaggggtgatcactcctctactgctgagaaagagagaacaaccgatgatgatacctggagaacatgtaattttcggaatcaattgtacaagcttgtttacctccaacctataattactgccaaatctatccttttgaattatttttagagcacaatatcttagtcaatatttaaaatatacatgtcttttttttatttaagtttgaagtttttctaacttggtagatttgaatatgagaagttatgttttcagtattataaattattcgtaaatttttaaaaatttacttagtattacaactataacgaatactaaacgaatactgaatactgctatgagaaaaaaaatttaaaatatattatatccgatatgattttgggtatagaagttgactaagtttttataatagttggttataattagtactcttttttttatctgattaattttttttgtcaaataatttaaaaattaagcggcttattattgattacaatatttagttttgtataagaatgtaataaaataaaattgatatcgatgaaaatcatctattatttttattttataattataaaatattttaaaaaaataacatagacctttgatttttttttattatatttttattaaaatattatttttccttgagttcaagtgtaatataaattttagtacgtaaacattattacaatattcagtgtaataatcattatattttaatggaatataaaaattgcaaaaaaaataaacaatgtaataaatttattcattattactatttgttgctataattttaaacactacgcaagtatacgcaatcaagtagtaaatctcacacaggtgaggtcgatcc

SEQ ID NO: 296244 - DNA, 3239 bp, Cannabis indica
ttagagcacagaagcaacaaccgatgacatggtataaggcattagtttttaatgcaccgaaaggagatgatccgtttggcgttggacatgaggagcatgcagaagggtcaaatatggattaatggacagagtattggaagatattggactataaatgctaatggaaattgtaatgaatgcagttatgccggtacataccggcctccaaagtgtcaggttggttgtaaccaaccaactcaaaaatggtattttcttagaaaacatgattatagcacatacatttttcatgtaattttgaaggtatatctttcttatatgttaactcaggtaccatgttcctcgatcttggttgaagccgtctaaaaatctggtgattatcttcgaggaaattggtggggatgtatcgaaaatagctcttgtgaaaagatcagtgacaactatttgtgccaaggtttctgataaatggcacaccaaaagcaatggtgatcaagatgagctattcgagcctaatatcaacctacattgtaatgctggatattccatttccgccattagttttgcaagctttggtactccaactggaagctgtggaagcttccagaatggagcctgtcatgccccaaactctcttgatgtcttacaaaaggtaattcagaaactatctttgtcttaaaattctactaatcatggattttcacattccttaaatcatatgcaatttggatcctaatgtcttgtttgttgtattttgttttcagaaatgcattggtcagcagacatgttcggtgactgcatcgagctccaacttcggtgcagatccttgtccaaatacaccaaagagattatcagttgaagctgtatgttctcctaatgaaatcaattcatgagagtatgaagaagccaagagagttaattccaaaaagttggaattaacaacatatcaaggcattagataaaatgtgtaagctaagggtttgatttgctttacttaatggttccaacactttcttgttacccaagaaagattacattaccaaaaaaaaaaatgaagaaaaaaaagggtaaatgaaaattgaatgtggaaaaattcccatgttgaactcattgagaagaatcacaatgcaaattgcagcctatttgagctttcatgatgttgttatatgcctctctcataatcaagattgaatctttttgagaaaagaagaatgcccttatgagtacaatttattatgacattcaaaatatttgtgtccattactttttttttttaaccttaagaggaatagaattaggtgtaggaccaaacaagagtaccccaacccttttgaaattgaccttgttgaatgtggattttcgtttgtaaaatctccatctaatacactaattgagaagtctatatagaggttcactaaaaatatttaaaataccaaatatcaaatgtaacaacaataacaataaataatatttgctttaggattcttttcaaactttctctctatagcgcaaattctcatgtttcatcgaatttttccaattcgaatctcgccattgatgacattcaaagtttcttcaaaaattgcagtggaaaaaatcttgattatgtgttcttgatcgattactaagctttgatttgtggtgtttcagaatgaaagtaaagctatagatcacatcgatttattagacttgaaccaatatatatctcggtgttttctttgtttttctatcctaatcgttttttggtttttttctcactctttacattcctattttcttccaattattgtgtgtgatttgttagtcttgttacgactaattgtttgattgtttaaaattttgataatttgattctacacctttagttgtaattgttttacataaattatttttaaataaaatattctgaaatagaagttctactataaaaaaaattaaaaataatttttgcatgataattattttttttaaataacctaacaccttcaatcacatcacaaagaatagtactttttttgtgcttgacttttaactttattttagtgattttttgtgatcagattccaaataatttctaaaatataaagtttctaaaaaaatatagtacatttgaatttattttagtttgtttccattaaattattaagaattacattaaaatctacttttggatctaaataataattcaaggtaacttgtgtgtttagccatgaatcatggacacaaaaattaccattgcagtgtctatatgataaaaaataaaataaaatacttatttaaggaaatttaatcgaataaaataaattaaaaattaattgattcttgactaaaagtcaaataatttgccatcaacaataaataaaatttatattcaaaaagaaaatttatacttttgtccccctattctaccaattcttccacactttgtattctattataggtttaactttattcctcaacatgtgaagatgggtaagcaataagagcaaaattttccattgaaatctcattcattttcttggaaaccaaacaaaaagggaccttttgttgacttaattgaggagatatagtgaaccctctttggctagtaattttccttcaattagcaaatgccctttatttagattattccaaatccaacggctgtgattcaatcttcagtgccaaaaaaagagcttaaagtcaacaggccaaccccacttgatactctttcttagtataaaatttcattaaagtcacaaaaataaatgaaaggcatatattgtatctacacaaatatgtataaatgtatatacttaactttggggaaagtatccaatgtgttgttgtgtattcacatgcaatagttccaaccaaccattgatttttaattatagacacttaaattatacaattttttttttcaatctttaatacaacaatatctttaatgtaattatagataattttaagtaaaaatcgtgttaatttttttttttttttaattcacatagtttagttttactagtacatcatgttactttctttattacatttgttttgagtaaatttacactgcaacatttaaagagttattttaataaattttcaaaaaaatttagttcaatttttttttatatgcacatatacattataattatttaaaattacttataaatttttaatacggtaaattattcgatttttttaaaaaatttataagtagtattaaataactacaacatatgcgatcatgaaaaaaaaaa

SEQ ID NO: 296245 - DNA, 950 bp, Cannabis indica
catgaattcttcagagcaggccggcaagtcgagcgaggcagaatggacgggccctacttagtcatgagtgattctaatcacaaaaaaaaaatatatagtaaattattatatttaaagcataagttgtattgttttaattattaagacacttgagtttgtggtctcaccttctcaacaagagattcctgctcaaagaagacgttcaaagaaaactcctcaagtgaacctaaacgttgtcatggatgatgtaaaccctctctctccgaagcacgcccaactgagcaatgcaagaagaggggatacatctgaagccgacagtagaggggatgatctagactagcgtcgtaagcaagttgacggggaagaccttgacgctaaagacaaggagggagatcgatgacgacgatgaatacatagacgagaattataatgatgggtattactatgaacaagatctagatctagttcgagtgtctaatgagctacatgtgatccaggaaaagctagcctgctaggagaatttttctaaaaagatggagaggatgatgactcgccttcaagaaaagttcggagatttataggaggattttgaagaagatgcctcagtggaagttgttaacagagaaaaccttaccaatactgaaaccccagctcttacaaaggacaaggggaagggaaaggtaggtgatcctcaaaactcgatagctccttacctcatagaaaaaatatgaatccagccaactagcccttgtggacacagaaggccactgatgcctccaggcttggatgctcttctgctccacagggccaagttgtgcaaaaagggctttgtgtgaaagtactcaggcctagggggaggaataactacgccaacgattttgttaaccatgttagtgggaccggggaacaatactatgatgatagttggtccaccgtggacctccgaaggc

SEQ ID NO: 296246 - DNA, 6513 bp, Cannabis indica
gtattagaattctgccattaaacattgtttccttgtgcgccaaatttcatagataagggctgcaatgacaacaacaaaaattgatttcttcactttacttaattttgccctccttatccacattacaattctttctaatttagtggcagccattctccaattcagctttgatttcaccttctccaaacattccaaggagaaagaacactctaaaaataagtgagtcgcagtctcatcttccatgttgcatagaaagcatttagaactctcaagttctctatactacagcttgtcttttattttctaggttatttaataaaataaaaggattaatcttagaaaaaatgactattttaccctccaataaacacttaaactagtttatagtctaggggtactttggttaatacaaactatcctaattagtttgacactataagaatactaatacaatctggtacaactccaataaaactcattatattatcgtcgtgatatctttggccaatccatcgagttttcaaagtcgctgaactcgaaaatattttattttaaaaatggtatatataatacccacgtgtgatccaataaaatctccgtaattaataaattacgctcaattatttatttacttaaaaatcactaattatctcataattagcttaagtaagattataatcttactctaatattcatataatttcatatttaataaattatatccaattaaacatagttattatttttgggatattacaactattccctctttacaaaaattttatccttgaaatttacctgagcatctcgagatactgctcccgcatctgccactctaactcccaagttgcttcctcattcttgttgtttctccacaacactttaactagcagaatacttgttccgcaacactttctcctttctatccaagatctgaacaagttgttcttcatatgataagtctgtctgaagcttaatgtcctcataactcagaatatgggtcgagtcagacacatattttcaaagcattgaaatatgaaacacgttttgaactccagataaagcaagggataaagctagccgataggctacttgacctactctttccaatattttgaagggaccaataaatctaggacttagttttcctttttatctaaatttccaaatccccttcattggtgacactccaaggaaaccaataagtccctaacctggaactcaatatccatacgctttggatcagtgtagttattctgtctactctgtgaggcaagcacataagcttgaatcttctcaatggcctcactagttctttgcactgctttgggtccaagatatcttcattcgctggcttcatctcaatgaataggtgaacgatactttctcccatataaaatttcatacggtgccataccgatagtactcttgttatatgaaaactcgatgaaaggaaggtacttgttttaggaaccttccaagtccaatacacatgcatgtagcatatcctcaagtattttgaatagtcctttaagactgaccatcatcctgagaatgaaaagatgtactaaactttaatttagtacccatagcttgctgtaaattctcccaaaacttggatgtaaactttagatctcgatcgaagatgatcaattttggagcaccatgaagctgaattatctccttaacatatagatcaacgtacttatctactgtatacatagttcgcactggtaaaaagtgcgctgactttctatatcgatctactattacccagttagaatcatagaatcctgttgtccttagttacccaaccacaaagtccatggttatatcctcccattttcactcaggaatctttagaggttgaaataatctcgctggtctctgatgttctactttaacttgttgacaagttatatattttgacacgtattccactatatcaccctttataccttgccactagtacagtgctttcacatcttgatacattttagttgttcttgggtgtaatgaatattgtgtagtatgagactcatctagaatctcttgtttgataccattgtcgattagaacagaaatcctatttttatgccacaataacccatctaatgagattgaaaaatcctttgctgatccagcctcaaacttttgtttgtactcttttaacactggatcagtttgttgggttgtcttgattctctctagcaaatcagactgtaacttaatgttggctaatttcccaattacaaactcgattcttgctttagtcatatcctcagccaattctagtgagatcttcttcagttcataaacttgccccagacctttttcgacttagagcattttctaccacatttgctttcccaagatggtaaagcatctcccagtcatatttcttaaccaattccaccaatcattgttgcctcatatttaagtccttcgaagtaaaaacgtatttgaggcttttgtgaggcaaaatatatttatattcgtcggcataaacccctttcttaatcgttcattgtcatcaacttttttgatggggtacctcaccagaaaaagttcatccgcgattctagttagcttttgttggcacaaaatcccgttgacaaaactcaattttcatgactggatgagaccgagagctagaagcaaattctcgatgaggaccacatgacatggagttatttcttgggatataatatgtgtgtgatggccgaaagaggaatagttgagggaaaagcggcgataacggtggattctggaggccatagaagacagtgacagacgagatccttataaaaagaagattgactactaaggaagtgaaagagaacaagagagacaagagaaactataaaatatagtattttaaaatttttttataaaacaaaatatggtaaattaacccataataatgaaaagattgttaaaagtcgataacttaacaaattaaaaataggataatatgcatcaagatcattttcatatcttatttttaataatgacattgaatatctaaatcacaatatttattgtttataacttctgtgtattaattttttcttttttattataactattattattattattattaagaaagaagaattttattaatcacaagcacaatacaaaccaaagtcaaaataggccaaaccaaaacttacaaagagcaaattgtcatcaagaaattcctatcactttttttcatctttatttgtaaaatactataaattctataacaaatctcgtttttaacttatctataatatggttcacactatgagtaaaattctcaaaaatacaagtgtttctattggtccaaacatggtagaccactgctgctaaaatagcagcagcaacctcatttttcactccttttttttcaaaccttcaaaccacctgatccagggtttaaacaactgaggccaactgctcttgcaccacatgtggactctctgtaaaacatgctgagaatatgatcagcaaaaaaagagcttcatgtgatcttctgttgaatcacagaccggacacaaaaagctattaagttgtatgttgatcctttgaaactgatctcgagtgagaagcttagcattaacaacctaccataagataaaatgatgttttggcactaattctattccaaacaaagtatgataattcactttctcaagtttaataaagcttttgtacaacttagatgcattaaactttccaaggtagcttgcatcaataatcttttgttgagaaaaaattcttctaatatggcacaacttacaccaataccaactagcatcagctttaagttgatacccccaaaaatcttggccctttaagtaaatattatgaatccatttaacccaaagcaattcttgatgtatggtaatttcctaaacatacttggcaatcataactttatttcacttagctcccttgaaaaaatccaacccaccataggctttaggtaagcgaacatcatcctaagaagtcatgtgaaatttactcttcaagccattatttccccacaagaaccacttgaacaacttatctatctctttcacaatacttctagaataagaaaatactcatccaaaagtttctcaatcctaaaagaatggaattaataatttgagatctacctgcatatgaaagatggagactagcctatgtgtgcagcctcatcttaatcttcttgatgattataccacagtcctctgtcttccatttagtaggtctcaagggaactccaaagtattttaggggaaattaaccctctttaatttgaagggtttgaattaacttctctctatcataattagttacccctccaaaaagcacttgacacttgctttgattagcctcgagccttgtactgctacaaaactcatcaaaaataaccttcacacacttaacagactcaacattagctttgcaaaaaattatgagatcatctgcgaagcacgaattgataatcttgaggcctttgcacattggatgaaatttgaaattactctatctagtaccaacttgaaccaagggagtgaggtattgaataactagaacaaataacaccggagagataggatctccttaccttagccctttttctccgtgaaaacttctctggaatttaccattcatcaatagagagtatgtggttcccttgagacaggtcataatccacttgatgaactgagaggggaaatgaagactagcaagaagcctttcaagaaaattctagtcaaatgtgtcataagctttactcagatcaatcttcaaagcacatctcagggaagtattctttctattgtagttcttaatcaagtcctggaaaatcacaatattgtgagcgagtgacctattctgaataaaggtctctacttttaattaatgaagaaggacaaaacctcaacaagttgactaaaaatcattttggaaatacatttgtagagggtgttacaacaaggtatggggtctaaaatcaacagccccagaaggggtatcaatcttaggcaccaaagccagagtagtttcattcagatcattaggaatcaaaacctatttcaaagaagctcgaaactgcttctgagattttttgccaatgtccttccacatagctttgaagaactccgaactataaccatctgaaccaggacttttggtactcaaaatgctaaaaggatacttcttgacatcctctgaattgaattttctaataagtttcacctgcttatcaaggtcaaggcagggtcgcaatttaatgcaatggatgttaatcggcttcgtgctcatactagcacttcccataaagcttctgaaatgatcaataaaatgcttcattaatttatcatactccttaacaagcttcccctaatcatcaatgtaagacataattatattctcttctctcctttttttaatgcaagcatgaaagtaagcattatttttatcactttttgtaaccaggtgatcttgcttcgttggacaaggaagctcatgttcaacttagcatgatattgaaagttgattccagcttctttttaagcattatgaagagaggtatccctcacagaagcatgagcctttgaaatggcttgttggtactttccttttgcttcatgatagccctgttccacatccccaatctcttctctattgaacaccttaaggacatgtttaagtcttagtaacttccagatgatacaagtcaaaccttttccagtcataggtttgtcccagttactcttgaccacagctttaaaattactatgagttgtccataaattgtaaaacctaaaaggtttccttcccacgttttcttatttctgagttttaatgagacaaaggcaatggtcagaaacaatttcccattgataaacaactatagtgtttggcatagcatcaagccaatcttcatttgtaaaaacatggtcaatttttgaatagaccctatcattcctattttatttattcgtccaagtataatttgaacccacgcttttagaggatcaacctgatttaaagctaaccaagctgtagaatcaacaatttcagcagcagatattgctttacctcccattctgtcatcataataaaatattgtattaaaatctccaagtataagccaaggcttcattggaaacattgtattcgtaagccccatccaaagatcaacacaattctcaactgtattgaatccataaacaaaagtcaagcaaaattcagtttgtaaccccaatatcctgatcacacagtgaacaaattgttggttctcttcaagaatattaaccctaacaaaagatttttgccaaacaattaaaattgtcccttcagtaaaactgttgcaataaaaatcccagtcatgaaacacaaagttcattatatcactaactttgtcctcttcaatttattctctaaaagagcacccatacccactattattattattattattattattattattattattattattattattgtttgttgttgttgttgttg

SEQ ID NO: 296247 - DNA, 5719 bp, Cannabis indica
taattttttaaaaaacagtatttaaagttttcaaaatttgaagaaaataaatacaaaatttaagaatattaaaaattggcatactctcaatattaaaaataataatgttacaaataatatattaatatttatatatatttatattaatctaaaataaatattattaatatttatatatatttataaaattaattctactaataccgtgaaatttagatagttttatatttttgaaatattttattaatccaacaaaaaaccctttaaatagctatatttatataaaaacacatatttaactaaaaaaaatactaatttcataaatatttagaaaaattgatgaagaaaaagaaaatgatccatcttgagtgagtaactacaatacaacagcatcaattacagcttcattttgtcttatacttttgtgaattacttttatttgggtatgaagagatatatagatatagataattaatacactttattagggttggttgacttaacacgaaatgggccacaagagaaaccagagtttctcaatataaaacaagtactgctctgttggggaaatagtattattaacctttggctttaaacaataaccatcctcctaaacctattattgtattgttgttcttatctcatcattttgggagactcagaaatttaaaaaaaaagaatctaagaagaagtctaaacgggtcatgattctaaagtcagaatcattttttttttaccccactaaaccatctccatgtctatacatactgtaacctgaacacatttgcaactttaactgaaccattgtaactttataatcattcaacatcaaccaactacagtgatatcataattcataatggggttaaggtgaaacagtttttcttttatttttaaacaaatataaataaattaaaagagtgacgaaatcagtaaaaaagagagtattgaagagagcataaaaatgatgataatgaatgatggtgatcatcaccatcatcaataacctcaaacgtgtggccatcatcaagcaataaaaatgtctgcaaaattttacaagaaccactttcaagttttcaacaaaaatctcctacatttttatcactctatttaatttcaattacttgtgttttttctttttctttttcttttttaaaattgtgtgtcagaagtgggaagagcagtcttcatgttaagttactatcagtcatacctggcctcttttcttgtttatttgtttgttgatattatctttacttttttcaaattaaaaatatacataaaaatatatctgatatttgaaagggtggttagtaggggagaggaggaaagggttaagtacttcttcttggtatgctgggtcatctggtgttggactagaaaagagagcgtgaatgatgcaaaaagttgtggacgctatacaatctcaccgaatccatcacgtgccaccacagtcgaggttgccccttcactcactcactctctctctctctccaacaaaattaaagaaaaagttaaagggtttaccataactgagacagcagagcatttaccagacaaaatttatttattatctctttttacagctcagtaaatttctgcctctgcattctttcctgaattgttactaaaaagcttagcctacgaccaaaaatcactctccttttagatttggccaatatatttatagaataagtatttttacaagtccatgccaatttggtttttagttcaagtttcttctgcttgaatttagtacactaatattctaaatgtactgttgttgttgttgttgttgtttcacacacaaaatttcagtaccagacaatctaagttcggatctattttacctaagacttaggcccttttgttgaaacttcaaactacaacactttttttcacattcagagatcttattctagattgattcgcattgacagaaaaatgatcatccaataaattcatcatgacacactgcaagtgcaatagaatatgaatctttattctctgagaaaggccaacaatgatacagatgggtccacgataatttttactttcctactgaaaccaatgcaccttaaataaatgcatgaacatgcaaagaagaaatttaaaagaaaaaaaattaaaaggggggtccgcagatagaagtatacaaggttgaacgaataattcccgaataaaatagctctgttcaaatacatacgacaacaataacaggagtttatatctcttttttttattattattagtactaattggtatggcatagctcagccaaagagtaaaatgaatggcaatcgagctctgagcctctctcttatacactctccatggtccctggcctactccaatccgagctgcaatatatttaagctagcataaatcaaatgggggatcaggtcagaaccatataaagcatgtacctgccattatatatatatatatatccatttaagcataatgaggggttgggattctggagcttggtgcttgtcttgatctatcaagaaagctgctgtattgcagaatcttcctccatggtccaaacaaaatcaggcatgtcagtcctcggtccggcgagagatcgataaatgtagagcttctcaacggggcagctctccggcctagtttctggaggtcccctctcatcaataacttcaacgttgagtctgggcatcttctgacctagcagcttacaagctccataactcacattgcaagaagacatccaaagggatcgcattgtctccagcttcgcagcattggccaaaagagctttgtcaccaaaaggacagtctctaatctccagcttccgaaggttttcacacccggacaatacatgatgtagccccaaatcagtgtctccagcaaaagccacagacaacatctctagctttttcgcatgagtaccaatgtaatcaaaagcgcggtcagttaggagacctgaaacagataagcgacgaagatccttgcaatgctcaacaatagctccaaaaccagcatccagtggctcaagagtcaagtaatcaggagttcttggctcaataatacagagacgaaagcatgtaaagttaggttggttccttgcgattgtcatcaaagcagcattagacatttgacggcaaaaatacaaaaccgaacgcagctttgggcagccttcagaaacagtgacaagaccttgttctgttagtaacacatttggctctgccccaaatggatccgatggaaacactcgtagttcttgcaaatccttgcaagttgccgcaagaacatccagaccagcatcttcaatgtaatccaaaacctgttatcatgtcagtaattagctaagccataacaagactaattccctcaaagtaccaggaaaggcaagttaaatgtcataatttacaaataacaataaaacacgcccaacatacccatagtcgctgcaaatttggacactggcttataagcttgataagatcttggctctggatggcagcatagctcaagttcaaagttgtcagcccagggcagatagagtaaacagctggaaggtacactggcacaacatcccaaaacccagagaggctctttagttccttgcagcctgaaagagctccaactaggtttgagaagacatcaggccgcaattcagcttggcaggcccccgtgcctaactcagctagctgaggtgctcggtggagaaggttggctagcttctcaagaggtacagttcggttgagccgcaaactcctcaagttggaacatctacccacaagacgttccaacgcagagaaactcacctcagacaataaacaagaaatgttgagggaaactaatgaggtgtaggtatcaggaaaatgggtgagccaatggccacttagatcctccacttcactctcccgtaagtctagttctcgcagattcctgcatcaacaaataaacagacttgtttataacaggctagagaattatagcactgatcaacaaagtagtttgaaaattcacataacgtaaaagaaagcagaaatatgaattcaattttgtatattaagaaaaacgaagcacaaaaccctctggcattgacaatttacactactgaatctatgaagtttcctctcacactagaattgtgagaactcttattcttcagttaatcactagtctcctagagtatcagaagacatactttttatcccttcataaaaatcacgaacccaatgtctccattggtatgaataaatataaatcttgagaattttatccaacaagcaaaaacagttctcagaaacgtagcctacgtaacatttaaaatagaatatgcagaagtccaaagtttatgcgcaagcaatgacaaaagaaaaaaaaatcttacgaaaaacaaaatgtatgaattagagaatctaaagtattcggaaacatatatcaacacaatccaacaagcaaacattataaaattttcgtaaacctcacttcacaacagtccacgagaaagaaaccagcaagagaaaaagcaacccagattatctttactagacattgaatattagatctacggaggggtaagagcattggtaaaactagagagcagaatcctatcaccactgcttcctcatctgtaggccaaaccactaaaataaaaaaataaaaaataaagactttgtggaacagaacaatgaatgctaacattattgctttaaaaacaatactcccaaggctgagaaattgaatttataaatcctgctagtacaatactaaaatcaacccaagcagaagctttcgacttcagtaagtccataaatctagttcaactgttaattcatgttacgaaagttgactcttttttttccttagagaatagccaagatggaaggacaagtgatatttaaaaacaaaataagctaaacctggcaacctgcaattgaccgcactaacatttcgagcaaaacccaaaatttcactgcttttctcttagttactctgccattttgaaacttacgaactatatcgaagcaaataaaaaataagtttttcaaactaaacatacctgcaatttccagcaatggctgcgaggccatcagtactgaatccttcacaagaggaaagcaccaagaccttgaaattcttgaacgacttggctatgagctccaggctctcgtccgtgatgaccatcctcttaagcctgatctcctcaagccaagggtacgccgtggccatagcagcgatccaaggttgaacgtatccaccccagccttcaggtaccagattgaagtcagcgaagtgcggctttcccttgagctcaatggatctcacgtccgggaaccttctgatcaccagtctagggctcacagcgtagcagttcccaacaaatatcttcctcctacaccaccgttcgatctcataccaagacttacacaccattgagatcacgttgcggtccgtatccgactgtataaacgagaacacatgctccagtacctcctctgggaacgagctcgccattcttctcagcattacaacaactaaaagaacccctttctctaaaaactaccctcgctgatgagcttcgcgatttcacaaagttcgcaagggaaaataaaaataaaaataataataaagctaagcttctccaatattgcttctatagatttgagaatctgggttagatctgagacgccattgacgaaagcttattacttgcagacaagagaagagaagagagagagagaga

SEQ ID NO: 296248 - DNA, 3415 bp, Cannabis indica
tttttttttttttaatttttacattttaaatctttttttttttttttgttatttttacagaaatccacacaacaaccaaaacctaaatcgcaacccaaatcaacatagaaaatactggagcaaccgaaactgtaaaaaaaagttaaaaaatggtataggaagtgattctctaattttttaattacaatattgtcttttaaaattttatttttgaaaaacaaaaatgtgttctataatcgttgtttttcaattttataaacaaaaaaacaaaagagtgttttataaattttatttttatttttatttgttaattttatttaagtcgattttgtgtcctggtttgagatcagggtcagatctccaggtccagtactggggcgaggtttgggtctaagttcgaggtccgagtttgggtcgggctaaggtcgaggttggtttcgggttcaaggttggttcgagtccatggtccgaggtcgagttcgcgtttgggtccagggtctacatccgggtctggcttcgggttcgattctagggtcagggtccggggtctgggtttggggtttgcatccgggttcgagtttcggtccaggtcgagattcagagtccaagtcttggattcgaggtcgggggctaaggtttggggtcaggggtccgagatcaaggtcagggtttgggtctgggtccaagttctaaggtctaagttggagtcggaatcaaaaattttgactaagaacaaaataattgttgaaaaatactttatattattaacatcaataatatttaaataattgatgcattaaattgtgtacaaaatgttaaaatttaaagaatatgcacgtttatgatcaagtggctgaagcggagcgttttgtcttttatgtgactcggttaacttgttctattaatctgttcaacttggtccattaattttttattatcaattaatttgtattcaatcacgtgtttcaataatatcctccattaattcatatcaagttgtacgacaaattttttgaactccatgtacatgtgtcgtaaaaaactatacagttagatcagactcagagtcactccctttcgaaaaccaaaataatagaaaaaaaacaaaaaaaaacaatcagtcacactcatatttatttacaatatctagatacttaccgcagtatactaatttaagatattactttagtcatcgttattcgtgtgtgcccttaaatgtaacaaagatattgataaaaataattattacttttagtccaaataaatttagtgatcaatatttcaatattattcctgttatcatgaactaacaatattaacaaatttagtaataatttatatataaatatcattttttaattgttatatatggtgtacaatattcaatttataaaaataaattatattattttaaggaaaagaatctttaattagcagctaaattttcgtttggtactcaaaaaaaataaaaaaaaataatttatgtcataaatatattagtaattttttattataaataaatatttaaatttaatttttaatagtaaaaatattaaattatatttttagaacattatacttgacattaagtataaagttaatattcatgtattatgtttatatattgtatttaaataaaagaaaaaaaattaatattttgaactgatcaaaaactctcatgtgatcaccaacttataaaatttacgaaaatttcaaaaatataatttatatattattaattaaatatttatctataactaattaaaaattacacttaaatattcacacctgaaaaatatttttcttttttttttttagaaatttcacacctgaaaaatatttaaatacaacttctctcatatatctcgtttttattcctttctattaaaaataaaaaagtatatagttcaaaaagaaaatgattaaaaagaagaatggcatcccaatcctcgaatcttttcacatctattatttactattatttaaaaggactattttaataaataatacttttcacaattttctcatctattttgcatataaaaaataaaattttcaatatatatacctgagtgctctccatgtgacattttaactttttgtctatttctcatccctttcatctatatataaagatatagctttacacgtgtatataggcataagccaattataaataaaggtgcaggattaatctatattttaaaaaagttggggaattaatatgtattgtttgttcataaaaatatgaaactctagctcatcatcaaatttaaacttgtcgtccaattgagtttaatttcattttaactttgatgtattatatacaactcccattgttattattagacctatataactatatatagattgattacgtattttaattaatttcttattagatttcttcattttttattaatgagttttaatagcaaattagatttctacttatttgtaattattaattaattaagatagaccgaaattttatattgttgtctgaaaaaaaaaaatctcaccatgcctcccatctattgaacatttaaactttaaatctctctaaaccttaaactctaaacctagatagtaataactttgactcatcacattaaccacatttgacatcattatataatttaggtttttctttttattgtatctttcaaccaatattagtacgtacgtacgcaagttcctactataacaaattgagcagagctctgatcacttgctttggtgtttttgaaaagataaataaaatatccattcaaatatgaaaatatttaataattaattaataagatataaaatttagacaactgacaaaaatcaattcataattaaattatcgctaacgatatttaagaaatatttaatcaatcaaaacataatatttgctgtgaataaaagaacaattgaaattaacataataatatagcaattgatgatagggtagagccttggactagatcaagtaagaatcaaagctaatgtggatattgaaattttttattatggtaatattgtcatatatagttctatagttgtgtggcccaaaagatcatcatgatactttcattgaagctattttcaagtgtagtgggcaattggatctagctaaggtttttagaatcaaagaagcgttaagttagatcgtgagtggcaagattgaaacaaattattttgttgttgtgaaagtcattcatagtgtgcaacttcgaactcatactgtacgtcgttctcaactgtgtaagttaaggaatgtatttttaatttttattaaacgttttgctaataaaatagctcatttcttggcaacaacctcttattgtcatcatagtgagttttttatctgctgagtttaaaacattaggctaattattgatttttccccccgaattttgacatgtac

SEQ ID NO: 296249 - DNA, 11957 bp, Cannabis indica
atcctgtaaaattttaaaaaattaaaaaaaactagcacgtaaaaaaaaaaaggttcaaatattatgttgtattcgtgattattttattttatacatgtgtaaaatatgttgtttaaacattactttcaatattgtaaattattatgaatttcttaaaattttataggatatcttaaataactataacgtacacaaatatagaaattagactaaaaaattcttttggatgccgaaactggtaaacaatctatttcatatgcatgtaaaagaaaaaagtattgcgtacaagaaactatttaaccatatttttagcgtgttaaattattttggatctcttaaaatttgataagatatcttaaataactataacataaataataataaaaaaaattaaactaaattttttctcaaatattaaaatatataaaagaaattgcatatgggacccatgcattgtggaagcatcctatagattattattacttgaagattggttttggtatccctattatggtacaaccatagatttgattgcatgatgagtgattgctggttgtagcaaaataggaacatgctactttgtttgacacgaatgaagaaaaggcaaaggaagctacctatgactttttgattttattttccaccacaaaagtttcattttctttgggttgggacccaattcaacatggaaattatcaaattaaccctaacccctttgcatacttttcctttctttagcagagctgagcaggtagccgaccattctttttcttatatatttttcttatatatatataaatatatacatatatatatattcccctttggctttggcaagcaaaacgacacaaatattcgatcgtttccagaagtgaaatctaatccttcctcttctccaggattctttacgtatctccttcaccttcaggcttcaggttccatttgtcttaaatttaactagtttgacaaaaaagtccaagattacaatttgatgaaattctcgtttcaacatctgatctttcaaacacagtaatttggttggttacgagaaatgagaatgaatttagagctcattttggtcaaattaagcttcttctaatttataatttgtattatctatgatgtaattgtgtaaattattgtgaaaatttgacttcaataattatcttatattgtttggttttgtgtgtggtggggattaaggtttgagaagaagacttgggtcaacgttaattgttttgtttttcagaataatatggttacttatgtatggatttgctcttttctaagcaggcataactagttgttgcatatgaattttaatttcactcgagttgtggaattaacttatttagtgttacactagagcaatgctatagatagcttagctgcacagccttatattaaatcttcttgttcgtagttatcttgatattgtttggttttgtgtggtggggattaaggtttgagaagaagacttgggtcaacgtttgtcacaggtttaatactaaaaaaatatggttaattgatctatattggcagttgaaccacactcacttatgtatggatttgctcttcttctctaagcaggggcagggcataactgttgttgcatatgacttttaaattaacttagaaaaagaaaaaaagtgattttttttgttagtgttagaccaatgctatagcttagctgcacagccttatattaaatcttcttgttcgtagttattgccttaagaagtctgtgatgggttggggaagcatctacagaagacgcattaaagttttcactgtggcttttataatatactttgattacaaggtaaattgttgttcttttattaacacaaggctgcacccattttcttcctagtctttattattatttctttgttttgctgcaaaaaggccttacaacgaagagagaaatggatcagcaaatctaagagagctgctttgtgggatagagctcatgagcggaatgctaaacgtgtcctgaatttgatagtagagttggaaggtttgtgggtgaagcttggacagtatttgtcaacacgtgctgatgtgcttcctggggcttacattgctcttctcaggcagttgcaagactctctcccgccacgtcctgtcaaagaggttatcttttccgatgcccaagtttttcatatcaatgcagtgtagagatgtttcttttaagtttttgattaggtctgatcactctgctgtcaatagtttcatctaattactatagtccctacattgattaggttgtatcgttatcatagtcactgtatcccattaggcacatgatgtacccctgctgctgtgtacaatgagaaaataggtagagacaaataacagttcagaacagatgaagagaaaaaggatgagagtcactattagaatttagaaatgctaagacagtggcaaatagttcaggtgtttgagagaccttgctctccgtgatggtgagattcaatactgaattatgtatgaccactctataaaattcccagctcagctatattctctcatctaaaaatctcacccatgcactacacatcctattattctgcctaaagtacccttgccacctatttgatagacttacctttcctagcataagcaaatcttatcatagttctatcatcatattaatatttgttttattcctttaaacattttgcattgaggtcattatacattttttttaacctttgccaaaatcactaaatttaattatttgtttgggcaggcttgtaggaccatagagaaagagttagggaaaccaatggatgatttattctcagagtttgtgaaaattcctttggcaactgcatcggtaagattctcatattgtaataacagacaaaaagatacaatcatgttgtttggcacaaatgactaatttgtttatatcctttacatttttactattaagcatgttttgcatcatcttagtgtttgttaattcacttttatgtagatagcacaagtgcatcgtgcaactttgcttgatggcaaggaggttgttgttaaagtgcaacatgagggcatcaaagcaattatattagaggtttgcaagcttggatctattgctgttgggatgagaagagtgattttaggctgttatttgttgttgaatgaatattatttttggtgatcatatattgttgggtcttgggcatgctattgtacaggacttaaagaatgccaaggcaatagttgactggatagcatgggcagaacctcagtatgactttaatcctatgattgatgaatggtgcaaagaagctcccaaagaacttgacttcaatcatgaagctggtatgctcagtcttgtttgcctcagtagattttatttgtcctttatgtgcagttaaaatatcttttccacgctgatccacatgtgaacacatgataattttaatagttggctgttgggacttggcagataagcttgtttgagttggaataacattgattatggccactaggctatgctctggccaaactttagaattagctattagttactgcgtataagcatttttattgcttctgttcagttttcaatttcatcttgattagaactttagataagctaactttaacttccactcgcacattggcttgataacattttttttttcaaaaataaaacttaaaatctaagcagatccattgcgcttttgctttttaatcattcaattttgtacacgaattccttaatgtatgcatgcctctcctccttggcttgttgggacctttgcaacattaatttgtttacactttcatatgttttgtagaaaatactaaaactgtgtctaagaatctttgcggcaaaacaaaatgtaacgacagcatgaatgcagatggcgtgaatgttttaattccagaggttattcaggtactaacagccatatcttctaatgccataaaagttttgcactctgggctggagcctggaacttgaaaaagtattgcttacttttgttttttcctcgtatataattgaagcatcattgttttatcatatcaaatgtggtagattatcatggtggtaaagaggcttatcttattttttaatttctttttttgttacattggggcttggaatattatgttgtataaaagaaatcataggtacattggcacctaaattttgcaaatgcttcgatgtcaattaattagcatgttaagttttcatatgggacttggcaagtggaactttggcatttaacaaacttgtgaaatttcaattcccgcagttatagacaaaatccatgttctttgctgtattgaaatttgttcaaacaaacggtgaaaataagggttacttgacactgcaacatatgcaaaatttaaatatcaacatgcttagttttggttagaggggtaatttatcgttggatttaacctttacctagttttatacttcgatggttatacttattctttctggaatacaattactgcaagctcattaaatactatcttgttaaaataatgttacctccattgacagtcaacagaaaaagtcctaattttagagtacatggatggcattcgtttaaacgactcagagtcgctggaagcttttgggattaacaaacaagagatcgttgaagaaatcacccgtgcttatgcccatcaaatctatattgatggtttctttaatggtgacccacatcctggtaattgtcttttctttcctattgagccaaatcacatattttaaattcttaaataatgtgctacactataatttggcttcatgggttcttttctccaggaaattttcttgtcagcaaggaaccaccacatcgtccaattttgcttgatttcgggcttacaaaaaagctgtctagttctttcaaacaagcactggctaagatgtttttggcatctgcagaggtttagtcaaaattttaatatttatcgtgacattgatggtgtttatttgagatgcatagacatgatggatgaattactgattgttaacattgtctacataattgggaaccaacttaattccccatcttgcttatactaacttgtatgtttactgcaaacttactaaatgagaaatattcattgtctatttattagattattgtcagataagaaatcaggaaatcaaatccttgagacttgattattagctgtagtgtatatattgcttcctaattataggattaagtttaattctgtaactgtaactattgtaatctacactgtttagcctatatacactgtgtatatcaataatgaaaatatcagaaaaagtttttaccaatcttaatcttttccgttatagattttaaatgcagattttaatagctgcaaatgaatgacttcttcattgctgttttcttttctggggttgcttcaaaccattcttcttgaatgtgatgcatttgtttcagggtgatcatgtggcccttttgtccgcgtttgcagaaatggggcttaagttacgccttgacttgccagagcaagcaatggagcttataactgtattctttcgtgcaacaacatcagcaaatgagtctcttgtaagggtgcactatgctgtgtgattatgatagtttgattgtctgatattttcttttcctttagtttttgtcttttcttgttctgtttgtttggtaactcctttcgcttattatctaaaataggaaagcatgaaatctttggctgaacaaagaaacaaaacatgaaggctttacaggaaaaggcaaatcttaatgataaagaggttaaacgtttcaatcctgtaagttaatatctggctcttctcatacataagtttcctttgatttggtcattgaactttcttttcctcttcttcttcttatcatgctttatcgagtagtaatggcatcttttttcagattgatgcttttcctggtgatattgtaatatattcacgggtccttaatcttctcagaggtgtgtaattgaaatctttattagcaatcaatgtaaagatactgtctaatgctttcttgtgaaatggattatagggctttctgccataatgaatgtacgcatagtatatcttgatatcatgaggccatttgctgaatatgctttgcaagggtaagattgttatgaatcttgttttgctattaccatttctggtttgtttctgattgaactaacataaactttgtcagaaacattaataaggaaccaaaggtcaatgcccagtgggtctatgacacacccatccattctgatttggaggcaaaactgaggcaactcctagtggcgctaggtagtagtgataaaattcttggaatccaggtgtgaaccatgatcaaaaaataggtttttattttgtatcttagtgtgaaaatcagcaatgatttagttacactcactgaattctagttataattcttaatgattttataaagacatgtgctctctcacttgcacactgaattctagttctaattttattatgaatgattttatgaaggtatgtgcttacaaagatggaaaggttatcattgacactgctgctggacaccttggtaaatatgatcctcgtccagttcaacaagacagtctctttccagttttttctgtaacaaaggggattactgctggaatgttgcattggctagttgataatgagtgagtagattttcattttatcaagtttctagattttttttatatacaattttattagccttttgtctacttcagtaccactttaatacaccccactcgtgtaataaataccaaaatactaccctgtattatgctcaagggatgcttttctattgaactaaatttattttaatatttttttcgagaatgtcaaatacaggatagtattttggtatttattgaattgaaggggttgtaaagtggtactgaagcatacataagggtagcaaagttatataatttttttccctttgtggtgttaaaacattctgtccagcctaatcatttcgttcagtgacttccattgctttttgtattgggtttaattgctttgatgcttggattcgattatttcatacattcctatattctttccttttttgtggtagtttttatttcattttatttcttttctgtcactttgtcttagtatgttctgttgctgttatggaagatatatgtgaacagaaagacatggatttaggagtgcaaggattttgataagataaacggagattggaattctcgtttaggttgtactgtcagttattatcaaaagaccaataaaagcaagaaagtcatccctagatgattataattaaccattaatgaaatcttaatttctttttccatatatttagatggtgagctgaaattatcagctgtactattgtaactatgcatcctttgcttgcttgcatttttcagatgttgatttacatattcaatatgtgcactttgtactgtccatagaaaaaggtcttcgggcttccatatgtatgtgattccaaattactatctttcaattcatttctgcagtaaattgaagcttgaggacaatgtagcaaatatctggccagaatttcaatcgaatggaaaagatctcataaaggtttattaaatgtttatatacttgttccatctgtcatttcagttgtttgtttcttttgtcttttatcagtgttttttttattccttttccgctaggtacaccatgtgcttaatcacacatctggtctgcacaatgccatggcagatgctactaaagaaaaccccctactgttttctgattggaatgaatgtctgaatcgcattgctatggcagtccctgaaactgaacctggccaggagcagttgtaccactatctatcttttggctggttatgtggtggaattattgaggtaaaattatttgcttttttcagatcattgcatttgacttctcagtttattagaactatatcttgttgtgaacttgagaaacaaatcaattagtcaatgttacctgatttaggaatttatgatgctttgctttcaattgacttctatttatgtgggtatatatgattatttagagttctggtgaagtttattatggtgttctgttctaaatttaatgcttattaacataaaagcacaacaccactccaggttacttggagagttttgttaccatctttttatcaagatgcacatctgcacgtctatttccattttaatgcttcgtctctttcttacttcggaaacactgttttatatattaagactccatcaatgacatagcttgttgaattgggcactcttatatccaaatctaaagtctttaaggtgatattaaaataatctctattttagagtttcactaatcattctttgttggaatctggttggtagtagtaataatctcggagtctggtgagtagtagtaataatctgttctcattcccactttccaagttataattatgaattcatggtgaacagcatgcatctgggagaaaatttcaggagattcttgaagaagccattgttcaaccccttcagatcgaaggagaactatatattggaattcctccaggcaagtgtgtcaaatgcacatcgttttcatgataatgatcacgcattcatattttcctcatttgactttatctgaaaattccttttacaaaattcactttgttggtggttgtacgaaatcagctaagcctggctcttatttgaatcaaaatgttagaatactgtccgaggaacgggggacaaggcttagaatttaaagtcctgcatttacacatttcaatgtttgatcagacatactaatttactaaagaggagtgttgaagtattagccaacctcttaccttacccgtgcaacgtttttcatccacaggtgtggaatctcgccttgcagcacttacagtagatataaatgatttaaacaatctttctgggtttagcagtcgtacagacttgccatcatcatttcaaccaggcaacattgctcaacttgcagtctcatttccggccttattcaacatgcttcatactcgacgagctatcatacctgctgctaatggacattgctcagcacgtgcacttgcaaggtattacgcagcgttagtcgacgatggtgtggttccacctccacattcctcttcttctatgccaccacttggtagccacccgcacatcccctaaatttccccccgtgaagtcatccaaaaagcataaagctagcagaaaggaggtagctgctacttcaaagaccaaacacactgacaacatgcaaaacccaaattgtaggaaagaagactctgatggtggtaaccattgtagatatcctagtattgatagtaatgtggggcttgttggtgaaagtagcagtagcaaccgaaatgacacaaatacgaccgacagtagtggaagaaagagtcctccaagtaacagtaataagatttttagtaaccccagaattcatgatgcattcatgggtgttggtgtgtatgggaaattggccaagccagatgggaagtttggattggggtttaagaggtacaatgcaaaggatggttcggttatcgggtttgggcactctggaatgggtggatcaactggatattgtgatgtgaagaataggtttgctattgctgtgaccttgaacaaaatgtcatttggtgctgtgactgccagaatcattaatcttgtttgctcagagttgaatatcccaacgccagaggattattcaaagttaacagagattggatccgatacacaactaaattttggtacgcctttgattaattgagaaactggactatagtctttctaatcatcatttttcccttcctcatatctcaaaagaaaaatgataagatattgagtaaaacacgcataatttacacacaaacatgagacacacccatgtggtaagttactttaataggtgtgatccatcttataaagatattggttgaagttacttgccacataagtgtgtaaagtttgtgtatgaattatgtgtgtacataccattacattactctaagataattacttggcctctacactttatagttttatgtatacaaagtacacacaaatatagacacatttgtattattttatgcacacaagtgaagtgaacaatattcaagtcaattaagaaatcatatccttgtttactatttattgtctggaaaaagatttgtctagattcactttttcggtttttggcactttcttttgggtttgcttttatttttgtctcgggttcgtttgaaacgtcgtattaagtcgtattgtattgtattgtatttttttttagttaaagtattgtattgtattgtattatatggtcctatggtcctatgacagtccgaccatcggaccatcagtcccattgttttttcttttttttttttggttttcggtgggttgcacgggttgagagagagagggggctgggtggtcctcagaggtcgtggaggtcgtcagagccgtgctctttggttgagccgtggaggttgtgggtggtcgtttgggcgagagagaaagagagaagctttggaattgtttggttcaaatgtgaggggtattatgggaatatagaaaatgtagtcatatatggcctatggtataacatttaggtttagggaaataatattagagtttattatatatagaatttcaaatttctctagccaatttatgagctatagtattaaccaaacgtttacaatgcataaacctaataacttgcattaattctagagcataaattaatgcaatccaaaataaattaccaaactcagcaagcaaagtaattttgttggatagagccatgatgacccgcttgcaatcggactcaacttcgacatgattgaaccttaaactttgaagccgcctcagacatacccgcatcacaatttagttagcatggcctggtaacagagctacccacaacacgattgttattactcttttttgtatggcatcacaagggccggctctaaggtatataaaatttaaactaaaattattaaattttagaacccttatatttaatccatatatcccacgtgacttgagactagagttgttgggttgtaaactttgtaaattgtagtgcaaagataaatgagatagcaataagttatagatcgaataaattttttgtgattacattaacgcgttttctgcccctctcatgtgcatgcataataaaatttagggaaagagtttggaacgtatgtggtggagaatggagattcaataatttcattttaaatcattataataattattaatgctttcaaggaaggtgcaatttaattatactagctactgttttctttctttattttttaaaaaatataattatatttgtatataattaataataagaacaatactaacttttattttattttgttaataatttgacaatattttgatgaaatcatttccagaatttacaatttattattttatgaaaaatcaacttaagtcaaaattataattaactagtatatatagaaatttcaatataaaatattatagtcaaattattgttaaataattaaaaagaattataataataaaattaattttttgttttcttccatatttaagttttgactctgaattttatttgattattttcatgtacatatatatttacataagagaatataaatagaaaaatatattgtttccatttataatgggcatcgttagatattaataaaaacaacgttgattcatgaactatggagagcatcttattttccgcacataataagaagcattaattattaggtaaatactattttagaccctgtattttgtaaaagttatagattggaccgtatgttttgttaaatgacaaaatagaccttgtattttctaaaatagtaaaaatacgaccttaagcttaatttttgacaactttttttttaatacaaccaacttgaagacaatgcttaatacgaaca

SEQ ID NO: 296250 - DNA, 3033 bp, Cannabis indica
taagagccattcattccgtgggtgtgaggacccaatggaggcttgaagcggtaacgttacatgttatcttcctgcttcctgggcgtataggttctgacctggtgttgttgatatactaccaaaaggttgaccggctccatcgaccaagtatactaccatagcagacgttgttgttactattgtaaggcacacctctaaattgaattctttgtccaagggtagaatgatggcaaggacaaaacagaccatgaagaaggcttcgaagtccaaccctcactttgctcggctatttacaatggatggagtgaagtaggctaggcctttgagcgtggatggtgaaatggtaacttgggacattgaagtccaagagattgaggatcaaggcgaggtccatcctgttggtccctccgatgctaaagcagaagaagaggaagatggaattcaagtacttctttttggcagctataatgaggtcagagaacctatcttcgagctaggtgacgtcttggtggtgaattaggactatgttgccatgggcacaaaagggaaaaaggtcctcggtgggtttctcctccgtccacactcacttttaagagattaacaaatctctttgaggaaggtctccttaggaaggtggaggcattcttgcctagtctcggccaactggcaatgaaccctggaggtgggttttgtgcatagtcggggtctcatgccaaacaaggcacaatcctacccttgcatccatactttaaggaggtaggcaactactataagatctgtccgacccaattcacccccaaaggtattaagtacttggttgtgttattcgtattgtacaccacacagggatggagtcaacctttcgcccacgacaaaaactagttatttgacttaaaatcaagtccaaagcaaaataggttgggatatttctacttctcccatgatgaataccagtggctgagcggcactacaaataaggaggtgtccaagatcgttgggtttatcaaagattacaacttcgtcaaaggcatggatgctgaccacctttccttccatcatattccctccaactttcgtccttgttttaccttgggtcttaggtcaagattccaaaagattcttcagctatcaaagtcagctggaacatttccctcctggccactacaaccaattgtattaagtatgggctttacgcgttttaggaggttcgggagtctgaacatgcagctggggggattagtgccgatcaggagctccaaataataagaaaactttcaaggcgagtcaggtgccaattgaacggtctatcaagattagagatggccttgaagaagttgcccgtcctactgtccaggtgacaggaaaggggaaggacgtaacaatggaggatgatggggatttttttgatgaggatgccccatcatttcttgttcgggagggtgcagcccctgaattccagggtatctatttttctacttatctttatttattcttacttgtttaggtttttaacaatgttttctttcgtgaagtcttgtcaaagaaaatgaagtgagcactcaagaagaggtctggtgatgcctttggccaaaagtcactcgccaaactcccaaaggtggatgacgctcttcccactagcattactttaagctccaagacacgccaagtaaatgttgagaggatctcgactgccgttgttgtagatatccccgagactattcccctaaccaagaagaattccaagacttaacctttagatgcattagccaaaggctctaagggggctaacactgagggggccgacctgccaaaaaccagttgctactctactcacactccaaccagagacgaagaagggcaaagagatgctcagtttttaccagaatcatttgatgccctaggttaacgagcagctcactagggtggaggatatgctagtggaactcttggtcggcagagttatgaaggaagtcaccagggtaagcttttatcttaagatttttctgtacgaatttttctgtatataagttttaactttttttttatccttgcgggttaatttgaagttggcatataatacccctgagccaaatcagtagctctaaaggctaccacgaccaccaatgacttgaagaaagcactagaagatgcccaaaaagatgttgaatcgaaaggcaagtagttgggcgaagtgaacaaacaacttattgttgcaaaaaattctatagatgacttgaaacgggaaataaaagacatgtcatccattgccaagcttgaggcagatcttgaggaggaatctaaaaaggtgcgaaagctgctcgatgaaagggaaggactctgcacactttttcaaaaccaagaggtcaaaattaaagaactagcaagtctctttagaaagagttcgaggagaagactgttgtggaagggaccctagccactcagagggaagcacaccaaaaagaggttaaggagtacgaaacagggattttagaggtcttttacaagttctggtcgacaaaccctgaggctaacttcgattacttaagggaagatttccgtgctaacttcttgtgcttttgtgaagctaagaaagctgagtaagcaacaaagaaatatgacgagggttcttctgtcgcccaaactcatgaaggcttaattgctcaagacttgactgctcattatcaagaccataggaccctcctagagtgaacttctaaacttttttttatatgttcgacctacaagccttttatttgatacaacatggctgatgaggcgggttaaacttggaattatatttacattttttaagataaacggctggctaggtagcttttaatcccggaatcattctgcttctttatcttaatataaatagtttcctaaaattttgaattttattttttgctttagcttattttttaccaatgcttgtatgggtgtaggtgcccccaagtgatctagtagacttttgactcttggtcacttgcatttcataagttttattttatctgtccatctttttggtttagg

SEQ ID NO: 296251 - DNA, 1069 bp, Cannabis indica
ttttggttaaaattgaaaaaatcagtatttataaatctaataaaagagaagataaaatttaagagagattaattttagagtgcttgtgtcaccttaacaatcttatatgaagagtaaataaagattaaattcactcacttgccactcaagcaaatatagctctttccttcatctgagactcgccgcacaaccattacccctgcactaccgcaccgctccaccacaccaccgcccgacgttctccctctctccgtccactcctttcttagtcgaacctcgcactgtccttctctctcaacgttcctctcagtctctcctacgaactttttcatttttacaggtgaatatgtatatatttatatatctaactaaaatcttcccttttcaattttactttgattcttgtgatacgatacgtattattgatttgttttctgatttttgaagcaagacaatattggatatttctatttgtagggggaggagcctctggttagattttcgaattagtgttaaagagctgaaattcgataaacccagatacatcacttccttgataaaaacctaaaacaaatcatcagagccattttttcattcttgaaacacactttctcttcaaaatgtgcttatcttcccttcacggacggttaagagctgtaaattcataaataccttggttgcagcaggtttcaaaatcgcctaggaacttcaaaagggggttagacggatcgcctgaggtatctaacattatcgctataacctataaatgagatgcttaaggttcttctgtgccctaaaataattgcaactcccaaattttgtttacatttgcaatctttgttgtatttctttatctgacttgaatcttacttactgtaggcatgcatgtgtgattatttatctagtttatttccatctctttgataacgtttaaaatctgattatttgattagacctgaaattcctgagtttcttctccgttttgggtcttgtttggtatctcattatctgtcaaacattttatctgatttgatttttatttagtttaggtatgtcagtaccaatgttt

SEQ ID NO: 296252 - DNA, 2278 bp, Cannabis indica
aaagtggcctataaaaaaaaaaaaaagtcttgcacaaacataaccacctctttctccacttgattctaaaaattcttgtagaattttgcatggaaactgtcatggcctagaacaagtggtgagagctcccagaccactttacaaatttcttctattaggggggcattagtaagggaggtattctcatgaattaaggtctcaacaggaataaggtcaaagagttcgccatcaataataggattaaatgaggtaaaaaaactagagaaactacctcaaaaataagcatcaatatcctatctttcttcaatccaaaaatcgtcttccttcttaatgtcctaaatatagttcttctttctttggaccatcgttgaggtatgacaaaacttataattatggccaccctttctgccatagctctttggatttttgtttcgatattgattcttggcgcgctttgatctcctcagtttccaacataatagaggcctcaaattcatgattttcacgagttagattctagctttaaactttaatgagtaatttttccagtattgcaagtttagttttgcacttgccaaagtactcaatagtccacttctttagagcccaagtcatatttttgaatttttgacagaataaaagtatggaaacccctcgtagtgatattgcaagcttcttctataactctcctatactcatcaccctggagccacacatcaatgaatcgaaatgggatcttaattctatcatgatgtcttaagctattaaacataacagctacatgctcagaatgcctatagaaacagtcttaagactaacttttctaaattggagtaacctctcagattacccccaaggcatggtcatgcctttctttgaaaaagtgttatatttgcatgtcaggatgcctgataaaaaccaaattttttgagttggagtaaccattcagattacccccaaggcacggtccagcctatctttgattaagtgctccaatcttgcccatttttccaaatgaagaaggcattgtctctttcaatatcaatggcccccgtattaaagatgaagtagcaaagccccaatccttctctattcatgacattgttgtcacctaacttatcttcttggcataagactacattttggatctcccataactacccaaggatcatctaggttagggatgtcctcagaaaaattttcccagaaggaatctctttgctcttagcgggggaacatagataaaggttcccactcaagctttagtaatgagatctatagtgaaaaagacaaaaattttattaaaatcacaattgagaacctagatattccaaagaagagcaacacccccaaaggcttctagagacgagtcagcaaaaattcccgcaaagcccagttgtctgctaaaaactaccatttcttcttttgttattttttttttttttttgttttccatcagaaagaccacatctgggttctcactacaaatcaggctatgtaatgagtttatctcctgaggctttctaagcccctgacaattccatgagagaactaacattgaggttggggcatgaaacgaccacctccttcacctcaaaaaaatcttgaacgttgcaatctaccatattttctcaaccacctttgcattgttagcctcaacatcttgcacggtatcctcctctggtgaagtgaaatatggaaatccagaaagagtcgttggcttctgactattgttattattggagttgttatcacacaaagtttcttgtattcctctcttatgttgaatttaagaatcactaggccttccaaattgagacgtgacccactcatagtctaatctagtctcctcttttttctaatcgaaggcccatttgttcctttcgttcttggcccaaccaaagagataaagcattttccccctttagcatactttggcttggacagtttgtgtttaggtctaatatatgggtccagtacccctttgaagaccatcgccatgtggtccacttttcttttatccacatcagacttagcgcccatagtattccttggcccaaatgttggaacttatattaccaagatttaaatttactaacatgtatgttgattaacaccctaaatatgaattctctaaaacaataaaattaaatacataagaatttagaaaatattacattaatgcaacagaatattaatgtctccttctgttctaacccttgttcctttttgtcatagagtaataacaagatctgagcctggatctccttctctcttt

SEQ ID NO: 296253 - DNA, 1802 bp, Cannabis indica
atgtgacttttagtcacaataaagaactacttgtgactaaaccatagtatttagacacaagttgttactaatttacttttagtcacaataagttttgtgactaaaaccacatttagtcacaataaattgtaattttttgtaactaatacctttagtcacggaccttttagtcacaacacaggccggaatgataattaataattagtcacaacttttttactttttgttacaagttttgttgtaactaaaagtaagattttttatagtgatatacattatgcatttatatatatatcattaatttagagagcatatgacatgatgatacgaaacatggccccaattcaaacgtagtggcaacaattttgaaacactgttttttgcatcatcaaactatgtgtggaaaactattacatattctacctagctaattgtacattgcattatttagttatttgttttcgccaggtatttatgttgaaacaaaacaaaataaggcccactcgaagagaatatatatgattacatagggaagcaaaatgaaaccaaacggagaattcaaatcgacctagctcaaaaggatctgcaaattatacataaatttatatacattggagctcgtattgggtcatcatgaccacatatttttttatatatacatatttaaatattatatatgtgtgtgtttgtaaatcggtggttgtactactaaactagtagctaccatatatccaccccaaacattgtggctccaaagagttgatttttttattatataaaaaaagtagtagtgtagtggaatttacaaaaaggtttgattgatatagatggatcatataaaggtatataaaaagtggttttgagagaagaaatatatggtaaaaatgctatcctttctatttgtggctgttctagcatgcaggtgaaaaatcagtggttggtaccagaatccatgtttaaaacaaaaaataatttgtacatcatgtaaatattcctgtcatttgtcaaaacattatccacacaggtatatactgactaaaaagcaatctagctaattgacatattatttgtgtggtgttggaatttatatgtccacaaagggctattacaacttatttataatatggttctaatattctatgcatatatatatacattataattttgttgtggttggtgatattttaagcttaatatcagattaatatataaagtgttacagataagctagataacatgtatatataggatatggtatataacaagatatatagaaagcaaattactaatggttccacttaccaaaatattgttctaattatattctttcaaatctatataataacataaaaaaatagcaaattgttaattcgatcgtgatcacaaaaattaagactttttctattttgggttataatactactaaaaataaacatttataccattaaaagaaaaaataaacatttttaaatcttacatattttaaaaatactatatttgaaattttttatttacaaaattacggttggaaaaaaacaaacccagatgtgcatgatgaagtgagctacacatgtggatatatgcacgcaagtgagattcacacgcgagtggagagaataggcatcaaaattggctgacgcgcggaggactgtagcatcagaacgatcgtcaatggcccccacgtggcaagtttggacgtagtgggctttgttctgttggcttcttttctcaacacaataataacgcaaaaataactaaataacaacttaactttctgtaatatccagtttatctacatatat

SEQ ID NO: 296254 - DNA, 4344 bp, Cannabis indica
atttttagcaattgagtgatttttttttttttgcacaatcaaatactcaagtttataatttgtcaaaaaaaaaaaaataattgactttaatagtatattttaaatttctttgtaatattttcgaaaacacttttagaaaaatatcattcttttttctaaaaaaaaaaaaaaagaatatttgcagattgagtttactgtatttatttaatttgaaaactttacattttatgagattttttgcattttaatttcaaaaatcatctccaacttcttatttacaaaaatagcttgtctatagtcaatgaaaaataataatctaaaataaaacagttcacctattcaagaaaaaactatattgtttttttgaatcacaatgtatatattggatagcttgattgtaattaatttacacatattgtatgcacttgttagctatcttttcttagtagcatatatatacatatctatatataaatatattgatggacaaaaactttaacaaagcaagaaaccagaaatagagcctaaaaagttgtcacaaaggggacaatctcccttcaaactgacctcgcacaaaagcgcttaactttagcgaggcaggctaacctgtctgccaccgagttttccacacaaggcataaacacaactgaatagcgtgaaaacttagcaattaaatacaaacattttctaaaaatagggtacgggccccaagcaaaaggtaactctcctgtagataaagccttaactgccttggtggagtccgactcaatgagcacggtgctacaattttcctcgaccgcaagttgcagggctgagagaatcgccaccaattcagcctccaagacaccaaaaacctcaacaaactacatcaaagtgatggctactccatcatcaacatcacactgaatcaacctcgtacccaccaaaccatccaacactgaggcatcaacttgtaacctcatgtcccaaaaagtcgaggaagcacaaaccgcaattacatccacaatagactgctctaaagaggaggtctcatcaagaagagcattaccatactcctcaactcccttcaggattgccaataagactcgcttcacatccggcatagagtcttggaaaaggtactcatttttgcacttccaaacaacctcaaccaaacaagtagcaaagatcaagagtttgtcatcgttgccactacacagctagagaaaaaaatcttcaaaagacatagctgaaagacagtcacttctaatcccccaagggttaagaaagcacaagcttcgagtaaagtgacaatcacaaaacagatgacaatctatctccatttatatgtgaaatgctctacatgtttctgccgctgttctacagagtccacgacaattccaagacagtcagttctctctgctgctgttttacaaagtctgcgataattccaagaaagacacctcatggcgcatgtgggggcatgcttctggccacctcctcgccgtctccaaaattttgcacaaaagaaattggcacgtcaatacactgagcaagaatctggttattgttaccttgagtaaccagcttgtcatcatcgatctctttcttggttcttctagtcttaactcccgagcttctctgaactgtctgtcgaccaacattaaactttgtgcatctcttccttccatttttaactccaaaggtttccccttgcttgcttgagcccgcctagaaagaatcaaaacccagttcgcaggcagaatcggggttaacatttatctccgatcttggcgccttagtcgaatttcctaaacctaaaagcatgatcatatttaaatggagaagctttaaaaatattgggtgtaggattgtaccaggtatgatctttttgtattttagtggccagaagatgtaatatcatttttgatagatttggaggatttgagattaaggatggttgggccttatagagattagtataatctgggccaaaaagatcacagtatagcatctgtagttttgggttattaccgggcatttaaaattggtaggctcatgaaaatggtgtggcctttgtgatcgacaaggccatttatgtggaatatccaagcattggataagagaaggcccaaattagggatatgctccacatcatccaaaggcccattaaactgggcgaagtccaaatttggtttatgaaatatgacactttttgaaggaatattcaaatccatttcagtatttgagtcgttaccaggtcctccaaatcatcagtccttgccactccattgacagtcgtactcatcgagactccaactaccttgcatggtagtggacacaccatgcatagtactctcctctacgtccttagcaagcttttgaggagatgccacatgtcctttccccttgaagctatacatggaggagtcggtaccctggtttcactggagatcgagtcgcctcttccacacacctatgcgtctctgcttaacacctttcaacttaatatcgtcatcataggtgatcatttcacgatgaaaagatgcagcagataaataattcccaggtgctccatccacttttaaccaagttccatacatttgaactatcggtccctaagcagggtttagccaggcgtcgaaaccacacagtatgtatttatatgggcaagcttaccgcagttgaaacacaagtaaggtagctttccatatttcaatttaatccaagagtctgttttagcttcaaacttgagaaacatacttgctagaatttgatggcttatccaaacatcaatccaacatctgagataaccgctacgaacaatatcctcctttcgtttgccatcaaatttaaccaattgtcacaccttcatgacgagaatgggtacgtttgcttccgagaggcatcgagtggggtaatttgtggaactcaacccaaaaacgagcaacatcaaactctaacattcaaacttccccttccaatggacatggtttcagattcaatagcacaccattcaccaaccaaggccgtttattcataacaagagtgcaatcctcttcaaagtcaaaaaagaagccaagcacaccttcttcaaattttttcatgcaccagctctgatttaggttccaaacaccaagaaggattttcttaaccaccgaagcaaccatgttcttgcatcccataaccttaccaacgcagactctgttgaccactagggagagatcctcaacaaattcatcatttcaatttcaagttcgctatctcgctcaataacttcgcagcacttgaatcaactgtgtcaacctccatcgtgacctcctcacctcctcacaactgagatccttgactatgaccatgtctaaaatagcaaagtttttcaagaccaccaaataggagaggaaacaggaaaacaagagcagaaactctagaaaaactagggtcagaaataagcacaaaggggaaactgaactgtgagaaaagtgaaaagccaagacgagaaaacgaaacaacaatacacccaagaaaattaaaaacagtccactaagagactagactcatcaaagtcacttaaaattcatacatggtgtagtttgcttagaatcttgttagcagttcgctttaacaaccttagtcatggctaagtgaattaaccgttcataagtttttcagtttgcagtaatattgcccttggcttcggcacacgcattaggcaacttgttgaccaatatttttcttttggataaagctacctagtaacttttgaataaaaagattcaatatagttttgggcactcctgcagtttatatgtgagtacgtaatagtggtttatttttacattttactaaacatgtagaagttattaattttccaatcataatcgaatatctctcttagattaatattttttaaccaataaaaaatcacttgttatacttaaagtgcccgtttggccaatgggatagggactaatattagcataaattatcttaatcttatgtttggtgataatagttgactggacaaataattttttgactaaaaactaatccaactcttgtgggataaatagtcccaacaaaatatatgagattaagtgggataaaactcactgaccactctttttctcccaaaaactccaacatcaacgtcatatttggatagttcttctttttgtattttttttcttgtaagggatgggttctaatatgtatgatgttgttattaatatatacaagtaaattatgtaaaatctattaattgataataactattttgtcctggatataaaaatattttaattttttttatttcttttctaaaacaaatattttaatgtatagataatacaaaaaaaaaaaatt

SEQ ID NO: 296255 - DNA, 2716 bp, Cannabis indica
attggttcggttcaattggattggattggatgatgcccactacttagcagggccattgcctcccctgattggatttaatatgtgtcctaaagttggggttcataattttccaataactgtttcggatcatgcgcccattcttttagactcccagatgttcagaagtaaagggtttattcccttccagttttttgacgcatggaccaacctagaatcatatgtaaagtggtggtggaattggcgtggtgtgtgaataattttgagccttctatgaacataattagaaacatggataatacgagaaaagcgttgaaagttggaagaagcagttttggggtgactgggaccacaagatcaaggttcttggagaaagattggagtggatttagcagcaatgattgcatcacaacttgtgtttagaagagaaagagattcaattgcaattgcaagatgcgtggcggcataaagaggacatggctagatagaattcgagagaaatatggctcaaacttcgagaccaaaattccagattttttcatgttgtgactgctgtttgtagaagaataaaatagatttgggctcttaaagataacagtgggaggacttggcatgataggaatcatatttcgggtattattgactcctacttctctaaattattcttgtctgctaaaacttttatgcctctggattgtgattgagttttttttttcgtataagcttgatatggagaaaaatgattgtattgttcagatgtcgaatattactgaaattaaaaatactgtctttggattccatcctcttaaggctcgtgggccagatggtctttctggtgttttcttccacgagtattgggagatagtgggcgactgcttctattcagctgtttaggtggttttcagaaagggtgagatcgactcttgcttgaactatacctatatttgtctcatttctaagttgttaaatcttgagaaaattgatcaatttcgtccaattagtctttgtaatttcctctacaaggttgttgcaaagattatttcgaataggatgagaccgtttatggatgagttggtattcccgatgcaggctgcctttattcttggtcggtggattgctgaatcttcaattttaactcaagaaatcatccacaagattagacagaaaaaaaagccaaggtggtttgatggcaatcaagttggatatgcttaaagcctatgacaagatggggtggcctttcattcattgggttcttcaagcgaatggttttgatgataggagttgcaagcttattatgggatgtattacaagtgtgtcgtactcgatccttttaaatggaagccctcttaagaaaattactcctcaaagaggaattaggtaaggggacccgctctctccctttatttttattctatgccaggaagtcctctcgaaaatcatttgtagatctgagagaaggaaagccttacatggaataaattaggcccttggccccgccaatttctgaccttatgtttactgatgatacaatttttttttgttgagctaatgaaggggaagcaaagcaactaatgaaatgtatctatgcatataaggaatggtttggccaagcttgtagtaagtcaaaatttagtgtactatttcaaataacctaaacagcagtcaaaggaattctttattgaagtgtttgaatatcaagcaagtgactggggatgagaaacaccttggaaatctttttgttttcaagaggagaaaaaaagaggattttcaaaaactcaaagataatatgatgaaaagattggaaggatggaagcttaaatcattatcctttgcagggaggctcaccctgattaaatcggtggctgcctccttgcctgtgtattctatgtcaacttctaaggttctactttcaatttgtcgtgatttagatgctctcgtgaggaaattttggtgggttggcaatgcagataaggaaagattcatggcattcagatcctgggatttaattcttaaagtttaattttaatgtgatagtggatttactaaaaatttatattcgggctacgatttataaatctcaacctacatgcaaattttctactcccgtgataaatttaaacacataggaggcattaagcatgaaaatccctaatctcaatctctcttttcctctctcaatacctctatttctctcttgtgctttcactcgtgcagtgccgaaaccatactggagccaccatctcttgccccttctcactcaggcggacctcaagtcccttgaaaccccaaaatccccaaccttgaagcttgcctccctcactcttctttctccttttggcgtcaaccttgaacctaaaggtcccaagtcgacgatgagtatttagctatcgggcttggtggtgcgaccgggacatcattttactagtcgacttcagcatcgggagaaggcaagaacaataaggaaaaggtcgactttgacatcaggattaggaagtgagtttggagctgttggggggcgaggcgtttggtggttcgagatctgatggagtcgtgagactttctaaatttttgtttgtttgtttgtatttttagagatctatttcttttttttttaattttggagaaattttgttgttggtggtggtaatggtagtgtggtggtgataatggaggtggtaatagtagtgtgacggtgataatggtggtggtagtggtttca

SEQ ID NO: 296256 - DNA, 4133 bp, Cannabis indica
tttttttttttttctgaaaacttgaatctgtttttactaaagattattttgaagttcaaaatatttttcgaagtgataatcgagtttagaaggacaagcttttggatcaaaggttggctctttcacataaattttctctgtttaatgtgttttctttgaataatcgtgtgatttaggggtagaaattatatgaaagcaataggataggttctaggcaatgaaatttcaagaaaaaataaggcaaaagaaggagtttttctaaaagattcttgcctgcaacttgaatattcacgtctttcttgtcatgaattttgaaaattcacacttttagctagaacacattgagtatttgcatattaatatcaaactatgatttccgactaaaagagtttgaagtggttggctgtttcacagtgatttaatatttatatacctgtataagttttaaggcactgtgaaacaccgaaccccacttcatttttctctagtgttagtttggttgtttttgttgaatttgaattttttatttgtgttaggacaatcctcttttaaattgtactcacaacatgctgaaaagatcttctatcttttagatgagcaatctctcaaatagccagatatttgaatctaagggtggagcatttgtagatgatcctcagaagagcgtcagatttatcccaacatcgatgtcaaaagatgaaggcccaacacatgtagatcgacaagactcattgtctactagccagataggtcgcatggtccaagagttagaggaaccgattgatattgagatacgggaaagcgagtccaccgtatctactcaagggagctttatccacccaagggccgctctagatgtagaagtcgaggaaatgggatagggtttccagttgcctgctctaggggacaaaagagatgatgatgaagacaatgcaaaatttgttgaggacgtgcctttcgacaaaccattttcttgtgaggacttggttttgcgagttgggaagactgatttgacgacatttcaaaaaataaagttgatcaatactggttgtacgtaggagtgtaaatgggtcaggtcggatctgatccgttcatgatttgacctgatccaaataatgtaaggattcgccctaccccgccccgctagatcagatactcagatcagattagatccaatctgacttattcggattggatctgatctgacccaatcttttatttctcatatataagcttataattttatatccattttaattttgtattagtattatttaatacaacactatgtttggtattgacttgtattaatatattgtgtaaagttatagtatattttcaataaactcgaccccaacaccaactacgagtcaagtctagatctggttctcatgtcttgatctgggtttgggtcccgagtttagcacccggtcctaggttcaggtctggtttgggtccgagtttgggtctgggtctcgggtctggttcgggtcccaggtccgggtcccaggtctaggtctggatctgggtctaggtcctaagttcgagtctcgggtctagttttgggtcttaggtctcaaatctcgggtctgagtcggggtcttggatccaatttgggttcgagtctgggtatggctccaggttgggttcaattttgggtcccaagtccaactctgggtctgagtcctgggtccaggtttgggtctgggtccaggtctgggtcctagggtcctaggtacgggtgctaggtctcagtcctaggtcccgggttcgggtttgggtctgggcctgggtccaagtttgagtttgggttcaggtttgggtctgggtccggtccgggtcctgggtctcgagtcgggtcgggtccatgtccaggtttcggtcctaagttcgggtttgggttcgggtctcgattccaaggccctgggtcttggtttaggtcttgagtcctagtctgggtctcgggtcctggttcgtggtcccagtctaggttctaggtctcagtcccgatctaggtccgagtctgggtccaagtcccgagttgggtttgggtcctatgtcttggtccggtcccgggtcacgagtacgggtttggatcccaggagagttcggttaggtcccaagtcctagggggtccgagtccgggttcagggtccgagtcttgaattaagttgttttttaatatattgaaaccagatcagatcaaatccaaataaaaaaaaattaggcaaagcagagcgaatctaatctgagatccaataagtatccaaatgttttggatcagaagtgatccgtcagattggagctccgacccgctccaaataaatgatttttttttactttcctagttgtacgaaacccatgtcgatacaacgccctcattgaccctgtactaaccaatcaattatcctaaccaacatcattatggttttagtccccatcgtttgttgcggtgtcgtggtcccttttcaaccctttgtcaaagcaattttgacatgttacaacattttccctttccaactcaccctcgacagttatagaatcatcctcagattctatgagatatatacggaatacatgcaaggagaacctactatcgaggatttttgcttcttctacaatatcatgaaagttgggcatgacaacaacttttattgttttagtaactgaacagagtagaaggcatggtttctaatatgagagactcaaaatcaaagtggtttttgcgttctcatttcttggagttaggatacactctaattttcatcctcgtacgttgcagatttttacacaatattttttcttccttttatcatatgaatactgacctttatttgtattggtaggctgaccagcttgattcgagttatattgggatcacatggaaattgtagaagtcttaagcaatctcccaatcagagatcgagattgccatcttctttgtactttttctaaattgtgagagcatggactgatttaagccgatgccagactttagcgagaaccagtttataaagaggcttctaagaaacaaaaagtaaagattaaaaagcatctttcagaaaaaaaaaaaatccaaggcaaatcacaagtaacatgtccattaacaaaaagtaaagattaaaaagcgtctttccaaaaaaactccaaggcagatcacaagtaatgtgtccattgcgattgataattttctgtgagttcatatgattgcttatacttagtgtatcctttgcagacatgactcatctaaagagtgctttggttcttaactgcaagttgaagtctaacaaggagcttgcgactccttcttctgtgaatccccctcaaacgaggaaaagtgaagctgtcaatcctctgatccttgacttatccaagaagcagcagaaggtcagccaggaaaaggagaagaaacccatgatggagccaatgactaaggcttgcaacttaatggctttgtaggaaaaatatgtcagtgattactttgttgtccagatcgaggggacacctatcgaagacctctgggctcgttattctaactacatgactcaaggagtgattgtatatttgtgaactaaaactgcaaactaggctttcaagaaactcgagcttttgaagaaataaaactctgctcttcaggaaggtttgaagaaagttaagctcaaggcggccagtaaggataagaaaattaaagatcttggcagggccaaagacaaagcaggtgagaagataaaaaaactagaggagcagattgttagtcttacccgtgacttgaataacgagaaggaagaaaagaagaaagcttatgaccaagttgtcaatgattatatttacactactctgaccaagttgcttgattttcacttttctatctttgtccaaaggcaatcgagatggccaacgctttttgcaccatgtctccaactgagacccaaggcctagccaatgctctttttcctaaagacgccttagagctgaaatcgcggatgtcactgagaaagttgcagagaatctcaatgcccttgctccttagaaaaaatgtctcttcttttgtttgttttttttaatagaggtactgttggaaattattttaccatgatcttagatctctcataagtatgttgattaacacccta

SEQ ID NO: 296257 - DNA, 9432 bp, Cannabis indica
ctttatattcaatttcccactgaaaagtgtttttgttatacactggtctggtaaacgttttcatctgttagaaacattttcaagaaagatttctaattgttaatttacaattgtttgtgaataattaattatattatataaataaatagtcaatataataaattttagaaaattctactgatatgctgatgtatttttatttattttagtatctacaataattttttagttaatttttttttatattgtaaaatttaaaaatttaaatagtcaatataatttttttagtatctattttttttatatttttatcaatttttttttagttaaatttaatttatatttagtgtctacaattgcgtttaacctgatatttataaggtattcatgaaaaagaattagactggtattcatgaaaaagaattagactaaaaaatttaaaaggtacatttaaaaggatacattatagaatcactcataaatttttattcttaaattttgattataatttaggaaaaattattggatatatacatggtgaaaaactttttcggaaactgaaataggtgagggggcgactagtttcggaactagaaaatcttgaattctatttggagcaatttaaatttagatttttgtggtgttgatttgtaaattttctttattaaaaatatatcttttcttttggttaatttttttttaatcttttctgctaaaagatttcagaatctgatttaaatttaatgctcgttaatttaattgatcatttttttctttattttttgaaacaattttttatttattttgaaagttctatattaaatttcgggattttatttgccttttttttttaacgtttaataaatgcatttaattattaaaaaagaaaaaaggaaaaaagataaaacatttaatattgtgatttttttaagaaaataggatttaaatttaaacgatttaaactatctagccgaaattatagctcttctacccacgatatcctactcactattatattattattaatatattgagcctataaatagttggttaccttaatcaaatctcctctctgcaaaaatgggttaccacagtttgtatttgaaagaatgtctcactgcatacttcttagttatatgctccgcctcagttttcatttaaatccattatccgcaattcttctactcactacttgaattcatcaattcaagccctaagatttttaaattcaagaaacttctaaacaagacatggcgtacctcgacaacaacgacgacgatggtgagcctttcgtcgagaccgatccgacgggccgttacggcaggtacagggagttgatcggtgccggttcagtaaagaaagtgtacaaagcctttgacattgtaaatggcgaagaagtagcttggaaccaagtttccttgagaaaattcatggacgacgattcaaccatggctaggctattcacagaggttcgtttgttaacttctttaaaaaacgacaacattatttcttgctttgccgcctggaacgacaaaaataaccaaaccctcaatttcatcaccgaggtttgcatgtctgggaatttgagggagtaccgtaagaaacaccgtagggtttcgttatctgcgatcaagaaatgggcccggcagatattgagaggcctggactatcttcacacgtgcgaaccgcgcgtgattcacagagacttaaactgcagcaatatcttcatcgatggaaatagggggaaggtgaagataggggacttgggattggccaccgcgaaagaccggaacgcgttcgtacagtctatggtggggacgcctgagtacatggcgccggagattttcgaggagaagtatacggagacggttgatatttactcgttcgggctctgtgtgttggagctcgtcactagggagattccgtacagcgagtgtaagtcaatcgttgatatttacaggaaggtgagcggtggagtcaaacctcaggccctgaataaggtggaggattcggaagtgaaatgtttcattgaaaagtgcattgttcgtgacccggaaaggcccactgcggcccaattacttcaggacccatttttttatgggctttttgatgatgacgacgaaaattactaccacggggaattcttgggtgtagtggctagtactttattagtttaagctttttacatttgtattagttttagttttgttggttttttttatcttaatattagagagataaatgtaaatgcatcgatagaagagaataatagaggcactctctttagtaaactaagattttaaccaaactaaatttgaatttactagtctacacacccataatataaagagttaaagctaaaatacatcttaattagatagaatggaagattcatatccagactcgcctctagtgtatcaaatctaaagcaatatatatacataaatataatattactactatgcaatggaaccacaatgaacatgggattcaatggcaactcttgcagcctcgatgactacttgtccacttacatagtggtggcgacagaccggcatgtagacatcagcaccaccgatcagctcggtttgcttctcttgtgtttttctcaatgtaaacagggcaggtttcccacaaagctcacatctggcacttaattttgttatagaatcagcaagaggaattatgtcaagcacagaaccaaagctccttctgccatcatcatagaagaaaaacttatcaagcctttctatacatgacctcacattattttgattaaaagtttgaagggtactaaaaaatacctcaagtagtcaccatctagaccagagactatgattgttttgccatcaagatcagcagcttcacggcagaaatcataaaggtctccaaagaattgagcttcatcgattccaatcacatctagctgtcaccaaacgtcgacatgaagccaaatttaaaatcttgtttatgtcattttaatttaaaatctgagtaaagtgctaggcatgagtaatcgaaacccaaaccatagacatgtccacttaacataaacttcaaatcacaagtctgtagacaaggaaaactatctaacctcacaatcagaatatgtcctaacaactcaaaattaacattgcaaaatcatcagttagggactgattagttttcgagggactaaaactacctcttcatatgcttctgcaccaaaattttgcctgaatgatagcaaatctgccagagcccaacaaggcaatttcactccatcatgtgttacaattgaatccaatccataccttgtgtctttgtttgattttattattgctacacttctataaaacagataaaaaaaagaagaaattagtagataaaaatgaattccaaaacacgtgtataattgttcaaaccatttccacatcacaattatacgtatgtaaagtcatcacaagacctacgttacagctatgctactgtataattgaacaatctagccataatatgttgcagctagatgtgtataattgaaccattagctattactactatataattgaaaagatagaatccaggtttttcatcaaacagccatttatattattatatacttaatcaaaagactggctgcaattcttttgcaaactatcaaaaataacacttttctcacctctaaatgaagtgaattatataactagcagaaacctacatcaatggctcacatataatccataaatataaactggggcaacctcatttgtttccactagagtaacctttataggatgtgacataacaagaccactgtatgacctaaatagattaattatgcaacttttccttataggggtgatgagctcaaggatctttttagttacttaacaccctgactttcaaagggaatacgtccccagctttaaaaagctctttttccattacctattttacccgtcattatactcaggaatataccctacatccttcaaaatgcaagtgattgcttcaatcatctcataaatctcctcagattgtaaatgagttttgtcacccttatgaaagaagtggacctccctttgaacctcaatcttgctaaaagcaggttcttttatcatccccgattccttcattgcagccctaacctttgccacattttcccataatccaaaagtggcataagcattagccaagacttcatatttaccagcattttctggttccaattcaaagtacttcttctctgcaagctttaacaggttcatgtctccatgaactctacaagccccaagcaaagctccccatatcactgagtgctctttgaaaggtgagctcagaatgaactcataagcttcttttagcctcccagcacggcctaaaagatcgaccatagcagaatagtgttgttctcttggttgaataccataatgtttcattgaagaaaagtgttcccaaccctcatcaatcaaacctccatggctacaagcacaaagaactgataaaaaagtaacataatttggtctgacaccttcagccttcatcctatggaaaagctccaacaccttattaactcttccatgcagaccatacccagatatcaaagaagtccatgtaatgacattcttattaatagaggtatcaaataccaaatgtgcatcagataggctactgcccttaacgtacatatctaagagggcactgttgactataacattgtccatactattgcacttgatcaagagaccatgggcttgcttgccatgttccaatgctgctaaagaggcaaaggctctaaatacagatgcaaaggtatactgatccggtataaagccactctgtctcatcttgtaataaagatttaaccccatctctgttagtcccttttgaaaataccctgcaattattgcattccatgaaactaagtttttttccagaagtttatcaaacaaaatgtgggctgttcttaatcccccagactttgcatacaatatcaccaatttggtcgttaaatattcgttagggacaaatcccaaaacaatcatttgtgcatggattcttctcccactattatattcttttatatatacgcattcttgcaagagaagagcatacgtctttgttttcacttgtatccctgaatggcacaatagagagacagcttccttcaagctccccgaaaaacaaagacactttaatgttttatccaattggaggtcgtttgttagaggcttgacctgaaagctgggaatatctcactggtaattattatgcaatcaaattacacaaagaaaattaggtcttgtgtagtgcagccacaaaaactaaggaggaagaatgcaaattagtttttgaaaaagtcattattctatatttccgcttccgcttaaagctatgcaagagaaaatttaaggattggctaaacgtaaaggtccattcttcctaacatataagctcaagtactagatgcatttcgtttcaacaattggaataatcagaattcagaaaacccaaaacaatagttagcgcaaatcctatcttacgctcagaaagagaattctcaagcaattagacaaacaaagctcaaaaaatattcaagtctaaaaatccttacaagaaaaattgtggtcagtattataaaaatcagataaaggtcaaacctgccgttgcttttctctgattgaatccgacgaagaagcgtggtggtctttccggcgaacataggaccaacaatcacgtgaacttcgccagacctgagcgtccgagactctcgctccatttgcaggccgcggttttgaatttgaaccaaagagcatggtgttttggggaaacaggagatgggtttcaggtgaagaagattggatttttgcagaaaggttgttgttgggttatgctgattggatttagtggcaagagaaaataacgccaaatgcgttttctgtgaaagttgagaacacgggaatggcgtctgagatacaagggacttcatccttgaaatagctttcatgtatttaggagagagagaaagaaagggggctataacagagggatagatagggcttcaagggtttaagggttttacagttgggtagctcgatagtgaaagagacaagagtgaagagagccttgagttgagcagctgcttttgacttttgtctttctccaacggaacggaaggggtgtgtggggacactctcaaacgacagcataactgtaaaacgacataaatatttgaccaacgacatgcatttacaaaacagagatgtataaaatgaactgtgaagtaaatcctttgatttgtcactgtcagactcagattcatataagccatgaaaaacactatgcattgcatagaatagaacagtaatctgtttatgtgagtgagtgagtagaaagcactttgatttgataatctcaaattaaaattacaaattgtttagagaaaaagtaggcgcaactatttacttctcatgaaaaaggacccaaattattaatactttgtaaaattctcaggttggtcttccccaaattaatttcataccagattctttatcattactttatatattaaaaaagtctgaaaattataacttcaaagtgatcatgattcaagcttagctcatgaacataattttctttttgttcttatgaaaaacatgacagatactaagtaccattagacaaaagtacttgtttaaaaatcttgtatattggagaggaaggaggctaatttatggcagattggatcaattattataatcttttcatttaattatttaaattttttacgaacattttacttttacagatattcaacaaacacaaatagtcaaaatacacatgcttgtttatgagtaataacaacttagtacaactgttttaaaaattatgtctcttagttgaacaatgatacacaagagaaatatccaattaatttcacaaacttaaagaattatatattatttcataaatcttagaattttgatgacacagaacatgcattttgtttgtctagttgcataatttgataataataattattattatattaatctaatgtgttagttgacatgaatttgttctttatttttaattccatttactaatgattaaaccattcccactctctcattagagtttctgcatatatatgtcagcaaaaaactaaatatttttttttccttttaatggggttaaaacagggatctttgttactaaaaatgtatgattttggtttatttgcttacctcaataaaattctatgttgttggagctgtaaaagaaaaaaaatgagagcaagagttgaattaaaatatgattttatatttttcttttgcaagtgataagatacacataggtgtaaatatatagggtcatgccccctgtctgtcacattagttggctttctcatcttcttatctcgcttggcttcattattgatttctccactatagccaaattaattaatccccaattcttggcctatccaactaaacatcaatcttacaacaatattaataaattggtctttggtattgccccattacagcttttaatagaaaagttttatcagaaccaaagatacatatattatgatagatataaatcttctttctatattaattaatatatctctctatccaattaatcatgcacatgcatgaatctaatacagcataaacatgatccattttatcatttgggtcatatatatatagttatataccaaattaatgaactaattaacatcaaatcaagggttaaaacttcttggtagtggggttataatccacttggaatctgagtaaaaaacagtggctatggttgattcattcacactcacacatatgtatatatatttatttaatagaaggtcaagggtgatgatgttgatggataattagtaatattgtaaatagaaagcaataaaaatatatatagggggaatatataaatatataaatttgccttattgtgatgacttagaaacaataatgtgacaacaacataagaaagtggatacccaatacctttcacaggtaatggtgtggatcttgtaaaacgtttagtgtgatgagcatcacattagaacaaggggccttagtttggtgggcacgtgctaaaatcaatgtggtattatatctttcctccatcatcaagtttctttctaaaagtacatattaactatatacatgtatgtatacatactctactctgattaattgattgtcataatttaaatacaagatttcaatttgaattttgttcaattgcaagagagaatgcagtactacaacttagttagttagcattaataattttttgtttaaaaaattgatttgatatgtaagcgttattattacgcaaagtaataatttatacaattaacatggtagataaggtggtccgaaatccagccaattaatcctttttttcttctcccccacccaacttgatatgtaataaaaagtctcatttgtagttttgaaatctaatataataattaattctgttgttgagagatacttgagaataaaatacatatataatgagaaattctctatgtattgacggttgagagagtaaattataaaatgtcaaatattagttatatgaataataataaaaaaaaaatagaaatgaaaggaataatataaataaaatattggtaatgtaatgtaaaggaaggaagagtatagggtagggggttatatatttatgggtgctatggtcatcatattagaaagacaataacgtcatgcattatatatatatatttatatgtgcatttgatatgcatctctcaaataactgctgtattcttttggaataggatgatgagtgggtgcacaagcaatcccttctgtctttcacactcttttcttcttactctcttattatttaaaaaacaaaagaaggtaatttgtaaaccttaatctaattattcagaaataatacttgtccatgatcttaccttttttaatgggattattttaaaattatacgaaaacaaccaaaaaaatttataaaatacggttgtacggaatttttaatatttttaaaatttttaaaatttttaatattttttaatatttttattattttgttgttagttttttgttatttgtgtattaattttttatgttgtttaaatgttatttttctattatatttttaagtggttttatcattgtttttataaatagtgtaaaaatatatatataaaaaaatatcttattttactaaaaatagtaatttatgtaacactagttatatttgcactccagaaaatgataaatattacctattattaaaaaaatgtaaacttaaatatataatttttaaaaattactcttaagatttttttttttaattttttcctcacattattttatgttaatttcaatacttatgttaattttgttttcataatttttttctaactcatgt

SEQ ID NO: 296258 - DNA, 1433 bp, Cannabis indica
aatattacacacatagaatgaaaagtgaattatatatgatcaaggacgatgatgatgagagagatctgcatagccaatccctctacgggtggtgggaaaaatagtgaacaagaagcttgccaaagccccagctccaatcggcaaattcattattaaaacattccaatcactcccagcttcagaaaagtaacaatttttcacattcgaatcactaaccgcaaacaccaagaacaaaattagggacacaaaaccatgaacaaaatcaatcaaatgtagcttatatttttccaattgatcattattattattactattgattatctcgtaattactatcatgttcttcatcatcatcacagttgaagacgtagaatcctttgaatgtggccataccataacgtagtttcccaccctcgtcgacaaagctatccgtaaacgacgaaagaaagcaaaagaaggcacaaacgacaactaaacacgctgtgaggtacctattggagagattacagagaccattgttggagaaacatggtgagaagatttgaaaggctaggacggttccagttgggagaaggttagccaagttggctgcattggctagtgcacgctgaaccggccgccccaccgacaacccttgttggttcagtggtaccaaagctgctgctgctgccatattttgaatctctttgattatgaaaaaattattttttatttcagtgtgtagtataggaaactaaatggactagctttataagagattatatgataaggtggagtttggttaacaataggagcacggtactgtcatgtgggattatttggatgtatttagcgttagggataccttatttaacaatggcctaatttgttgtgttttcaataggaaagaaacataacatatggttttgctaattgtatgtatgttgtgtcatactaaacaaaattgttgaacggtttacggaaagcaaccgatttgttttctaagtttgtatggacatttttacatgacgtaaataaatgcatgtgatcactcctaattgaacttaaatttatgtgtaatgctttagttgtgtatgggggtgtttattagaccacatttaatatttttaggtatattcagatcggatctaattatgtatcggatgttagattttaccatctgatctgatttaattaatttcaatcatctaatcgatctaacatccattagatgttagattggatcagctctatctgtgacatttatttcatatatatttgttgatttaatttaagtttattcaatattttaaaccaagtattttttgaatcggattaggtgcatctaatttttttgatccagtatgtattgaatttgattgtatccatcaaatcaaaaaaaaataagagtcaaaatttaatgttaattttcatatatatatatatatggagaat

SEQ ID NO: 296259 - DNA, 4923 bp, Cannabis indica
ataatcgttttagaagttcgtatttagggtgttaatcaacatacttttgagtagatctaagatcctagtaaaataatttccaacactcaactcatagagccttctctaccatagtagcataggttttcatgtcatctatggtaatcgtcaaatacttttcatttttgctaaaatcaattgacactaaccctaaggctaactgggccaaactatcgaattaagtcttttactctataacaaaaatattctctcattgaacaaactgagtgaattcttttctttttgtacaacgaactacctcattgtaatactttgcatggaacaattcttaaaattcttcccaggtaattctggttacatcctgggtgagggataccatgtcccacaaaaccaagacatcctcctggaattaaaaagtagcacaagccactctatcattgccagcgactcccataaaattcaatatcctattgattactgttagtcatttctcgactttcataaaatctggagctcccaaaaagtttggacgtgcttgcttacgaaacctttcagataatggttccatacggttaccaatagcaactagctccccttgcactacagggactggagctgtctgcacatcgggagcaggcattgcacgagcaccctactaccttaaacaccatatttattcatctttttcattgatttgggctcgcatttcagtaaatctctgaaccaaatcctgagaagcctgtagggggttaacattaccccaaccgcgtgctctacctctttggcctctacctcgaccaacaacatcaccatgaaactaaactccctgacagccacttgatccaaccaagttaccttgacttctcatgttcttcctagtgtccattccaatagattagcctgcaaaacgatgagttagcctgatcataatgctatcaagattaatatctaattactacttacttaagaaactacaacatgcgcctactcatctatcaggctactaacatgcttcctattaggcttttcatatcacatactactaaatcaaaccactaaagcataagaaggcttattaaaccatgagtcaggcttatctctgatgatgattgcacatattgcaacgatcttcggaagacaacatggaggctttgacaaaattgtaacgccctggtagattaggcacgatatcgtgatttcaatttactgtgcatttctttgctaatcaaaaagtttattaaaaaatgtgaataatgaaaaatctcataattaaacattaatcttaaatatataaatactttacataatctgacatcccattttaaagttacaaccgtttttaaaatactatagttacaaaagttatcgcctagcgacttattgaaatgaagcctactgtcctaagagtctgaaaacttcaggtcttatcgcccaatatgtaaaatcttcattttcttgagctcactactgttcagtcgttgtttttcctttacctacacatgtaaaaaatatatgtgagtcgatagactcagtatgaaaagtataaccataacataaacatcaactaaattatgactaggcacctatactccctattataatactaccttgcatcccacacatactgagattactaataatcaaactcaagttttataaaaaatccatccaataataaataataaacaattagggtaaataacaatttcacccttacttacccatgaagttatctaaccacctcatagtaaacttgtgataatccataactccgaaaattctcgatattcttaatgtctaactatactgtcccgccaattctatgatactaaaatgtatctatgtgactcaaattgatcaaatcgttgcattccactgttaccgggcataaaatttaaaaactattatgtttcacatataacaaaactaatacacctagaatttaaatatatcaccacaattgcaaaaataataactcgtatttctgataataagccctaacttttagctaattctcataataaagccaagcggtcattacaagcactatgatttttagttcttagttcacctgaatgttgactatcaaatcaacatctgtttgatcaaatacatggagcatacttttatctagtttcttagttgtagaactcaaagatgagggtgctccaaaaacactagggatatgatcttcattagtttgaggtagatgactttcaacaagatgagtgtttgagataattggaggaatatttgtcaatgatgactaataagggacttgaacatttatactcaatttagatttgtgtgtatttagaaaaccataatttaaaagaaacttcatctcataaaaaataacgtcttaagatgttgactcgcctatgctactaagaaacatataacctttgaagctctcagggtaacactaattaacacacttagtagggtggtattgaaatttatgagttttttaggctcttaagcatggataacatgctactccaaaagttttaagaaatttttaatgtagttttctgccataaattgtttctaatggtgagatattttctagattagctgtaggtagtttttttataagataaataattctatgaaagcatcacactattatttcaaaggcatgttggctctagcaagaaaggtaagtcccacaatatgtctatgctttaattcaactctaccattttgaggtaaagtttgtggaaatgaatgtgtaaagttgatgccatttttaataaccaatatgtgaaatcttcggtttggtatttaccttcccaatcagcctataacctcttaagttttctatcaaactggctttctacaagctttttaaattgaataaagtccgacatagtgtaatgactgcgtgattaaacatagaaattagtagataattataattttatagtgattaattaaaaaatatgattatatgtgcaataatgtgaaaataagtcctattgttaggcattagtattataatttctcaattatagagattttattgaattttaggtttggcatatgtgttataaataaaatttgattttttcatattatatgcttgataatagtagaaattcgacggattagccaatagtgtcactatagaatgcattagtattttagaattactgggcaatcatggatggttagaatatcatggtaatgcagagtatttgtttatgaccattttacccataaatttgaagatcgcttagtagtaaagtaagtgtagtatagtattttgcaatatacgtttaaattatgtacccttagttgaattatgtggacataagggatatatgctaaatacttgtgctagaagaatcaagaaaaccaagggcaaatataaaccaagttactccctctctcatagctttttcttctctctctcgaaactaacctaaaccaaaggaacaaagaaattctcagaataattacacttaatttttccatgtattcaactagaaattcagggaactttggaaccaagataaatgtaagacttctaatcactttacctttgagttcttgatgaattaaggttagaattttgtgcttctttcctgagttgattctgttagttgtggtgatgttgtgagctatttattattaaatttttttattaagaatccaactagtttttgttgaaggttacaactgtagtttttttgagtgagattgagttttagaactcaagcattgctcatccatggcactttttgatttggtgtttaattatggtatttgattgtggaacatatttagtggtttatatttttgtgttctagaacatttggtagaaattggtgaagtttaataggagcatgttttgggaggcttaatacttgaattttgttgagctcttactccccaggaactagtcggtaggttggtacagagttttaacaaccagatgtccaattggatagtgtcaggaaaggttatttttcatatcttggccacactttataactcacgtgtccatttttcacattccatatacgattttaaatcttatgaaaaactctacagtattacataaattagagccaaaatatgtattttattttaaggtattttcaccgtgtattttgtagaaaacccaagattttatagggcaattagaaagttttttagaatagacactaaccagatttaagttagattgacttagggcctacaatcatcggggagatttttcagtcaggttgatcgacacacctattacaaaattaaggtatgattagtataaacatggacatattcacatgtttattatacatgtattatgcttaccaattatataacatatcagttatagttgtatttgtgtacatagagttacacctggatacagacaatatatgtatgtttggcaatatagtaaagtgccaatggacgttacaacatcagtacaagtggaatgttgagtataagttggtattatggtaaattgtacttatactatggattcattctatcacatcagtatgactagagtgttgagtataggttgatattatggtgaatcgtaatatagttaggaatgtttgagacttagcatatgcattggatgcaggtagttgacttacgatagttaggtgtatgggcccctaattacgggtaagatatatattgtatgttttttgcttttcttaaggagtctgtggactcaaatatatgtctttatgtgtggttaaaggcaagactaaatttgaaccacagtgagtctagagcttagtgaagactgtacatattcagacagttagacttggagtgttcgaatcttcaaaacaacaaaagctatgttttgatagtcgctagtcgaccgttgtattattttgtactttatattgttggaatttattttaccaggattttagatctactcacaag

SEQ ID NO: 296260 - DNA, 1733 bp, Cannabis indica
aaaattataatttctccaaatatatacaatttatttttttgaatcattgaataacaacttcccgtaaatcatttaacagttgcatttattgttgtaacaatagtactaggtactgaaaaatgagtgatgcaatagagccaagtactctctctttcaaaaccttttttttttcttattaagttttaaaatctctatcatatcctcatagccaaacaaacaccaaaataaaatgtgtgctgtaatgtagtacagttgaaccatttaagtagaaaaagaggtggtggaatgtagtacagtgcaccatcacacacagaatcatatgatcaatcataatggtcattgatcgttatccttatcataatcataataatcacaagtttttcaattaaattctcacaattattattttatttgtatttaatttttttaatagtgataaaatctttcaaattgttaatttattaataatttaaggtgatattaatttttactgttaaaatttagccgctgaaaactctaataccttattcttcggtatgagttcttgtagatcaagctattctaatcaccaccattttcatcatatttgatttcggtgcattgaaaatcagtattttttttaacctgaatctccctaatcattaatcaaatcccatattaatattatcataatttatccaaaatttttaactaataaaattactataaatttttttaaaaaaaagtaatttaaaaaaaaccaattaaataaaatataatattttttatttcaaaaccacaaatttagaaaaagctactctcgcgagtaaagatttagtgtactcgctttctctgaggtttgagtgtcggtctagggcactacgattcaatcacatgggctgtctcacgagtcgtaagccgcgagtgtcgaacactcgcgcgcgtaatgaggatatcaatcttatctctctgcatggttttttcgtaatttcactttactgatatgtgaagagagagaagcgtcccttcggaacgtgacaaggacacatgcatgataacctaatcaacggtcagaaatcattcttcattctctcaccaaatgaagtgtgaccgttagatctaataagtaaaagcctacaagaaaagaaccaatggttggggttagtttctctaaccatggttaggttaaggctgtgttagctttaacacaagggtttgtgattcagagagagaagagagagagagagtagcagtagtgagagagtagctatgggtgtgttgataaacactctctcttgagtttagaatcatatttacgagtttccatttctggaaaacaagtttgttgattctgagttatctacgagtttcgatctgtatttttctttttttcctttttcgattgttttcgtcatagtaatcatcactatttgattcaagatgatcacccagaacaaaagagaatatctttctttcttttcattttcattttcagctcaattatttttatttatttattttgtttcctcagagtacagatctgagattgagaagtaattaatggaagaagagagtggcagagtctgtaattttaagcctctctttctctttctctctctttattatatattttagatctaagtcttttctttttttttttctttcctaaagatcctggactagaagtgagccgaaaatctggttcagatcttcggtaagttttcctctttttcctgagtaaagttgggattttt

SEQ ID NO: 296261 - DNA, 4033 bp, Cannabis indica
ggtttttttttttttttaacttgtgtacttggttatacaaaaaagaaactctcttaaccctaacaaaatcaagatgtaaaataaatgaatatggagaaagcaaaataattaagttgttagtaatatattaaatggtaaatactattttagaccctgtgttttgcaaaagttactgattaaatcctctattttgttaaaggacaaaatgtaccctgtattttctaaaatggtaaaaataggaccctgaaccgtttttttgtcaaaataaaatctaataattatccgatctaaaggtcttatgaccaaactgtttacattttctgtatctgtttgtattttcaagttggttatattaaaaaaaaaagttgtcaaaaattaagctcagggtcttatttgtactattttggagagtacatcgattttgtcatttaacaaaacagagggtccaattggtaacttttgcaaaatagtatttaccctacattaaaactaaaaatatctaaatactaattttctaatagcctttaattttttttaatgaaaaaccatgaatttcattaaaccataaaaatagaccaaaataggattatttttttttcttcttcgtgaaattttctccatcaaaattggttcttaacaatctagggcttttctcttagtttacgcctattcatcttctccttttccccctcctttataattttcttttcccttcattaaatccacttgcttattgttgccccacagttactcttttttcctttttctcccctgcaatgatgacaattatttcttcgatattacagatccactccctcttcacattaattactctctaatctgcatttaattttgactgcgcatgttttatcacatttaatttggacttggggaacctatggtaaatacttcatccaacgataccccatagacctgcgatcatccactccccaagatggcctctcatctgtaggtattacttttatcccctgtattttttctatttaaagaactgggtttctgtttttggtaccaacctctatccttttgctccctgtttttattctcaatctgttgttatggcatcctcttccattaatcatccaaaccttctaaccctcacagacaaagaaaagctcattcatgactttgaccatgtttccctaaactcaggcaacacttttgaatcattctgcttagtgattaggatcctcaccaccaaacctctttaccctgcttggattgagaaagcgatgagggaagcctagatcctctgattccctgttgaaatctctgattaccactctggtttgttcctcattaattttcaatgtgaaggtgaccatcgacgagtcttggaagatcagccatgtcgtttcgacaaatgcccgatgatttttgctaaccctaataatcaattttgatacgttccattctaggttcaagctcacaataccccttttggacagaaacccccctaactggcccaatttgttgttgatgaacttggagatctcattgaggtctacaccttatccctgtttgaaagctttggaccttacctcagggtcagagtcctcctcgatgttagtagacctctgagacgtggcatgaacattcgtttcaggaaaattgccgaaaccaaatggcttagcttcaagtatgaaggactacataacttttgttacttatgtggtatgcttgaccacaaccaacagatgtggcaaatacctcaagaggtgtgatgattttgctaccccacctgagttgggatataaggagactcttcgcatctttgctagatatgtccttaagaagaatctgttcgaaatattagtttctgaacttaggctcatattttttggtccctgataacgagtaggaagtccaaccccctcccactgaagctcctcatgtcccaatgggtttgaataggatcatcttgactctccgttcacccctaatcatggtcatttctatgattacccatactgacaaggggaagggcattactcaacctaaaacttacatgccacccatctcagctggttcacgactcccttctagaggcatcaccatcaatgagcccaacagagttgctactactactgttttaggtgtcaagagatcgtttaccagacaaaatgcccaagttggaaattctatgaggagtatgcgcaagcatgctatagctgttcagagtgatgaagctgtggttcctacccttactgccgctattgaaacgatgggtgctgctaaacaaccccgtcgagaaaaatgagccttgttagttgggatgctcgaggtttagggagtcctcgagcattctaaaatctctccctattggtgaagcaacaccaactcgttttgtgttttgttataaaaactaaaatctaagttggccaaggaatatatgttaagtataggttatgttttgataatgcttttgaagtgcccaggaattgtacttataattacatagaacactctacacatcaagtatggatacaatataatttatttattatttcaatcacaacaatcgttgatcctctgtttacattgagtagggacaaaattatcgttttaccctttaatgtattttatccttaaacacttagatacttgtaaatgatatttcgagaaattaatatataattatcaaaatgaacattcaaccatttaatgtgttaagctaagctcaaagaaaactatcgttttacttctaataagcataggagctataaatgttcatatctatgattaatactcttacttaattgtattattgagttcccaagatgtaagtatgggctgatcctacgggtaagctgataacaaacaagttaaagaacctagacaatacaattaagctagagctcaaccactttaagattgagatcaaatgatctatgattaactaagtgacattgacttaaaaaagatataacagtaagtttatgatatctttttcactgtcaatatctatccagtttgatgtatagccaatatatcccatcctggtttactttacttatatcctagaaaaggcattccactaatccaagtgtaagcaaacctcatcgttgattatcacgtcagagtaaattagtgcactgataaatcatgggaccaataatttgaaacatataatcgcaattactttacactgtgataacatcactgcaattgtgaataactatatgttcaagatttaatagaatttacataataaacttattatcacgtaataaacatgtgaataaaatatatgacaatgtcaagatataatttttgatctttattgaaagtaaataatgttacaataaaattgaattttatttggagcataaaatttcaacatctccaggaaaagatctatcaaagactcatctattttctttctttgttccgtttgttttaaataaatctctagaaataatcgaaattcatttcatacaaaggaatttgttatggtacaaaactatatatttatcaaaaaaataaaaataattattcatttacttataatttttttttgagataaaatttccacttctcataaattaataatagtcatttatgagaggaaaattctccaaataaaagcaagtttcattaactctagagcgtacctaaccgtgagcaaccatatacatttacttatatataattatgaaacacttgctgtttagttaagaatatatagtttaagactaaatagatttagttgtaatatctgttggaactttgatgaatcttttaacaaaatatagaagtattttagtgtgtgtgaagttgaaagagttgcacatgggatatgaacccttatttataagagtatatagagtgcaactttggcatttgggtttgagccccaaggggtatcaagactcagacacttgatccaccacacacatgagccgtccgtttgagccaggttaggttagctggtatgatactctattattttttattttttaatttaataaagaaacgtgtttaattggaactgattacttagtcgtatcag

SEQ ID NO: 296262 - DNA, 1996 bp, Cannabis indica
gggattgcacagcttacccggtgtttctccttacggatcacgggaccactgactgtcacaaggcccacaagaacaaggatctgtttgggaaattgatgacatcccaaacccctttcataactatcagatgctattgaatctggaggataaatgcgacttcatgagcactcgttgcctcttttggaactgactggcagaaaataacgaaaaagtcagcatcatcattgatggctttggtgcgtggagcatttcccacaccattgtcggagcgcatctccctctttagaattattttgccaacttcctaatatttgtcagcatagccccgttctaactaatctcgcaaggttataaactccttgcgggttggtatatattttgcaaaatgatagacttggatccaccttacctagctgaagttctgtattattatgaactaagcatgaacttctacaagcgtgattataacagagatggattttaccatctaaaaaggcagagcaagaatgtaaatagtcttcacagcacctagagccaccctttggacatgagggaatatcttcacatctgggttcctgcttcataggtattcgacactaatgttggattttcagagagttggtaagtctcaagcttcctttctttttcttgcctttactaagtggttttcatgaaccttcgataaaagtctaaacattttcgtttatcctgatattagagggccttatgcacaaaaaactccttatctctacattttttcccatgaagtggcgtacaaggaaaatgatgaggatgagtcggaggctggcttcttggtgacggacgccaaccttaaaacctatggcttgattactcaatattagagcattgtgcctcctagttttcgtggcctacaagcgattccaaaggaggtcaagggtagacttatcgagatcatggataacgaggttgcaaaagaattaaagcgtgatgagatttgtcatcgcaatttaggagaagaaggagtggttcagagtgaggaagtggagttggcagactatttcgaggctatgcttcgaaatattggcgctttgggagccagtacgtcaagagtaggtggcactttgcttaccctcattacaacacctttttcggaggacttctccttcataagataggatggatttgattcttatttcctcaatgtaactccgtcctgatatcctatcaagtgatttcttctccgtgttgatgagatagtagagagtcccacatacttcattcctccctctcagaaaattaggatagacccgtttactcttattcattatcctgggtactttgaatacgagagtttcttagagtgtgaagaaatacttgctttttcttcaaaaaaaattggaaggctccagttctaactttggtggtcaatcatgaacctttaattcacactaagatttgtttttgtttaaaattgaattgtattgctattggaatgtgtcttattacaaggttgtcaaagaaggactacaagaggcctatatataggctaaccaactaaatcgacctaaaatctcattggttatgatatgaaatgatcaatgaggacacttactactaagtgtccaaacagaacatcacaataactacattaaatgtcactaaaactaacattatcaattacagtatgacacttcttgtggtgtttgacatcttcaggtacctcatcatatttctcttacactatgtttgtcacgagggggagaagtagggagaggagcggtggagggagactctctcatccctccaaatacacaaatttcaatccctctaaaaaaattaaacaaaattccattcctaccttttgaaaaataataaaatagtaattttaatatttatctccctctctatcattttaactttaaataccaaataacacaaagagaataactatcatctctctcatttctaacaaacataaccttataatatatatatataagagagagagagagag

SEQ ID NO: 296263 - DNA, 3894 bp, Cannabis indica
cagatgtaattttctgaaccttacttttatgtatgtaaaccataatagaaacatgatcaacataaacaaaaggtcatttttatcttggcaatttttggagagaggagttgaaggaaatatgtgtggttttatagtttttcactgatgttatttctctgaaaattgcttgtttaggcaattgaaaggttgaaagccaaccgggaaaaccataaagggaagcaacaattcttggccatgtactccagcatttttggtggaataacaacagatcctgcggctatggtcatccctattgatgatcacatggtccacagagggcatggtgtttttgacactgctgccataatggaggggttagtttagtcaaagacacacaaattccaagctgttgttcaatttttttttttcaatgatttcattatgtgtcctttttttttacatggcagatatctgtatgagttggatcaacatgttaaccgtataataagatcagcaggtatggccaaaatcacccctgcatttgataaggaaacattaagaagaatactcatacagacagctagtgcctcaaagtgcagaaatggatctttaaaatattggctctcagttggacctggcgattttcagttgtctccatctggttgcaaccaaccaacattttatgctgttgtgtttcaagatgaatccccttcttcttattcaaagggaattaaggtaataacatcttcaattccaataaagcctccacaattcgcaacaacaaagagcgtaaactacctcccgaatgttctttcgaagatggaggctgaagaacaaggtgcattcgcggggatttggttggacaacgaagggttcgttgctgaaggtcccaatatgaatgttgcttttgtcactaaacagaatgaacttttaatgcctaatttcgataaaattctaagtggttgcactgctaatagaattttgactcttgctgaacggctagttagtgagggaaagcttcggggagtaagagtaggcaatgtaagtgtagaagaggggaagaagaattcaactgaaatgatgcttattggcagtggaatactgttctgcctgtgatacaatgggatgatcagatcattggtaatggtaagaattcctctacattcaaaacattcccataacatcttccttatgtatatatactcaaattcaatgacattgatttatttgcttgtaaatatagtatcaaagttgataaaaacaacataaagctagcttttgcttttgttacaggtgcagaaggttcaattgctcaggctctcttgaatcttatcatcgaggacatgaaatccgggcctccatctgttcgtgtgccaattccttactgagtcatcttcgatcttccgttctatttctgcacaaaatgttttacttgaagcagttgagctctatcacaaaagccttggacctgttatgtaaattatgccgtttgttctttgttatcacataattgctcattctctctcaatggaatgaaattttacaacatggtgtaattgctcattctctctctctcaatcacagttgttgtaaaatggattcatcaattgctgttctaagtcaaactaatctttttaagccaagattacaaaagctataatatatagtgaaattgtggcatccgtaactctgcatcttttctacagaagttacaagattatctttatgattgtttaaaaagaaagattgatcactttgctcatttattaagaatccatgtaaattaacctacaactggaaaaagacttaaacaattctaaaatccgaagggatacatccttgaacctccaatccggaggacacaatgagctattaaaagcattaactactaactgtgcatcagaaaagatggtgatatcttcaattccttcttcttttgcccagagcaaagccattaaaatcgccttggtttctgcttccatggcagagaacgcatctttcttacacgactttacttcccactttgcattgattctgttaatcaacagaactgctagaccagagatattgctatcccatgatgcatcagtgatcatatacaccctagggaaatccaaattagaaggcagaagatccttccaattaatctgcactaagctgtgagtctcctggtgagtgagggaaaattcacagtgttttttctgtactcgaaaagaatgtctttgctgtcttctatcttgcctttcaacctgttttgatttctcacataccagatctcagaaaaaatggatgcaaccatctttacccgacaaaccttcaataaggttctccaaaaaactaagcatatcatttcctggaacctggatcgaatggcagggtatagaaaaagagaaccaaattgctcggaccaagggacactccttaaagaggtggacacaagactccacttctacatcacaaagaaggcattctttatcattcagaaatggcagcttatttttcgttgggatacactgacatagtacacgccagagcatcatcgccaaccgaggatgtattcccggtttccaaatccaactccaaatttctcgggtctcattgaaacggtgttgttgatccagcacatatgcgctctttacagagaaaacaccattgccattactcttccaaataatgcagtcctaggaagaagttagaagtctaggaatcgccaatattttccttcccaagtcctccccaaacacattaataactatgtcttcattccactcattacccaaagagatgtttgaaacctttgaaaaactaggaaattgggaatgtaagttggacatgagttccctgaattcgccgaattgcatccatggaatccagggttggttccacaagtccacagatctcccagaagacatcaaactgcaggacccctttgccacaatattcctggtttccaaaatacttttccaaagaatagagtcgccatttttctgttgtactgcccagaagttctaattcctacagtacttttgaagcagagaaataacccaaggcttctcttccccattagctacgctccaagcaagttttgctaataaagctcggttcatatcttcgaatctcctgaaacccaagcctcctgtgcacttaggttgacagatgttgtccaaaatttgttaaatatttgaactatttttttaatactgtagatttatttatttaagtttttttttttttttaaaaaaaatgagtgaaataacatttgttataactaaaatgtaaaccgttattacagaaagtgaattataatattttcagtaaaaatgaagtctctgttaaatgctatgatagtaaaattttattaaagagttatataataaaaattaaaaatgatgttttttttaaataattaaaaatgatgttaaaacttttattcttaaaaatttccatttcctttcgtggataccacaatccacaaataagctcgtttggtacgtaggattgtattagagagactaatttgtccacttcagtgtttgggcatgttagaagtctggataactaatccagctaatctgagaatatttatcttatccagcagggtgggataaataagtgagattttttttatcataattttaattttattaatatattttaaatttaataagaatttaaatgaaagaattattattcatttatttataatttttttttatcaaaaatttattcattaaaattagtaaaaaggtataattttaaattattatacataagttttcaaaatttaaaatattattaattaaacaatagttacttaaattgattctaagaaaaacaatataacaataaaactataggaaaattctacaatgcacccccttaaaatggatacattgatgcacccttatctgtttt

SEQ ID NO: 296264 - DNA, 2138 bp, Cannabis indica
ataaaaaaaaaaaaattgaatgttaatgaatttatttaatactttaatttattgtttctcgattgataaacaaagcacatgtaaagcatgagattttatctttctctcaaattttattgtataatttattggaaaacacatgcacgtgcaacgcacgtgaattatgtgactagttttcttaaacgtgtaaccttttagaactccgaccacaagacgagcaaagtgggggagtcaacttcaacctcgtctcgcctcttatttactagggttgtatgtcagttggtttggtaggtttatactatatatattttaacccaatataaatctcgggttacaaaattttaagtataacccgcctaattataaagaaattgtaaactgtccgacgggttggtcagtttggtcgggttaacctgaccaacccgacgtaaaaagtttttttttttttaaagttttaaagtcaaataaaaaagtatttactataatcattaataggaaggagctcataaaatgtattactcatcatttttatggatacatatcatatatacatttatgtgtatacatataattatatataaataatcaaatatacttttaacaaaaacaataatagcataaattttatagtttattatacttatatatatatatgccgaaatagattatatgttttagtacaatacaattagtactacaagctacaatagtagatatatgcaaaaatagaatatattatatatataatagaagtgaaatagtaaaaaaaaaaaaaaaagaggtaaacccatagttgggttggacaggttgttttggtttaattgggcgggttagacctattttcagcctgccgaattaatagattgggcggtttataattttattgagttttttcggtttgtattttttatcgatttttcagtttagtttgagcggtttaccaaaatttatggtcaaccctagtatttacttcacaaaaaatttctttctcttacgattttatcattgatctacaactattttaaaaaattaatatttaaatgagtactttttttttgagaaaataatgttacttattgcaataataaataaagatgagagtgtaggtagttgtggtatagtggctttaacgttgacacaggagaagttgacaagtaactaaacagaataccacatagtatcactttacttggtattgatttaccatgaaaataaatttccataaatcacaaattgattaattatgatcccttgttaatcaataaaaaacagttaacgaataataaccacaagtgtccaattaaaaaaaaattgtataattatcttatctccagatattacaaagaaacaaaaagaccacaaatataatctaattatttagaatttttatgtagaaaatgaacaaaatgaatagttatgactgcaaaaatgttctcccccatataacctcattcataattcatatcattaattaaacaacgaattcaaaaaaatgcatgtaaagaagaaaaaaaaaatgatattgggattgttctactaatgtatatacaagaactaaggggactaatatcagtagtatcagatagtgagattctcttgaatggctacaaaagtgccaagtatgtttcctccaacatctgggaaagtctcacaggcaggaagaggtttaaccttacctgttttatcaacttcaactggatactttagaagatgacccttcatttctgtggccacttcagctatgtattgaccccaattctgctcactcaaataccttactcttctcacacattctatactctctggtctcttgaatctttcctcaacaccacctatgtgttctgcccatagtgacattctatatccatatacctattacaccaccaaaaacaaaatacaacatttaagtttgataatcatgacataatactaataaagttatcggaaagagttgaagattttgggaaatgagtgcactcatttgagaaagttttcaagatggtaattattattagggtaaataccattttggaccctctgttttacaaaagttaccaattggattctgtgttttgttaaatgacaaaatggaccctgtattttttaaaatagtacaaataggaccctgagcttaattt

SEQ ID NO: 296265 - DNA, 3739 bp, Cannabis indica
actaaaaataagattttttgtatattagccattgtaaaaacaaagatgtcagagcttcatttgtgtgcataaaacatctaactatttttatttgtggttgtgtactttataactaaagttaaagttactcagcaagtgtgtatttatctgcagcatgatcttgcacctcacagtccttttaccactgcactaaggaatttcggaaatattctttatgagaatgaaaaaggtctcttttttgcctattggaactgttgtgcatcatttgttattcagtttgtatccaactcaaaaattcaaactcagtccttacacttgcagggatagaaatcagagtttatagagatgggaagccattgaaaaattcgcaactagagagggattatcaaaattggattctccagatgcacaataagtatgatgaagaagttgatcacggtgaagacgaacctatacttgcacttatcacaagcccatcaaaaggaaaggcaatcagaaaatcaaatgatggtagattaaaaaaggaaaagtatttggttttctattcttggttcattttccaattgatttcttccatttttttcccaatgttaaatcaaagtttcaagggttcaccaagttcttaagaggaatgaaataacatggaaagctggccaacatgttaagattttgaagggagcatgtgctggtgttcataagaataatgtctatgcaactatacaatattttatacttggaggtttacaaggagatacaggaggtaagtttttccttgtcaatactttttgttattgttaatgcaagagtttggggtgaagatttgactcttgtttctcttttgtgccttttcgaataggcgaagttcagattatttgcaggtatattttgagaagttgaggctctttatttactcattctttcaactacttgaataattttctgacagtaagtatctgtacttcattggattaaaaaggccacttggtacaccagaggatgatggttgcataatttcagaagttaatgggatgatgactcttgatatgaaacgctccttgtctttacctatcagcgtaatcgattccaaaaaggttccaacatacttttccattttcctttttattccttatggtacaaagataaatgaatttgctttcattatttgttcaacattttgttctataatcctagtgcttacctgttgaaactgctgaatggaataaccaaatggataagcggcttcagaaaaataaaaccgtagatctttacaaatcttcgattgtcaaacctgcaaggcaaaattcaaaagaggagcatgatggaatggaattttctatgttcatcaagaattataaaaaggtgcaagcatagtttttatcttggcttaggagataaccattgaaatagttctttctattcatctatatgagtttctttttttgtcactgcaggtctttgaagatgaccttttaaaatttggttcagaaatccaaatattggaagataaatatcatcagttaaatgaagagaaagaaaagattgaagaaactataaaagacttgcaaggttttgacttgctagcacatctatggtttcaattctttatcacattttggtatattatgattgtgttaattgaaatacttgtcaagatcttgtatttgttgtgaatttttagattctaccgaactatatcgaccgggtttcgtgaatcagttctccacgaaagaagaagtgatagagagtatagtaaagatgggcaactctgttgctgctgcagttctttgcagcatatctaaggaagttccatttcaagagaaagagaatgatttaatgaaggacataataggagtggttgctctactcggaagagttcgttctagccagctgagcaggtaaaacatcacattatgtatccattatttcataactttttttcattagtctgttctaaattgttgatttgtctacatttaggattttggcagaatacttgggttctgatcaaatgctagctgttgtagctagatctttcgaaactgctattcttcttgaaaaacataaacaaactggagatgttaattgcagccatgttaatcatgaagaagctcctgttcttggccaatctataaatggtcgatttattgttatatgctttgacaatataaggtgacattcaactccaaaacttctcttcttttgtcaagttatttagatgatttactaaaaggattgactctatctaagcagtccatttagaggtagcttgaagagtggttctcagagaaagctggatttacaacgcccttatttgaacgatggaactattccaaaaggttttctcggatttgctgtgaatatgattgactttgatgcagaccagctatccattaagaatagttcaggccatggtcttagagagactgtattttatcaccttcttggtgaactccatctttacagaaccttggaggacatgctagctgctcgtgcttgtataaaacaaggcgctatatcgcttgatggtggaatattgagaggagacagtgtgatatcttttggatctaggtgtgtttctctattcatgtctttttcatcctcacttgtgggaatgttttttgttgaaatgattggtttttctatgattgttcttagtgatcctggagtgtgctttcaagttgtgcaaacaatcaatgaaatgccaagttctcaagaaaatttgaaacagcttaaagagaagaaatctgagttgagaacaatcaatgatgagatagaagtagagaagggaaaactcaacaaagttttagacaagtttcatgagagaaaagcagagtttaacaagtttatgaagttagtggaatctccatacaaactatgaggccacactgaaatagtttttacaatatgatgacaaatcaagtcataatttttctccaccgttttgagatttgcttttttgtccttcatcatttctctgatggagaaaaaaaaagaaatgtgttctaaatgtatttttgggtgtatatatatatatatgtgtattgttattgagtattagtggtgcttggcattttctataggtggcgttctataattagttagcgatattttctgaaatcaatggtaatatgacatcagtagggatgatatttaatgttgaagtgtaactatgtattttttatctttttgatagtttctttggctttaaaaccacatctgaattcttatatatctaatttagtaaaaagtaggaggatgtaaatgttatataacttggatcttcagctactgtctatttttctctttatctccaaacaaaattgaaatatataaattctcatagtgattctaatggggttttcatttgatttgtttttttttttaaaaaaaaaaaaaaagtgttaattatatgggttgttattaaaaggccttctcttttaaaattagttctgtttttcccttctgttttttttaactttgatttggtactttctacttttcctactcataagacaacttaagctattgtcatataacctaagctcattgaaccttggacaaatgactagacttatttacaactcaagatgttctaaaaagctaagaataaaatctaaaactttcatgttgagctctaagtcaagttctacctctaaggttattcgaatttgcaattaagttctatcttgtaaaattgaactcgccgactttcactattttccaccaaaatatgttaaaa

SEQ ID NO: 296266 - DNA, 3340 bp, Cannabis indica
gtgttacttttggccttggtgcacatgaaccaacaatagtcaaaaatagaaactttgttaacataaacaacagcaccataattgagggttttgttacctaaaaagaagagaattattcaaccttagaatcatgttcatgtccttagttgactttaccataccatctcataattatagagtaaataccactactaattttaagttaaattatttctagagttagaattagaaagatgaaagtttaatattagagtttcttttatgtactcaaaattattcaaacctcgaagggattgattttattaagcgtcatatcacttcttctgagtaaagactctaatatagagaaacaatccaagtggcccaaaagagatggacaactctgacatcattaagagaccccattagtgattttgatgccttgtctctcttctcttcatttggccaagttttgccgacaagtttgttttcacatgcaaaacaccaaacactcttttggggcctcatttctatttacaaaaccagaattatagatgaagaacttgatcatcaccaaacaaattaacaaataataaaaatggaaatctaccaaaattagccaatcaaattagcatcattggtattgcacacaactcatgtccatcaatctaaaaattaaggtgattaaggaaaggatatgttacatatcaagacagacagacagacatataccacatacccaaaactggtcctaagaatagtatatatatataatagggattttgaaaatgcaaaggagaaacaatttaacataccaaacacctatttaatgtaaatatgaatctaatgcaaaaaaattaaaaatataggaacatgtccaatcacctcaggttattaagtaaaaacttaaagcaacttgtacaacctccaagatttgataaaatttctttcatgattctatagcaacaccagcagcttgtcgaactctacgctggtgaacatcccaattatacacccgagcaattgtgacctgcataattagtgtccgataagttaaattggagtatcaaatacttttgtgcacatgcgtagacaagacaaagttaagatatgatttccttgtagaaaacacagatatacagtggttgtagaccagctcagaaacatgtgtttacgatcacaggctaaactgaattaatcgtaatgccagaaattaatgtttgggagattttattacctgggtaattgtcacctgatccctcaagaattgtaaatcagccacaagtacttctaaactagctttagcattatctaaattcttttgaagaagagcagtggcctgcacgagatagttatacgagatcttaacattgtgtctacttaatccagacaagctattccacaacagttttaaaagaggaagaatagtgtacctcttcacaagaatactccaacattacatttgctccaagccataagcacactgaatcggtatcctcaatacgagctcgagagtatattccctctgagacttcaaagtctgtaataagtgcctgcagccacaaaatacagatgagagaaatagtctcagtaacgagaatctactttagagaaaaacaactccaaattgcaaggcatatgaacttactaagtatcagcattacaaatattttgtaattacaccaaacataacagcttaagacagtaattgcaacagatatttccaataaataccaaatatggaacaataagagtcagcatacttaagctatccgctaataaactattttagatttcgataagatgcttcacattcattacttgctgccacctaaactgtagggtataccagaaatgagatagtacttgcctaagcagatgacagaatgtgttcatttctacattattgacattcaaatggccaaagccaatgaaggattgtgccaaacccagagtattataaacatgtagccttaatcaaatttttatgcatacacatatgagaaggtgaataaattccatcatgctcactagttcagtataaaataatgtgacaatccagatataaatgcttgaagtatgaaaattagcataaactgcttatgcttcaaaaatacaacgaacctcaccggtacccttcttagcttgcagagttgcaaccacatctaaacatttctcaatgtcaggaatctttgcctgcaaaatcacaatgaccaaaaacgcatgattcaaactgaatatcaaagatcaacagagaatagaaatagaatatgatccactaaacttttatattacatagttttatgtataagttactggcaatggcaatgagtttgaacgcatataataaaaaagaaaaggtttggcgagtaaacctgaagatccctttgctgagcaagaagtttcatttcaaccaccttgtactgctgaagtctgtccagtagaacaggtacaggaacatcattactactcaatactcatgaatcataagcaaataacaataatagtaatggtagcaaagacaaaacaatctgatttttacttaagtcaatcatttcctttcgtcttggcaacagaaatctaacacgttaatttctacttaaataattagttgcccagatgtgaggacaagattatatatgttaatggtagcaagaactaaacttaatcgatccaaaaccaacattacgatatgggttcttcacatatggaaggacccaaattatcaaaacttggattcaaaaaaaggatcaaaacccatacatgagaaattaaagttgaggcagagagagtgataaaaatcgaaacctttcttggagaaaagcgagggctgagttaacatcgagtcctgattggtttagataggtctgcacatcttccacgaactgagctcctggtattcctcttctttctgcaacaaccccagcctctgtggaagaagaagaagaagccattttccttcgataacgaatctccaaagtctacttcgtcgatcgttgtcgtttctagctccgattttgccactgtccttcaaggtactactctctggagactcgagagaagggcagagagtgtgggtcgatgaaagaacgggggcatcgaacgacaatcacttgtgtgtcgtttaatgtaattggactaaaggcccaactttagagttattgggctttataggcttcaagctcaatatagttgcttagggtttgcacctttgtaaattgaaaaatacctctttaatttatcaatgggataagttaaaaaatgcctcttttattaatcaattaactaaatttacctctaattttatatttatttgaaacatacatctttttatatgtattgtacccaaaataccctgaca

SEQ ID NO: 296267 - DNA, 5927 bp, Cannabis indica
gtagcttattgtgtgttatttggttttagttcatttttttttagaactaattatattttaatttatatctcatgtggttttttatttagtcaattttcaaaaaataattctttaattatctatttcaaaaacagatttttgatttaattaattcaaggaactgatttttaatttaattatttcgagaaccaatttttaatttagttaattcaaggaatcagtttttaatttatttttatttaactagtttttgtgtgtcattttttatcttgatttttttatatttttataaaataccctaaaagtatggaaaaaaaatgtaaaatttttacaaaaataataatttatgtaatttttcctttaaaaaattatgccataaaaaaacataaattcaatttttttaagtgtaaattctactttcatttactaaaataaaaacaattttaaattctgaaatacgagtgccagagtaaagcagtcaagtggcgaagtgtatcgaccacagaccttattcctctttgattaaacgaataaagctctttcagaccaaaaaaaaaaaaaaaaattaataaagcttgaacaatccgccattgaagctttttgaaggtaaacatgtcagcctctaaaaatgaaaacttgtctttccatttcatcgattaaagcttttcagtgctgcgctgctcggtttaagtttctttcattttctttttgtgttgatccctttgtctttggttttagtttaaatccaggtctgaaccatttggagtttcgttaatccgaaagatagctgctttgagttttaaaattacataccttttcgtatattttagttcttatcatccaaattgtgatcttaatattaatatttggtctcattgaattgcttatcttttcaaccttgttgcagaatttggattgttctgattggctctactcttcaaactgaaaaaaccatagttgctttcaacacagagaaggtcaataaaccctattgataaccatgagtaatcaacaacaggtaaagaaaagagtggcatttgtgctgattgatgggttgggggatgtgtcattaccaaggttggggttgaagactcctcttcaagcagcaaaaatacccaatctggatgctattgcgtcagctggagttaatggtctaatggaccctgtggaagtggggttgggttgtgggagtgacacagctcacctctctcttttgggatatgatccaagagtatattaccgaggtagaggtgcatttgaatctatgggtgctggattggcaatgtcaccgggtgatattgcatttaaggtgtgtctatataaatgttatatgtgaatagtttgcttattgtatttctatattaattatcatgtttttagtagggaaaaggcttttagtttatacttatgctgattatgcaagatttaatatgttgggcattttgaatttttcatttgttattagtgtgttcaacatagtactcatgggcaacttttgatctgcagtctaattttgcaactttggatgaagaaactggagttgttatcagtaggagagcggacaggcattttgaagaagaaggtcccgtactctgtgccgcgcttgatgggatgaaactaccatcatttcctcagtatgaagtaagagtcaggtgcaatgtttattactgctataaattttctttgaaattgattttgcttctttttaagttggtaattaaggcttttgttcacagcaatctccttttgtttttgagcatacgctatacttttttgtattttttttagtgattgcaaagaactagcttcactaactctactcaaactttgtagtgtgtgtcacactgcaataacaagttgtagcgatccttaagttttcacttaaacttgcacttctaacatacgcattacatggagcaaaactgatatataataatttcttacaggtatgctacagaacataggtgtggagtggtcgtaaaaggaccaaaattaagtggaaacatatctggaacagacccattaaaagacaaccgcttgcttttgaaagctgaagctcttgatgacaccgatgaagcacgacatacagccaatgttgttaacgagctatccaaggaaatatcacggattctaatagctcatccgttgaatgcaaaacgggcctcagaaggcaagaacatagccaacattgtacttttgagaggatgtggaattcggattgaggtttgttgtctcaaaacttgtaattgaattatgccctactgatgttaatagagaatcggtcttgtagaaatcgtcatcctttgggaagttttataaacttgtactttgtttttaaaattctaaatcctggtaaaatatttcatgttgcaggttccttcatttgaacagaaacatgggttatggccatgcatggtggctcccacaaaaattattgctggtctgggcttatctcttggcattgatattttggaagctcctggagcaactggagactaccgaacacttctaacgtctaaagcaagtgcaatagctaaggcacttgctgcgcctttgcagtcatgtccaaatgtttttgttccaggagcggatgagcacaaaccaggccgtccagatggttatgattttgggtttcttcatataaaggtatcctttactgttctacttcttgcttcttgttttctacttgcattttactaaacccataacatggtagtttgtatttaatttactagaatgaattttgagtacgttaatagtatgtcgatttgctgaaactgttaacattttttttttaatattgtaggcaatagatgatgcaggacatgataaggcaagtcttttcaaagtcaaaggattggaagctgtagatcgagctataggacagctagccaagttcctgtgggaggctgaatcaactggggaatttcagtactccttgtgtgtcactggagaccattctaccccagttgaatatggagaccacagttttgagccagtaccattcgcattatgccgattgaaagattttgttggtgcagttggattagaatccatcttaggaacttctactgatccattcccacttccaatcattgataaaggagaagaccttgcagacaacgtagcagcggaacaagaggaggcaaaaggaccattgcaagcttttgctggtgattcagtttatgagctgaatgagattgctgctgcaagaggatgtcttgggcgttttcctggtggtgagatgatgggagttataaagcgatttcttaagctagatgcataaaccactttgaccaaaacctcagtgaattatgagtggaatcaattcaccattaaaggttacccaaataagttttctcttagcttgaattttctgactaataatgtcctttaacgaaggtttgagagttttctctatttattgttcaagtaataatatgataagttgatgcaactttttttctttttcttttcccttcataattttttattgttgttttaacttttgctattggaaacctgcattatcggctgaaccagaaattaactccgaaaaggggaaataataataaaataaaatgaaaaaagaaaacattgtatatttcctttcagaggggctagactaacaagggtctaatgtatcattctttgataggctgaatatgcctgatggtgctttcaataatgcatttcagttatgtcacaaaaggaggttgctttatctatttgaaattaaaaaatagagaagaaaacagacaaaactctccgtgctaccaacttttgacatttgtattgttttctcttgtcacatttgctttatttctcattatgcaaaataatatattcattaataaagttttgaatgatctctatactgtgtgtatgagatttctctggaaattgtaatgtgtttagcaaaacaatattgtttaaacatactacaaaaagaaagtggtgaagatcaacaaaagcaaggtagtctttctttttcttttcccctatctactttaactttattaaatgaacaccatttctagcctcttgaaaatatatttctcttatgaaaagcagtagtgtttcacgtacatggtacaacaaactccacttcctttcttaactcacaaggaaaaataagcttataaacttcagagacagaagaagagtaaagaagatcaactatgtatgtaactaggcctctttccatgtacaggaaatctccaagcacccttgagatgaaaccgcctgatggaccatattcaggccttctggttattacagatgaagaagctgattcacaggacatgctgtgttggggtcaatggggtctgtgtggtatatgcaagcgtaagagtgtcaagaagcttccctttccacaggataagattttgtcgattgtttatacatctgagtatcatgaaacaacaaccaccaacgtctggttcatcccagttccagatcaacctctctcctccaactgctactatgttatcagagcaaaaggcagacataaagggtaagtccatttcttttccttcgggtttttttttcctctttgtttgccgtagcttatccttatatatggatttccagagaagaaaagagtaaatacccttttgaaatatgctctcaattttctcagccaagtcaccccaagacataaccagacaagacaagattattcattttcaaccaaactttttgtacataattctcaaacaaatagcttagagttgttttcttcttctgatcttacagaaaagcatgcacgtgttcaagagagggagacataataaactgttgctttagagatgtcttaagggacaaaaagccaaagcctttaaactttaaaaatgtataccaacaagtaaagatctaccaccatcatggtggtggttttttcgccaagtcagtggctccagatggtgttcctccaaagttcctaagaacaaaaggttggacagttcatagctcaagcttaaaccgtttacggctaagcgaagctttgggtttggaaacctctcttcgggctcaacttcccaacttcaagttccccatcttcaacttccactcatcccctgtggtggttggaaaatggcactgtccattcccttttgtcagagataaaacaagtagtccaaaaagccagatgaaaaaatcaatcttttacactttgacccttgagcaatggtgggaagagatattctcatgtgggaatgttgaccgcaacaacaacaacaataataataatcaagggaattcagtgattgtagatgcttatgtccaaagggaggtgtatttggtggctggaatggaagctgtgagggatgacagaagtggtcatggtgggttttcttggttcaaagtgtataacccaaatggaagaagaggggtggtgttgagtgtgggagtgagttctgccattgctgaacatatgaggtgggttttggatgcaggtggttgggttagtggagatgaaagagaagtgaaggtggagagagttgaggagaatactaatggaaataacaggtggaggaagtttgggtgttatgtgttggtagagagcttttctttgagaagattggatggaagtttggtgctcaaatgttcctttaggcacacccaaaggattcaatgcaaatgggaataacatatcaatggttttagatgtatagatagtttatataagatcccttttatgcgtgtaataatactttaatacaacgttaatacaatgtaaagaaagacgctgacaataaattgatgttagaatgcgtgagtgtatggttaaggaagtaaggaataggtgagtgtggtaaggtgcatggagttatatttcaaatgtctttttaggcacacccaaagaattacaatgtaaacaaagacgctcacaatgaattgatattagaatgcgaaaatgtatggtt

SEQ ID NO: 296268 - DNA, 1466 bp, Cannabis indica
cacacattagcaatgtgggattaactcttaatacacccggcctcctcacgtttaggcctggaaagtgtgggtacaacgaacgacctttaagagaccgcgggaccgaacgtgacatttgaaagaatctcacaaagccaaatattgaaaaatttgtgggtgtacacgtcggaaaatttatggattttaaaacaagtcaaagacccaacactaaaaactgacacacattggtcgaaaggtcccaaatagaggttaaaagggaaacaacataagtatctgtttggaccggcgacactttggctcataacggatcacaaacggctttttagaccggtggaaatttgggctcataacggatcacaagtggctatgataccatgttagaatttggaaataacaagaatgaggttctatctcaaaaccaattggctgtgagaggagtagctcagtcatcttatatattacaatttatttcgacgtattagcaatgtgagactaattcttaataatatatatacatatataaagtatctaagttgaagcatgcgggcagatggtcctctttccaaattgtctaattggtcccctttttctagcttagatcggtagtggctcatttgtagggtacgtatatgttttgatgagctagctgcacaactggaacattttgtcatccatccccaaaagccgtggtgatgattaatactactagagagtatagaatattatttgtaatataacaaattaaataatattgtatgcatgacactttgttttttatatatgtcaatttggttttttgttcctcatatatatatagatatccatcatccatatgcatggtttcttcatgggcaaatagaacttttataaatatatatatatatatataaatatatatatatttatataaatatcttgctctctctcggtcgatctatcttattttcttttgtttttattatgtactcctcgtgatatatttctgataggttatttagatatgtgtaaatacataaaattgtattggaatattatatatttatgtgtaggtgattatgaatctgtagttattattattaatggaattcatgattttgatcttcctttcaaatttcaaaatttgatttgttgtgttgctgattataaaaccgttgttctgcttcttcggagcataattaaagtgattcttgacacctccaaatgatgatattcaaagagtcaagcatatctctggttttgccaacagtaatatatatgtcttttagatacttgtggatttcaaatatttcttttaattacactgctacgattaattgaacctttactcatactttttatagtcctgcacaaaaaatgtgggttactaaatttttttagagattttaattagtatctgatcacaatgtgtgggacactaaaaatataaagacacggcctatttttatttatttatttttacttttttt

SEQ ID NO: 296269 - DNA, 1397 bp, Cannabis indica
catttattgtgtgtgcatgtggtacaaatgtaaaaaattaaaagaaaagggtataaatgtttgggtaaccgtgtagtggttttttgataataaaattaatattttgtatttttaatataaaaatttcttttttaaatggttaatttatttttataataattattaaattaaaatcgttgagatgattattaattgtactaataaggtactccgaaccaaaccattagtatttctcttttataaagttttctacttggaatgtaagcaattactaagaaaaagtttagtagatgacaaaaggatacgtcacatgcttttaaacaaagcacattcttgaagaattctccaatgaccaatcacttcggtgatcaacgacgacaatttttcccacatttgtaaacatgtgacatgagaaaaaatgataaatatatgagaaagtgcatttttattggtcaccatcaagcactttggtgccttataactggctatggatattttttaaaatttattgttttaaattgtatagatatgatacttaattatactaatagcggtataatactgaggaagatattagacactagtagtattttttaactttttttctaaaagacaccatgcctacacttttataaaatgtaatatcactataagtacaatttaatatcgagttccgcttattttaatttaataaaaatcataaaaaaattactagccaattagaaaacattatgttataaacgtcctaagaaacttagtgacccatactaatgtcctaaatagagaaacgctaaaaggtactagtggtgtctagtactttcctatatgtcattatcgctatattgatttaattaagtatagattcctatataatttaatataataatttttaaagaatatcactagtcaatcacaaagtgatatatttaaaattgttaggtaccagtaatgtctcgtagcaagctcttagtatatacatatagtgtgaaacatatgcaataaaaaatatattggtctagcttttgaacaccatgcgttgttttgttggaccaacggccccatatatagttacaactagtaaatgtatatctatcttcttgagaaacgaaaagacgccctcttaattatagcttttcccttatttggtttggtgcatgcacatatatacttgactcttcctcttcttctttctcattattaattaattaatttatatatatgtatatttataaagctcatacgataataaattaaaagtgagaaagagagatgggtagtaggagagcatgttgtgagaatatgggactgagaaaaggaccatggacccctgaagaagatcacatactcatttcttatatccaacaattcggtcatgcaaattggagggctcttcctaa

SEQ ID NO: 296270 - DNA, 1386 bp, Cannabis indica
agagtgtagtagtctagtgtagtgtagtgtagtgtagtgttgtacagtgtgtgctgtgcttctttcttcttcttcttcttcttcttttttctctctcgtggcctcctaatcaattacggcgcgccaagtggctgtctcttttgtcaagaaagtgggaagaaataaaaaaacacgtgggccatttctaaggctcaatttctctgaaaaagggattgctgaatcattattaagtactaaatattcaatgagcttatcattatatcactttccttttgctttcttacctcctctactctaagaacgcctcaacatgtttggctctaggctattctaaatcattgttatacttataaatcataagatatggtcatataaagcagtttaactcctatatatatatatgctttatttttttttccttctttcatttagctgtaacccccgctccctcccatcttttttttttctttgtcttttatatgtctacatttatagaaatgacaattatataaaatcatagtcagaaatttatcacaaatatcccatatttgtattatgtgaattgcaacaacttgtatttctattgatgaaaatgatttgcttatgacaaataaaagacaatttaaacatggctagctatgcttttttggaattacatgcattcaaataaaatacatgcatgtagtggtaatttatatttttttggctcttaaagggaaaaaaagaattgcactttcagtggaaaaaaagaaggaagaaaataataataagaaattgagaaagaggaatgaatttgacattttttcctccaaaagggtccatgatcaattatccttttaacgtatgctttggccaactttaagtataagaagaagtatgtggcaaagtaattgtaatgaaaagaaaaaaaaagagaagagtactagagaaaagaaattggacaaagtttactacaaaagaaagcaaaaagattgcctagaactaattaaactttatatgtaatcttcaaaatatataatgtaacctaataatcttgttaattagtttggatatataactccgtatatcttattaaactagccccctagctagcggatgttgaactttgtaacgtccccgcttcaagtttctattgggcccttacacctacggaatgaatgtctcttatacacgagtacgtcactctggctacttcatggactgatgactgaccctacagaccaacacgcatgtttccagcgtggtttgtcctcactcgcacgcttcctggaaaaacttcccaggaggtcacccatcttcaaattactccaggtcaagcacgcttaatcgtggagttctttcgtgatgggctaccgaaaaacaagatgcaccttgtttatataggta

SEQ ID NO: 296271 - DNA, 6363 bp, Cannabis indica
tttttttttctttcaattcataatgcatgccttttacgtgagtttttgctttttaacattgtacgtcctcttcatgcatagttgtgctattattctttcaatgcttgtattaacacacattcttgctattctttaaatgcctgtggctgacacgtattcttatgaattgtctaaattctcttaagattagtttttttcctctaaagttatgattatctttctttaaactctactttatcttatctttctttgtttttttatttatgggattgaggtatgatttgttctgccttaatatttttcctaatttatcttggcacgtttcgatcttagtgaattcttgacttatttcagcacagtgtcgtccttggtctatctcgacttggtttctagtgctatcaatttcttgtatctcgactaaagcttttgtattaactttgggtgtgtgcgctttctctacaattttgtctttaattattgaacttcttatggatttttcaggctgtgttttctcttttgtttgggcttaagtcttgtttaatctattgggccttaggttttaatccttatttatttattttttttatttaagcgttatatattacaacaatgttttagctgagactcgaacccaagacttctaagacacacacctacctatggccacttgagatagcctcaagtacttaaatttcttataaaatgatgcttttaatttttaccccatctttacattatttttgtttgtctctctctaaattactgggttctttcattttactagttcactactttggatcatggtacttcctctgttattaggaaatagaatcaaatctttgtgtaactgtctgtgctctcaacctacaattttaatccttagttcttaaagttgaaagaattatttcttctctcccttttcttagtatataatagaaaacgtggacaatcgaagcatttcttcacaaatctttgactctctcttttcgagcactgctcctatttttgttgaattcatattagtctcaagttctccttccaaggaaggtgttgagcacactgagcccattgacccagaagtagagtgtttgggtagtatttcatcaatcccttgctctcgttttggagagggggtaggtgtcagcggtgaaactgcctctttcgaaagtgttacccttgcgattcctcctcaaaggaaatcgaaacataaacaacctactacgggtaaatgtttattggaacataagctaaattgttcttcaatcttaactcgatcgaaattagattccttggtattcgtttgtggtttttcccagggctaacgagaaagctgatactccccaaatggagtgaaacttagggagaagactagttggaaagctgaccgaaacagagtgaaggatagggagaagactggttggaaagctccccctgaggggcattgcacgatcaattgtgatgatgctttgaataagggtcgaccaggaggcagtttgggtgtaattattcaggaatcagtggggcttttggttgcggttggggcaaggtacttttgtggttgtttcacagtgctgcttgctgaaggtctggccatccagacgggcttggagctggctcagacactcaacatcagaaattttgcagtggcttcaaatagccaaacattcattaatcatcttaaagcgactgtggtcccttgtgcaaactggggggtccgatagcgcagattaaagcaagcaagctcctagacgattgtacaaatataagttttaccactaggaattgtaatcaagtggctcattctttagctaattgggctcttagtcataattgtaatttgttttggccagaggatttattatcttgtgctgttgcgcttttaagagcagataagtgtaatgttgtgtagtttttcttgtttaatatagttatttttttgaaaaataaaaatcaaaaagtggttaaaatttgtacataaaattgaaatatttatatgatattattatagtaatattaaatgctaaatattactgatactaattaaaagagaaaaaaaggctaggatcttagctctatcaaaatacaggcgaggcaagcaagtatatgttttagccaaaattcattataagggtcaattgaatgatgctacaaaccaagcagaggtttatctcttcaagaaaagcaaaagacagtaactcattaggattcactactaaattcatgtggattcacatatcatgatatcaatgaatataatttgctagtacaagactaagatgaactattagttaccaactgttctcttctcattgccaaggaacctaatccatcttacaagtctaacactatcttagctatatgtgggactaacgaatatggacaaaagaaaaatgctttcgagttcggatcattctagctcagatgcgattaacaaatgaatggaatgtacaagatttgtttgatatttgtaatcgacatgtctcgcttatctgtacacatgaactaaaataggccacaggtcatttcgaaggggtcccaaattcccaagctcatttttggacctatgatgcaaaaaagggccataaatcattcttggccatctaaattgattatgtggtttaatattgtttggcaatattaccatattatacggcaacaggttaatagaacagtgtagaccgaaaagccaagtcttagctcttttcactgtgtaaacagaaattccaagtcaagcagtctttttcctatccaagattaaagtctgtcttacatatagacaaacgcaatttgcatatgatcttttatgttttaagaatctgatgttgattggtgcgagtgtgctttcccttttcaaaactagtacaaaatcattacctcatcaccattttgaaccttggtttataaaggaaatcaaagttgttgagactaatttaaataaaagtaaactttcatagggtacacaaacaaaaaaaatgcttttaatctgattaaaatcatttttgaatgaataaaatgaaatagtaacatatagccagacagagatacaattcagaaagaaattaaaagtcgaattagtttttgattacaactcagcattgtatttaaaccccaaacaaaagctcaatgggcatatatccaaccgaccattcttcttctattacaatataaccattagaaacaaaatcctaaatgattgtcaccaaatgacaatagacacaacaattcaattgtctcgacaaaaaaagaaaaaaaaaaaaaagaactagataatattcacccctgcatccagaattgattgtccacaaaaaggctccacatagggattatgcctataattcgagaaatacaatttagtataacaaatattcaacttttagaatatgcaaaaaaaaaaatactattcaattttctgagttcattattatgtaagaggagatagacgtatgagttacttgaaaatataaaatgcaggtgaaataagattctggtcaatggtcattattacttgagttttactaatagtgtgcaatttgaaacgatgaacacacaaattgataataagattaaaggctgaccttgttggcaatgttgttggagagccaatccagaccctcgtacaatccttctcctgaggttgcacatgtgctctggatgtacctggaaaattgaacaaatattagattctgtagtgtcgagcattgtgtaattaaacgaagtaatgatgaagattagatggctaccagtggcgctgcctgagagaatgaagaccaagcttatcagtgatctcagctgcattcattgcgtttggaagatcctgtttgttagcaaaaacaagaagaacagcatcgcgcagctcatcctgtagaatcagcaaagcaaagtaagttattcttcttttaaatgagcacttattttgtagagaaaacaatatgtaaatggaaattagcaaattgaagaacatgcagtgagcagaaactgataatagcatacaataagtgggcattttataatcatttctaaactgctgccaacaatataatgattttcaaataactaaaacagaaagacagtcctttatacataagtagtcattcaattttatcaattggtaatgcaaactaatatataaaagcgattgacaacatacctcattcaacatcctatgtaattcatcccttgcttcaacaacacgatctctgtcattgctgtccaccacaaatatgagaccctgtgtgttttggaagtagtgcctccacaagggacggatctgaaatggaatatgcaggtcattaactcattatttccagagcaacataaagcatagacaatgttgaactatcaatcataagggcaactaaagcattagaaaatgaacaggctcataaacttgcttttatggctacttaaaggatgtgtaaacaagcatcaaaagttcataccttgtcttgaccccccacatcccaaactgtgaagctaatgttcttgtattccacagtctccacattaaaacctgtgaaagaaggattgtaattattacttttgtcaatcagtcgtaaaaaagaaaaaaaaaaccgccaaaatcatgggaggaaagtttatatcagcattcaaaatgttaaaaatagattctgatcaaactgcacagcttaaacacaattactttaagatcttatatgtgaaaaaaacaaggcctctgaaatctataaaatagttagcatttatatgttctattgtgttatttggaaatttatatatcctacatatgcaaattatcattagatcacagaatagcaaaactgaaaatctcactctttgaacaaacaagagagagcaaaacggacgagcacttgaattgagtcaataatacgaatggaagaactcaccaattgtaggaatagtggtgacgatctccccgagcttgagcttgtagaggatggttgtcttaccagctgcatcgagaccaaccatcagaattcgcatctctttcttggcaaaaagccggctgaaaagcttggtgaatgtcagccccatttgttttggctgttgatccctacacatgtcaacattacattagcaaacacgatacactcctaaatcaaacgctgccaaacaaaataactattttcttgtgacgtgaaattcaaccagatgcttcgttagatctaatagatccgaaggtaacgacaaatctataaccaaaaagctataaatcaacatcaaaacatctcggccacaaaattatacatcaaaatatccattataatcaattcaatttcaatttacatcaactccaacaacagatcgtataatctcaacagatccaagaaactaaaccattttacctaacgatccaccgcagaattcaaacgtacaatacagatagcataaatacacattcattcagacctttttatattaacaaatccactaaattataagagaaactccaaacttatacatacaaaatgcaatcgattccagaactacacaacgcacaagaaaatctaaacaaagcgaaaaatgaagaataacttgtaaaccaattcttgaactagtaatgagcaaaatcgaacgaaattaagatcaatctgaaaaagaagaagacgtagagatctgagattcaaagcattttaccttctctgtagagatttcgcagagggatctagtgagagaaagcgaagagagagaaagagaaggaacgaagcaagcttcagaccaacgcgtaataaatggaaatggaatgagaagaaagaattgtcaacttgagcgcttttatatcggaaaaaatactaccaggtgaggtattgtatgagcattatgcccaatgaaattaccgaaatacccccaagtcagcttacgttctaagcgacatcttacactacctttccaaccagtgattgccacgtcatcgcaagggcgccacctaagtcgtggcttttgttattatttttttttaaagctatttatttattaattaaaacatttgttttattaatttcgccgcttcaaatttaaatggcaagagttaataacattcataataattttttcaaaatagataacttttaaaattttaaaaaatatactaaaaataggttagttttattttttcaaaatatattatttatgctctatatatgtataagaattaatttgcggtataaatacttaagtttaacttgtaaataaatacaagtttaattttttacgataataatatgtaagttatatttttgtaactgtgtagtaactgatcgttaaatattaaatcattatctacgtgttattattttattggtatatttaaattaatttttttttaaaaaaataaaaatttaaccgacttggaccaatcaagaattg

SEQ ID NO: 296272 - DNA, 2868 bp, Cannabis indica
gatattttttgatatttttttaattaggtagttaaattaagcatataaatttaaatttgtgatttcattattcgttattagatcaaaattcgatagttatatatatatatatttaaccaagaaaatagatcattcattaactttcggcaagtacaatggaattaagagcagccgaagcattaagctcagtaaaaatacaatctgacataaaacaagattctctagaaacacaatgagcagccttatttgcaaatcgcttaacaaaattcaaagaaacattataaagagtggagattaaagagcgacaatcatccaccaacattccaaattgtgatggcatctgaacagaactgttaaccgcttgtaccaccatcaaagaattagactcaataaaaataggagaccaacttttggttttgatccaagataaagcttccttaaccccaattagctcaacgatttcaggcttaactgaaccaatacgacagcttgaaattgcctcaataagattgccatctgaactgcgagctacacaaccaaaaccaaatttaatgttcccgggcaaaaaatggcaccatccacgttaaccttaatcgtatttcacacaggtttacaccaatgctcactaccggtattagcctcattaactaataacgcactcgatttttgggattgaggaacactccaatgactaaggacaatacgcgccgatcgaaccacttcactagctgaacagttttttttgattccaaacgcaacccatttcgagcattccatatcccccaaccaacccatggcagcttccatagcagcagtagctgaatttttttgccataacatcaaaaaaacaagcaaccaaaaactctggtttatagcagtaggtgaaggcagaaattgagacaatccaacaagcttgtgcaaatcggcactcaagaagaacatgagaaatagtctcatttgcaagattgcagaaagggcaagcaagatcaacataaacatgttttgagttcaattgtaccttagtaggaaggcaccccgagattgctcgccaaagaaaatggagaaccttaggcggaactgccagctgccacatattcttccagccatcaacctcatcttgcaaagaccaagcacccttatttagttgatgtagcttatatgtactcctaacagtgaataaaccagaaggttcctctgcccaaaaccacttatccacatccaaggtgtcactaagttgaatagagagaattaaatctctatctcgaggattaaaaagatcatttaatatatcaatctcctaagccttattatcaacaaccatgagagaagatatattatgacccacaagcccttgatgtgttgaagttacatatggattacaagagtcaggcagccacgggtcactcaaaatactgacattgtgaccattcccaattgaacgccttgccccagctcggactaagtcttgagctttgaatatactccgccaaatgaagctaggattttgtcctaatgtagccgataaaaagctcccattaggataatacctagattgataaattctgctcacaagagaagtactattggacaacaacctccagccttgttttgctagaaaaggcagattataatcccgaagatcacaaaaaccaagccctccaacattcttgtgacgacacattttgttccaactaaaccagctgatgcctctacttgaagaattggattgagacttccaccaaaatttagacatcatactttcaagatcagaacaaatttctttagttaacaagaaaacactcatagcatagcttggaagtgcttgagcaacgaattttataaggacttcctttccagcttttgataaaaaccgagtttcccaattaaaaattttcttcttcattttctccttaagaaatccaagaatcgcatttttattgcggcccatgatacaaggcaaccccagataaagactattctttgaagcctcaaccattcccaacagattacacatgtttgaccgaacagccacaagagtatttttgctaaaaaatatcgaagacttagcaaaattaacttgttggcccgaagccctctcataaacattgagaagatgaaggatattgttagcttcagcttgatttgctttacaatacacataactatcgtatgcgaataacatgtgtgacacaactggagcacctctagcaacacggatacccgaaatctgacgggactgttcataagctcttaacaaagaagagagaccttcagcacatatgagaaatagatacagagataaaggttctccttgtctcaaccctctcccaggataaatcgatcccatagtatgcccactgtgtgtaatattatacttgacagtacgcacacaatacatgatgagagaaacaaatcttctgctgaaccccattcgaatcataacagctttaataaatggccattcaaccctatcatatgccttactcaaatcgagtttgagggccatataaccctctttaccaactctcttccttttcaaatagtgcattagttcaaaagagatcatgatattatccgaaattaagcgccccagcaagaaagcactttgagtatcggaaataacagccggtaaaacaccttttaatctattcgccaacacttttgagacaattttatagagaacattgcacaacgagataggccgaatatcatccataaattcaggttgtttttctttgggataagcactagattagtgtcattcaaagatgggaaaaatgaacctgtttcgaagaaactctgaaccagcaacataacatctgaacccaccacagaccagaacttttgataaaatcctggtgtcattcc

SEQ ID NO: 296273 - DNA, 7175 bp, Cannabis indica
accaaaaaaaaaaaaaaaaccgaaaagaccaaaagccccaacttcttacttgagagactctacactctctcttatacgctctcacacacatcacaagcttcacctactctttctctctctttctctgaacccagaaaatgcagacaatcggctgaaaagtgaaaacccatttcaagatttggcattctggttcgatttcttgaatctgatatgtgggtttcttcattcttgtggttgtgtatgtgaagggaggtctgtgagtggttttgtttagctgaaaagtgaaaacccttggtcttggttggtcttcttcttcttggagagggcaatgtgaggagaagcagtgtttctgaacagagaaggcctatgatggtggcagccatttcaggagcaacagcttcaacaaaccctcaaaacccaaagacatcttcttcgcttcgtcaacaacaacaacaacaacaaggacaacaaacccatcttcaaaacccatcgagaccacctctcttaccttcagagaaaaacaatggcgttcttcccaaaaaaccaagaggtagacaagtttcttcaaggtacatgtctccttcaccttcttcttcctctacttcgaattcaaccacatcgtcttctacctcttctcggagatgcccttctcccttgctctcacgctccaccaattccactttggtttcaactccgttgaactcttcgacgccgaagcgggctcaatcagtggaccggcggcgtcccgggacgtctgcccgctccacgactcctctcccggagtccaccaggcaaggcaatgccgcttcggaagtttcagcggcgagtaagcttttggtcacttcgacaaggagtttatcggtttctttccaaggagaggccttctcgcttccgattagcaagactaagacagctgcaacgccgagctcgcgtaaggctacgccggagcgacggcgttctccccgtaagagggaaaatcggcgacggaggaggagatcaggtagagaattccaggcctggggatcaacatcggtggcctgcgcgaattaggcaagggagtttgaatttgggtacaaatccgatgtcgagaagtgttgattttggcggggacagtaagagactcaatgggttcggatctgggagtgtggttcgggcattgcagcaatcaatgatagatgagagtagaagagcctcctttgatggaagattgagcttggatttgggtagtgctgaggttttaaagacagttcagcaaaccccagatgctaattcagtgaatgagtcttctgtgccttctgatcttacagcttctgatacggacagtgtctcgtctggtagcacttcaggagtacaagactgcagtggggtttccaagagccgagccgggcctcgtggaattgtggtgtcggcgaggttttggcaagagaccaatagccgtttgaggcgtttgcaggatccgggttcaccattgtcgaccagtcccagttccagaatgggagcttcgtccaagtttgctcagccaaggaagttcggtgataccccattatcttctccaaggacaatgtcttcccctattagaggagccactaggcctgcatcgccaagtaaactgtggtcttcttcttcaacaccatcaccatccagaggaattgctagtccttccagggtcagaagtggagcttctgctcactctaatggtagttaccctggcacgccttcaattctgagtttttctgtggatattcgtagagggaagatgggggaagatcgaattgttgatgcacatatgttgagacttctgtataaccggtatctgcaatggcggtttgtaaatgcaaatgcagatgctaccttcatggtgcagaaattgaatgcagaggtacgtttttacttttgttatcgcttatatgattttagttgttgacatgttcaagcttgatttaatctgtactcctttattatttcgaaagtgaccttctgttcagcagaggcaatggcatgaaaattctgtagtgtagtttaaattgttggtatggctgattgtgtaggtgcttagggctatgttcatttatgtgagttgaatgactttccagcaagaaagtggtgaactataaatcttaggctaagttcaagttgtgatccaggcacacatgttgaaaggatcgattagaagagggagctaataacccaagtgtactagaatgctatgcagtagatataaggattttattgtagagtgtctatgtaggttgcttttatcttaaggcaagatgtggtattaacaaagactagaaaaatgatctggaactgtttctttctttttcatcagttttcattttcttttgagctttttcttgcaatttgatttgtggtgctttttaggacggggttggggaattgtccactctcatatatatggctagttggtgtattcaatgccgttttattataaaaaaacaaaattctacatatggctataaatgtgtttaaattactagaaaattcatgagttcttgtttgctgaactaattaggggttgttggtaaacttgtatgaatcatctaccaagtaacatatgctatatatggtggtattatagcgaatctttctgcgaacataggctacttgtcgagtatgcatacagtgaaccttaatttgtgatggtaatagatttttttgattcttgtctgaactatttagtcccataagaaagttaaaataaataaaagtagatgaagaaataatgtcttgtgaacttgtgattttgttagtttttgataatataatacttgagcttgagaacatgtctgactgtgcccaacatagaaacttacccataagtgacctctatactttattcaggctgtctctagatgcttatgtggttttatttgacctttataacacatggagaatgagccagtggttatctgctgtataatgtatggttttgctgtataatacatgtttttgctttgtatctcatatgttgcatttgcttagattagatttgcatgtacgtgttttgaagtatggaaaacctttgctcccactgcattctctggctctattggaggcaatgaaataaactacttgttttgctctatagcattgttgggggttcaatgatctaatgatattttttttctctttttggtaacagaaaaatttatggaatgcttgggtaacaatctcagagttacgacattctgtcacacttaaaaggatcaagttactattgctgaggcaaaaattgaagctcacttccatcatcaagggacaagtatgattcaaatcattatatgtctcttaatttaattggtggtttataatcacttaattcctaagacacccattgtctaaaaaatacaagtttctgttattttatttatttatttgaaagaaaccagtttctgttatttgaaatggaggaaggctaaaagcttacctggaagtatcttcacttaaaataaaatatattactaactacatagggcttaagcaacaaaccttttaactgtagtagaaatataatcaggacatttttcgtgagcccaccttgtctaaccatatatggtttttttttcgaaatagagtttagcaatacatgaatgcatatgtggttatgattggagatattttagaaccaatatgcaactgtgtctaaacttgtattggaacatggcaacagggaccaatatgctattgtctctaaacatgtatcggaatttggcaataatttgagagctagcaaatgtatttacacattgtaattatttattcttgtagctgttatgttggagttttatcatattggcaactcttagtgcaatatcgtaggagcttagattgtgtattctgatatcctgatttagttggacagctgactcccccttttgtatcgatacacacacactcaagatattgtggaagcaaatgcaaggatttgaaagcaatttcatacaatatttttgtatttatatataaatacatatttgtatgtattgtaataattatacagacaactatcttggataattgtttacttgtgacctttgctactttctcggtcaaatgatgttctttgctcataatgtttattttactttgtggatgtagattacttatttggaagattgggctcttctagatagagatcattctagttccttgcttggagcgactgaagccttaaaagccagtacactacgtcttccagttgttgggaaaacagtagtatgtcttctttttgtgcttctcttctcttttctttgataatgagatattaattctaatgtaaaaccttaacatcattctgatggaatgctttttctattccaccttatcaggctgacattcaaaatttaaaggatgctgtgggttctgccgttgatgtgatgcaggcaatgggatcatcaatatgctctctttctctcaaggtaatttgtctttttcttttcttcttcttctgaatgtttactagttacaacaattattactttgaggagaaaatattatgatttctggcaaggcaccaaagaaattttatacttagggtgttatctaaacataacaacaaaactgcactaccttgaattttatgtgatgtgaaagagttcttatgactttggtatccggagtatgatgaaatatgaatatttcgttgcctcatttttagagtgatatttctgcctgtttacagaaaacaggcaaatttctgaaacgaagaaattgctctctattattttcttgctagtttttgaatctaaaagatgaagaatccttgacataaagcgtaaattgattttcaatttataaagataaagaccatatgatccaaaagttcacatattctaaagttttatagagaaaccacagttgatgactatggaggaggtttcttttagtatccacatgaaattataactcagtacattttcacatgcactaacttacccactcaatcgttgagctagcattaagtgtcacctgtcatgacttttgttgtcatctacagatggaggaaatgaactcggtggtggcagaacttgtgaaagtaactgggaaagaacggtttctgcttgaacaatgcaaagattttttgtccactgtagcagccatgcaggtaagtgtgccttatattaacttcctccaaatctagtgtttggacccttgaaagaaacataaataatttttcaccataaatggttgggacaggtgaaggattgtagcttgagaacgcatataatacaactaaatcgtgtaccaagtacgagcagcctgacaacacgtgtgtagaactgatctgattttgactacgactcactcttatgctaacattacaacaccatccatttcttttaccactaccactaccactactacctaccaatgagtatgaggaggcagcactggcaggtaataagcttgatggattaagatttcaagtcattaagaggtattattactaagctggttttgacttctcatttggcatattttttttttgcaaccttttgtggtcttctctatgtcaagtcatgtatcagaaaagggaaaaaaaataaagaaaaaagaatggcccctttctttatttcttacaaattagctgtattatacaagaacactgttttccttgaggcaagaaaatgtatatgtatataatgtaattgacctgatcactattgatttaagtagtttgtgccaaaatttctcctaaatatgctgttgttattctttctgactacacaaaaccaatctattgttactcaagtgttgttattattaagttataagatgattgttataaattcctacttcctagtttagttggttaatctgaaatttttgcagggccacatcacaaaattcatccctcaccattaattactgtcatatattcagaattatattttgctgacacttggatgatgttgttgcataatttgttttgttacttttataattattggttgttatggtctttgtgttgacttgttgactagtttagtcagcgacagcacacgttgatgttcctgtacgtgcggcggttgaagcttgttagttagtcccacactactttccttcactcgatccattaactgctcttttgttcggtctctctcaggccacaattttacacctaaaaatacactccacatcttcatgaccgactttttttttcttcttatataaattttacacccatcaaaataaaacaccatgacatttatgggagacctcaacaatcatactgagacttgagcttgaattatgaaccaattttgccgtaaaatatgtgtattttgtaacaataatcttcttagtttattagttaacttagtttattttctgggtttgtatatttacttaaaaaaaagagaaaaatatatacatgtagtctttgtagagagagtagggacaacatgatgtcggatctagttagtaatggacaaaatatacataatctattttgtctccaaaaacaatgggtattaacaaccattaaatagaatataatagcaagaatattgtacttagaaaaaagtgtataacttgaaaacaaacatatattactatttgacaaagaaaagaatggtcatttttattatttttgtggtacttgtttaggtcaaaaaaattgaacatattattgatgtgaagagaaattggagttgtttgtaggatgacgcggcgacccaacattgacttaacactccccactaactatatattctaaaaaatgcttatgcatagcaatagcataattgcataaacacactactgcagccttggtcgcaaccatctatacaaatacaacaataaattcttatcaataaacgacataaataagtatattacttgtcacatttcattttctaattctatcatgttgccactacttcaatatactttactttagtttgatttgttttgttgcattaatcaacgttcattttaatgaaagttgtctaattattataacttgagactttattatatgagcgttattaatattattaagccatactatcataaaatagcttttagtaaataattaatgtttaatttttataaaatacaaattagatgaataataatatgacatctcttgagaatataataattatgctcacccaaagtattttttttttagcatttctcatattatatat

SEQ ID NO: 296274 - DNA, 1808 bp, Cannabis indica
  modified_base (33)..(33): a, c, t, g, unknown or other
atgtactaaaccatcatttccaaactttgatanctaccaaatcgtgcccctcaaattttgatatgtactaaataatgctaccctgaactttcatccatgttagaatttttttactaaagttagacaaaagtctttaaatttaacaatcttaatagttcagggagaatttttaacgatcaaaaaagttaaaaattgctaattagccaaaaatgaatcctggaataaagagggaaacaaataaaatatgtaaatttatcaacaacaaaaaaatgtgtaaaacttgactcaaaaaaaaaaaatgtgtaaaacctaccaaaagtataaattacaacagtatttgccatttggttttaaaattagaataacaaacaaaaacaaaaaaaaaaaagacaaagaaaacaaattaattaaatgtaatttagtagtggttagccagtacaaagaatatgattttaaataagaaattcaccaattttaaaccattaattaccaacccacctaattaagataaatttgtgctattttcagaataccattaattgcattaatgataatgaaattcagaaatgtgtacttctaatattaataatggtccattgaactctagcaactgtactccaatgattccaatccaatacagcactctactatagtactatacctaatattcattggacatcttgtataatttttttcaaccaacaaccacaagtcactaaaccagcaatcacagttggaattacaagcaagcaaacttgaaatctgaccccataccagaaagaaagggatcaaataatatagaagattgttttgaaaaaaatccaatctaacatgttatcaaaactcaacatgggctccctagttttagaaaataatcactatccacagccttggaaagaagaataataatgacctttaaaaattatagaccgacaaattgtctaactaaatctttgtactagtgatcaaataagttgcactataatatgatgatgacatttgttatcattattttattttattttagttttagatacaaattaatttgctagccttaagtggtctcacaaagagcagacaagagcccagagctgggataccatttacctttatttatatgtatatgtaatatgtatattatggatagtaaacgacaaagtgaagatactatttagtggggattcagaatattgttccaagggaagaaaaaaatccatcagaaaaggatacaaatagcctggtatttaaaagcccttttatcatattgttccattatgatcaccaactaatactaaacctttcatgaccattatcagaatatatagtcaacaaacaggggccttatttacagagaatcaaattgtgtagtccactctcgaggcacatctcatcatattctgccactcattccagctttattgaggttaaaagagaaaagattgtttgataccaagcatgaaagataagttgatcacaatcaaattatacagaattgaaagatctatttgctataattttattgaacaaaaacccaaatgggcaaaatctaaacaacaccatcagtcctcacagtaagattatatggtacaatctaaaataaatcactagctaagaacatagcatatctcaaacaacacttcacaatttggagtcaaaaggctactatatttgttaaagcaactgattaacatgtcatacacaatttctcgatgtatttgtgttagaagaactcaaaaggaaaaaaagatgtatacagttatctttacacaggattaagaagaaggggggaaaactgccatatagaaaaa

SEQ ID NO: 296275 - DNA, 5997 bp, Cannabis indica
cccgagatcttccgctcaagaacacaataaaacagtagcaaaacagtaggaattgtatattaaatgtattgagaaatccaattacaaaagataggagcccttaggctcctttggtgcaattagagtatttactcaaacattgcctatccaccaatcttcctaagtattctatatatactattgtaatctcactcaaacactcttcttaatacaatgacccaattacccttttatttaatatatgttagaacactaccctaatcctaggtcctaacattatgtcactggaatgcctcaatatagttggcgaaagtgtcactgtcaaaatggatatgttaatcacttcaaattcactttgttggcacttatgcacacattttggaaattgaattgtctattggggaaggctatgtgtgtcaatgtttctatattacacaatgtggtggttgttgatcatttgtaatcctttcagattgtaccattgcatcttcctcctggggatacctcaacagagagaaatgtgtatatagatggatcagaagaacaaattgattcagctaaagaattggtcaatgaagtaattagtggggtgagtccacaaatgaaccattggatacttttatgatatacaacactatttatttcaaataatattttatatttcagtctttttcagtattctgtgacattgagaaaaattatttgtgatatggttaaagatttttatgctaatatcagcagattatgttactcttggtttagctgtttttattcaaattgctcagcatatggcaagcgtttccatttttgtttgcattgatggacggaaaagcataaaattaatataaaaatttcttttcactaaagcaaattatatttacttattatacctacgctatatatagttgattttgtattataatattactgtttccaataaaaatgaaagagtgcatgaagcagatacatcacacgctcacaagaaaaaaacctttagatgcgccattaagttggtttcaatgtttttaattacatatctcacgttagtgataattcctgcagaaacgcttggtgaatcctcctggagcaaataactacatgcagccagcttaccctgctggtggaaattggggtgcacctccagtgcagcaacaacctcagtatgggtatgcacagtctggaagctatgtacaacctcctgcacctgcctcgtactacagtaactatgctacctcagcgccgggttgggatcagtcaaaccagtcaactcaacaacctcagcagagcagtggatatgactattatggacaacaagctcaggttggctctgctccatcaaatcctagttacagctacaatcagaatccacacgggagccatggttatgaccagagctactcacagcagccgtcaaactatgaccaaaatgtctcaagtcaggtcccgatttctgatcagcctaatccatatgtgagctcagcatatggaccacctcctgtggcatcaaactatgatggaacatcttcttctcaaactgctcacccaggaccaacatataatcctcagactggttactggtcttacccaggcaacacaagccaacagccagtttatgatcaaagttattaccaggcttacggaggtcagctagtttctgatgctggccacccaggctatggcgaggcaggatatactcaattagccccaacacaagcaagttatgtgcaaccaactaattcccctggtcagggaggacagaaacttgagcaacaatcccaggaacagctagcaacaaatggatttgcacactcatcaatccatggagctcaaagagaaggtgatggaaattcagatggagttggctcagctcctactgcacaggaaagtaccgatgctcaaacatagttggtggtggttaagaatgttctctaatgtagtgcttcatttgtgatttacttttggtaatactctcatataccttgcgtaaattgattgccttggccattatcccaaatcaggcagaagaggtaatggatgatttttaaccgatcaaaccatctttggaggtagtactctgaagattgaatttgatacttcttttgagctttcatccactttttctcttatttttaacagattatattaggtctatgaaaacttgaatgatgaatgcatctttaatgcaactggtacctttttgtatgcctagactttcttattagaaaagcaaatgctaattttcatttaaggctgttggactagaagcagtgaaactatgactttcaaaactcttgcgcatgcacactaaataagagattgaacaaacaagtagtgcattttgaattatttttttttcattctaatcttcatcacaataattattgtgggcaattgtttctcccataaaagattgctctatgcgttttttttttccttcatatcataatatttttctgaaattggtaactgggaggtagacacaaaaaaagaaaaacaataccaaatacagattgctgtttaacttatgatacatttttgagtaacagtaacacaattttaggtttacttatgccacaagtagaagtgggaaataatagaacacataaatgccccatagacgtggcagaacagtgacttaaaaaaaatagtagcagcctgttactaacaggagaagcaggtcaatagtaaaagaaaccgcaagcagaaagacagttggaaggcaggagtctcacttagttcgacattgcaaacctaagactccttcagtacaatgaaagtactgaaaacctttaagccttttcacatatctgaagacgagacatataagatgcagtaaaaattttaggggcaagcgttggaaacctagtttttctcagtcacattgcataaacaatctctccgctgctgtcgatgtccagttcaggatctgtgtccaaatcatcatccatgtcgtcgtcaatgtccagactaccagtaaggtactggtcgaggctgttggcaccagctgcgggtaatgtggcctcagaaatgatctgcattatttcatcaatactttgcattggttgatcggcttcatcgaactggttgttcgtattctcatctatgagatctgctggaagattcttcagaaaccactcgtggtttctgatctcaggaatggttatcctctgttgcaaagtaacatccaacgaaacttgaattagaaggaccatctcctatttgagagttaaaatagaataaggagagcaacctatttctcctttgaaatcaaccaatctttatctttcattattttctatgagaggtgacaaagatcagtaaaagaaatcctaccatgcattaccaggagtcataccatttcaaaattccaagtgaatttgggaatacagaaagaaacctaaggagacaaataaccaatattactcgagcaatatataaacaactacacaattactacgctgacctttgcagggtcagctacaaaaatccttgagatcagatgacgacattctggagatatatgaacatagtcaggtactgagtactgaacattcaagattcgctgcacaaacatatctcagttcaggtgaaggaaagtagtaaagttaagaattacatttataacttttgagcacttaaacttacatgtattgtcttgcggaaatttttaggctcctctgggtcctcaaaagggtatgcacccaccaacatgacatataaagtcaccccacaagaccatacatcagcaatctggttgggatgatgaaaacaaacaatgccaaaacattataatcaccatttaacgaaggtcaagtccatagtattcagagaaacagagggaggcctttataagagtagagtaatataacacaccctttgggggcatagccatactacttattgaatcattttattcagcaaatgaaaattccaatgcaggaactcctacacccatcaaatgtccatttttctaggttatccaaactaaagtagaaaagaaagctgactactagtttaaaaaaataataaatatcagattcaatctgattgtgtagccaggagcctgtgggacaatcttttgaggcccgttttctgaaggtatcaacaagagccaagtgcttgagatcatggcaagaaaatgcacaagaaacttagaaaggatgagtaattttaaaacttactctagtcttccaatccaaatgcctttaaaaaaataatactcttcaaatagggaatgctcccaacagatcaaaaataaaattaccttgccatcatattctttcttaagtaacacttcaggcgcaatgtacgcaggggtaccaacagttgattttggttgtgaatgcagcactgaggactgagaaaccaaaatagaatctgattagatgtcattgactattagtacaaaccaacattaacagagaatcacaatgttaatgaacaaatattacacgcagaaagaagtaggtagttccatgaaattgcttctaaccagaaggaaatagcatcaacaagaaaaatgtatttcaccatgcatgagcatagtcacccttaccaccttataatgttttacttgaaaatgttctttcaagcataaactgcaaagacttaagtaaatacatagctctagtgaacattacagtaaaatataattaattaatacctttgagtatccaaagtcacaaatcttcaaacgtggagctgggcttccatccaacaaagtgttctccaatttcagatcacgatggcatacttgcttaattgtaagagcaacataggacaagtcatcttctgggtggattgataactcaagaaaaaattccattaaagaaagaaaagaaagacagctttcaaataccattgcgtgacagtagctaactcctgatataagctgttggaagaagaagcgtgcctgcagcccaagacaacatacattagaaagaagtcgtggctgctgctggaaacaaaaacaatgaactggataggaacctcatcctcactgaatctcccagcgttgcatattcgctcaaatagctctccgccagatgcatattccattacaatggctagatgagttggtgttaagatgacctacatacatatagacaattgttaaaaggaaacttccataaagaggctcatttgtgataacacatttaataagcttacctctttgaaccggacaatgttgggatgcctcaatgacctgtgatttatgatttccctccgtacattttcatcaatctgttacacacagttaacaagtaggtaaataattacgactaaatgaagaatgaatagaattactgactaaaagcattgaagtcagtcactggcctacaacatagagaccgatgagcattcagcaagtagtgtccattacatgccatgtcaacataataggaaaccatcaggcctcagctgtattgactgatcacatgacataatgacctgcctatattgctatatcacgaataactacaattaatataaactttgaaagctcttccaattatgagtcaaaaaattgtcatttaaataggattgtgaccagcagagttattaacaatttttgtatgtagaggagctttcaagtatagaaagcatatttgtgtgggattgaaatctattaaagaaaggaaatgtgtattgtgtgttgtgtcccacattgctcatgtgtgagtaatttgtaagatttatactacactcgtagctagcaagacttaccctttgtttggcaagaaggacagaatgagttagtgattgattgtatatgaggtgtagaaagataagagaaggggatggatttggtgtgtaccttaaatttgtttgatatgttggaaggaaggaaaggaattctaaattattgaaataaaaactataaatatttattagcatatttatggccattataatttaattttggatttttttcttttttacactttaaaacagtttttttttttgttatttttacgaaattctacataaaaactc

SEQ ID NO: 296276 - DNA, 1579 bp, Cannabis indica
atatttatatatatatatttatggagaacaaaattattctaattaatcttcttgcccccgatggagactgaaaccaaatattagaactttcaaacctgtgagttcaaagtggatggataagcaaatgcaagaagctgagggtcagtctcaaacaaagccatatcctctttggtcaaagaaaccgtagcctcaacaccaccctcttttgtgtccattaaaatgatcacattgctatggctttcggcagccggaacagtcacccaaataggcttaccccacccaaaatcaaccatcttataaagctcaaagctacacaaacttgtgaaaatcaacaccttagtatcttcacatccaaataactcaaaagtttctttcatgtccctacctatcacctcacacgccccatcttctcgaagcttttttgctttagtttcagcatattctcttattccattccttaacaaagccaccaaacccttgagtgtgacctcatcatcatcatcatcatcatgccctaattccatccgtgcaataaagcatccaactacgttccccaccaagtgttccggcaaaggcgggtcaaccctttttcgtatgttcatggattgagttaacgcaaacttgttaacaccattagggtttgatgatcttgttgaagcagccatgaaacacttccaaatcaaagctgtgactacctcaaccctagtcggttggtccacgctttcgctagctgtttcagccttgagtttcacaagcttttttttctcaaacacaaacctcttaactactgactccactttcttcaacaccaaggcaggtctctggtcggagatttctatgggagggaagtaggaggcggcgttgaacaccgggaacactttttgtggagactcgtttgagatttcagcccaacttttcataaatattcccatacttgttgcgtcacatgatttgtgggacaagcagatacctagggctaaccctccacagtcaaagaaagtagcttgaacaagtagctgaggccacgagttcgactccggcgattggctttccgaggccaggagatgttggagttgggctaccgatagttcttgttgtagaaatgttgagagattaaggccatggaatcgagcttcgatgtatagagctccttcgtcgttacaatcaatggcggttgtgttgttattgattcttccggctatagggtagaagcgagttaaggtttctgataatgatttcttaagttgatgtgatttttggtcgttggtggtgataatattgatgtcgtttttagtgttttggtagaaataaattacttggccgtatatttctggttggaactgatccaatagagaaagtttgtggattttaaggtcaggtggagttgaagaagatgggtttatggtttctcttttaatgatctcaataactttaacctctgccattattgattatactccgacctcgatgattgtattctttatttgtttcttataataaaatgagcatacctatttaactcgtattaatgtgatatatctattcaattaaaataaagagtattgttattaaatattag

SEQ ID NO: 296277 - DNA, 1191 bp, Cannabis indica
taaaatgtatatgtatttttacctgaaaatcggagattgaaatatcagttttcttcatcttggcagctaaagaaacacaagagattgcaagaagctttataacccattgcttcggttgctgttatagaaattgaaagcaacacttttagaccccctcactcaaagcggttaacccataaatattttagtttaaggaaatggagatagatggatgagtatgttttgagaagcagaacaaaacgtaatttataatgtgaatctgtaaatttaccagcattaaatggcaggataagaaccgatcaagataattaactgcgaggtatgataagagaggatcgaagttacaggagaactgcataaacgagctacgaaaagttaagaactaaaaataagtgaaagccaaaataaatgaagaggaaaaaaaataataaaaagaacatttttttgtttgtttgttgtgtttgtgtacctgtgcgattgaagcaatggcttctcgtctaacaagtatgtccatatctccagcctgaagactggagaagtaactgtgagaaggcatgtgatcagactcggtgagaaacagagaagcgacagagtcagaggttaggtcttccaaatctgtaagagggttttcaaggtcgaactccatggagttgggaataatgatggtttttcaaggtcgttgaagatagaaaccagaagacattgttaaagaagaagaaaagagataagattagagaaaaggggagagagagagagagagataagaataaagaaaaagttgtttgggttaggaagatagaagacttgaagttcacttcttcgttggtgtgtcttatagagagtagtcagttctgtttgcattgacattatagtatagtaggagtggaatactaaagaaagagagagtgtgtgtggggatgatcagatagaaccagatcgactgggctgtagagtttctacatggtacgtcgctcaaccattggctacagctcactactatttacttctttttttcttttcttttatttttctttggaaccatacaaatatggggattttgcttcttttttttttctcaaataactaactttttttagcatggaacattttttagggcaattttatggcaagtttactaataagtaatgggaatcaatagtaaagtaatcattcctttacatttgtttactt

SEQ ID NO: 296278 - DNA, 3857 bp, Cannabis indica
aaagaattgtagagactccaaatattagtattgaaaacaattaaatacactttaaaataaagaatttatgttacattacaaattgcctttaataattctataaaagagaaagttggacaaaaatttttgctgcagctccttcaatgaattggcctttgaaattgatctccagtttcatagtaacagtcaaacctggtctcaaaaaatcattgaatctgtgtaggatttaatcatttaggctttagcatgaatataaggtttacagttttatcatatgtccaatcaaccaagttgtttcaagggtttggcactattaacaaatgttgcacttttattgaagccctgaagaagaaggatccgaattgcttctattccatcttggaatgtaaaatttaactgcaaaacaattcattcggacattagaagaaacaaataaaagaaacctttggttgttaaaatccagtaacaaatttcatgttattgctaggccacctgtgcatctaacacgagagtctccgcctaaagaagattgatgacatggcaacttaaagtgttctattatttttcaaaaatcgtaaaactaacgattgaataaattccttgtaaaattactggataaaataaaataccaactttttcagaagctttactgacatatgtcctttgtaaaagatttcaaacacgtggattgtgtgatgaattcaatcgggattgacagctgcgttcattatttctctttttttttttggctggacaaagaataaaaaatgaattctttgtaaatttattggataaataccaattttttttcagaaacatataaaaacatacgtcctgttaaaaaatttcaaacaaggattgtgtgatgaattctaatagggatcgacaaaaaataaataattaacaaagctgttcatctcgattagaactcatcacacgtgttaattatttttcttagtcttaatgaatttttttgtgtaacccaatatctgggctatcgatcagagtagagagtactaaactaattgtaatctgtagagatttccaaggtctcaaatacttcgaaactgtaacccgatttctccttaggatcaataatgaatttcttcagccacgaccctgtacctgtacctatggaatggtatctggtatcagagccgtacacggcatagaggacaagtctataagtaagaatacggagctgagtgttgtaattgtgcctgatattgagggggctgagaatgaggaattagacccagaaattaatcaagatcccattctggacgtatctgaaatcagtgaagcagtggaacaggcctcacaacacccaagagatgataaaaggcacgataaatgaaccagtggtcattttaatagacccaggcgcaacctataatttcttatcaaaggaagtgatccaaaatatgggattaacagcgaccaatactggtgcttatggtgtgattattgggtcaggagacttggggatgagagagggcatttgcaagggaagagcacctcaacttcaagggcctttaaaccttggaagtacgaacttgatattgggaatttagtggttggccactctcggaatggcacatacaaattgaaaactttagacagtgaagtttcagctgggaatgagactgttgacactgcaaggagagacccttctcttggcaagacattagtttctcttaaaaccatgctgaagactattataagtgaaggttcgagagttttagtagaaccagaccaagtcaacacgatgataaatgagacaccaacgatagcagatttatgaaggatgtcactgctgagtttgaggacatagcaactttggtgttctattagttttcctagtcagctaagtaattcttaatgaatgttttgtgtaagcctacttggtgtggtaaatggggagagttgtttatatttggggtatcgatgatgagtaggagtacgaaaatgattgtaatcttgttagaaaaaagtttctcggtaaagatagtccaaggtctcgagcacttggaacttgtaacccaatttaaataaaaaaactctccagccatgaccttgtacctatcaattatgccaaccaaaattagacttaacaaacctcttcacgttcttgtttattgaacggtcgaagaacaaagttgactgcatccattttcccaggaggtcgcccaatacctagaaaagtttcattatattattagggggaaaagaatatacaaagggccactttggtgcctatatatacataccaattctcaaacgaggaaagtcgcgactcccttgaaaatgatcaatgatactcctcatcctacaacaagaaagcaaatcataaaaacctaacctaggcctcctctttttgtttaaaatgtgcatatcatcttatgagtttaagatcaatggaaaagtatattccttgtatttaactttctttatacttgtttgaagaaatttttgtacacatcaaaaagaacaagaataaaaagtacgaataaaaatctcttttcttacaagtctcctccctctctcaccactcaaaatttgacaaaacactcatactttgacatatttacttaaataacatcttcctagccaaatgatggtttgtcaaattttaagtgttgggacataaaagagtaatttggagaacatttctattccaatttaaaaagcaggcacatatttcaatttatgattaaactactttagacgagaaaaacaaatggcttaaccaggtcatgttatgttggaaatagacaagagaaccaataaataaataaacacaacacaagaggaaaatccaaatagcatggggtggaaaaaggaaaattaccagagaaactacgatctaatcactgcatacttaacaaagggttgcaaaatatgagataggggatgtaattttaattttttacaatgtaagactatctccaatgcatgcacatttgacatttctatttccaatttaaaagaaggcacatatttcattttataattaaaatactttagtcgaggaagacaaaaggcttaaccacatcatgttatgttggaaatagacaagagaaccaataaataaataaagagtttttttgcagctaaactctctcaactatcattccaacatggactatttatgtgtacatctagtacacgtgacacgtttatattggtacaccttgcattattatttaaaaattataaaaaaaaaaatttcaaaatttataatattttttatttttataattttatttaattttaaaatgaattttgatataattttgatataattttaaaataataataatattaggtgtactaatataaacatgccacatgtacaatagtgtacacataagtaattcatggtggtagttaaccagatgcaccttgaatttcttaacagtacagtagtttggaatgttttaccgttaaaatttgagtttagaggattgagtgcaagtgaaatgatagttgggagggtttagccacaaaaaactcataaataaactcaacacaagaggaaaagaggaaaatccaaatatcatgggttggaaaaaagaaaattaccaaacaaactacaacctaatcacgggatatttaacaaagggtggaaaaatatgaaatagaggagtctaatttgaattttgtacagtgtaagaccatctctaatgcataaggtaaaaaagtgataaatttggcacaaaaaaatgagtaaattttatatttagcatgattttcgcaattgtgctccaatgcacaataacaaattaagttgcaaattgacataaaaagtaattatcattaatgataatttataaattaaatatattttcttaaaa

SEQ ID NO: 296279 - DNA, 1707 bp, Cannabis indica
atcttgagcttttctccaatgatcaagagaagtagttgtcgataccataacctcattcaaagaggaggtttaattcttccacacttttttatttgcacttttcacaacgcccaacaaaccatagcaattttacacatatctttggttgttgtagaagaaaatgtgagttcaaaccaagatgcaaaggtacctggggggttcggacagtgaacaccaagttgctgccaacatgcagtagccaaagaacactcaaccaaggcgtgagaggtgttttcgggttgggcatcacacatgggacaaaggatagaaacatttacatgtttggtgacaaggtttaggcatgtggggaggcagtttgtcaaggcacgccacaacatgtttttaacttttggaggtattttcagctgccataactccttccagaacccgaagttgttagctgcaggttgaggagtcttgttttgctgcaacagcgagtacgcactgctgacactgaagctcccatttgattcaccaatccaataccagcagtcatcttcaagagtagaactcaatgggaggccgaggatgagagtagcatctctaggattaataatatcaaggactaaatcataatccaagcaacgagaatatgttgaaaacagtgcagaaacattctggtttgagagcccaggattgatatttgtgacaaacggatggtccttgtcagggagccacggatggtcaaggatactggtagtcataccagtctgaatagtgcgacgggctcctaatttgagaagcttttgggcactccaaatactacgccaaataaagctgggattggaaccaagatcagcactaaggaagtcaaagttggggaaatattttgctttataaacccaactaacaagtgtgtttggattgcataaaaccctacacaatatttactcatctctttctaacaacaccactagcctctttcttccttttttttttcttggataaccagctgccctttattcgttccccctctcccttttcttcctcttttgatggattagaactagctggccaagccagtcttcttcgctaactccaccacttgtccaaattgagatcttcagatggccaaacaaaacgaaaaacaaacatttggccagattttcagtgatcatcttcttggcttctcatctccttattttctgagatttatcccataatattttttttcttatgttatttttattctaatggcagatttgattttttttgttattcttctagtttttttttttttttttttggatgttaagcattgtttgaggttgtgtgtcttgcgtcgtcggggttcacatttgggcatttgggttacggtgttcgcttatggatgagagcgggtttagagtttcatggttgggcttggttgggctcacagaggcggtgcatctcaccggagtggattcaatttcttcttaaatttaagtttcaatatatttttttaattttggttttaatttttttggtaaagattttaattttagttaatcgtcatatatgtaaatatatatacgtatatattcatttattttttttatttattatctctgtatattgtatgtagttaaataggtattgattgtatattgtatattgatgtttgaatatagattaatatatatcttctctcttagcattttttttaatgtttggatttgaatatctttt

SEQ ID NO: 296280 - DNA, 965 bp, Cannabis indica
aaacaaaacaaaacaaaaagcattataaccagttttatgccgaacatcaaattataaaaacacacaagtataatattaatggctacaaaaatggtgataaagatgaattcctcattattttatgctacaactttgaacaatcattgcgttacaagccattacaaaacttgaattatataaagaaaaatgtgaatcaataaaattacaatagagagaaaaaaagaagtataagagaaagaaaaccatatcctcctcaaaagggtatgtatatttttctgcaaatttgacattgtaacaactactcttgattatctcaatatttttttaattttttttttatctttgactattatcaattgcagtagttagaggtggaatagcattgtttggtgttgattgaattggaaaattaagacgccaaagcatgatcttagagcacccatctggtgggataccttttatttcagtttcatcttcaagaaccacttgcttcacaaatttgattgaatcctgctcaaaattaataataaataaataagtagctagttaaataataattaagtacagctaattaacccataaacttattagttaattaagttttaatttttcattatagtctcacctaataacaataataataacactttcaaaaaataaataaataataataattgatgtttgctcagatcttactacataatctttagaggttggccaaacctctactgaaccttacttgctaaccataaaggtggaaaatatacaaaaatggtattaaaaaatgcaatatcttctaaaggacaaattcaaaatttataccttaatgaagttatataaattttatggtatgtatcatctttatcatgttagattaagtaaataatatatgtgactatttaattgttacatttttattgtaaccatatggttgcatttttttttaacctgtaatagcaggttac

SEQ ID NO: 296281 - DNA, 13292 bp, Cannabis indica
ataataagtatatcttaatatttaaaaaagttaagcttaaaatcattttttaaacatatttattaatttttttctcaattaattttaatacttattttaaataattatgtataattttttttttatttttttaataaaattccataaaattttttattttaatttttttgttataatatttaaaatataatttatttttatttgataggtatattttttagagcttttaacggctaaatccttctaattattgttttacttacatttaacactctaaactcaaattttaatagtaaaatccttcaaattactgaactgagaataaatttaaggtgtcattcggttaactgccaccatgaactacttatgtgtatacacttgtacacataccatattcatatttgtacatctattaatatttaaatactattcaaaattataaaaaaatattataaaatttagaataatttttatattttttaaataaacgtgccacatgcacaataatgtatacataaacattatatattaatagttaattatggaaaataaatggcattttaaatttgtaaattattcaataattttgaaggtttgtagtctaaaatttcaacttaaaatatttaaatacaagtaaaacgacagttaggagggtttacccgaaaaaactctattgtttaagaatatgaattggtatagttttggggtgatattgagaatatgaaaaatgatgggtgaagacatttcaaatctgcaaaagttaagctctgaagaaaggaattagtcgaagacgaagcaacatcgacaacttcgcttccccattccaatccaaaactctcttctgcccttcaaggtatctttctttctttcccaatttatataattacatatatatacatatatatatttatgtatatgtatatatttctctgcgtattcgtttttctttagcatttctcataccactactcaaactcatcccagatcttcccaagtcgccaaataggggtctcatctgctgtgtgtgagatctcctcgcccgtagtagaatacaatgaacccattttttgttttattgattagtttgaccttttgtttacgaaaattttgtgctgcatttgatgaacaatgaaaatggattatgatgatggtgtttcatgcagttttaagctaattgtggtgggtttcaatggccgggaaagctgctcctagaccaactatgctatctgtttacctttatattcctaatatcattggtgggtattgattctttttctcttaggttgctatatttaacaagtaccccatttggaattctaatctatctttagttgcaaagatggaaataaaacttatgattttcaaattgttttttattttccttatcaaatatttttgaacttaattatgaccatatacatatatctgtaatttgaagtttcatttgatgaagatagtatttaggaacacatccaagttctactgatattgtacactgtaacatttagataaatctttaggaagatatttgtaaaagacccttgattgaatccaccataatgtttaactgaatgtctgttgctgtgaatgttactacgatcttcattgaccataactcctatgaattaatttattgggtgcaggttacataaggattctaatgaactgttttgcttttgcacaatgcttctccaacaaaaagctgttctctgttctctacttttttaggtaacaaataatcttcagaagttttagcattaagtattttattaagcacttgcacttagaaagtgttgaatgagaatgcgtttttttcagctttgtatgtgatggcatagatggttggtgtgctcgtaaattcaaccaaggtaataatttaagttgtatttgtcacaatgtagtttggtaatgttaccaaaatgctgatcatactatgtatatattatactaccaacaaacaatatttagttttcgacgatctagaacataaaaaatatatattatcaatagtgcttatctttgtatctttttaagaaataattggtcttctttctattcactgtttcagtttctacatttggagctgttttagacatgataacagacaggtgatcttatcaatctttcaacttctacaatgtaaagtactatttatcaatcaattagtgttgtggattcttgtccttttaaggttttgattttatatagcgttgtatctcaggattagcactgcttgtctattggttatactttcccaagtgtaccggtaatattacctctctatgctcctattgtacatttaaagtttccataacttatataagctttttaagcttttgtttgccttttaatgcaggcctggcctagttttcctctcattgcttgccttagatatttctagccactggttgcagatgtacaggtattttctcttgttcatttgattattatttaatcattaaacaaggctgaaacgttattctaaactaagaattttttcttttgttcgaccttaatgctttgattgcagtactttcttgtcgggcaaggttagccataaagatgtaaaagacagcactagttggcttttcaggttatattatggaaaccgaatgtttatggcttactgctgtgtggcatgtgaggtaatttcctttctctatttgctcaccgtatttctttttcaagtaactgcagtgatttttcgtaatctgactaaattacctttcacaggttctttatatactgttgtttctacttgcaaagaaccagactgagaatttaatggatgtaagtacttgaatcatcattgttaaagtttcgcaccaatgttatgctgatttccgctacctctttcaggttttattaagttcggttaaacagaatccactgctttgttttctagttatcttaagtttatttggctgggcagtcaagcaagctgttaatgttatacaggtaatgcctaatgactgatagaaatagttacccttcttgaatgggaaggaataatatttgaatatttacatgaacttaattgttcttaattgctgtgttttgaaattcagttgaagacagcagcagatgtatgcgtgcttttcgacgtcgagaaaaagcagaagccttaaacactttaaaatttcttatacaatccaagtgacatcccatgttcatactcagttgtttacatgttcagctgttcccactcaaatatccatcttaacatagccaggtggtttttgatattaccaattgattgattgtaacagaggaaggggaagaggaaaaaaaagggattataaatacttttatgacatgttctgtctttattggattttcttctaaattcccccctttttggggagtgtatattgtgaattcaaatagccttgtttgcctaattgggatttgtacattggttatatttgtgacattttacatcacaaaattttgcagtaattatattttttagttatagtagttttcttaatcattcacaagctggatgttttgattgctgccttagaattttgctcgaagtgtagaaaatataaattcccatttacattcccatctttcacaaatcttcagaaaagtacacagtgattccattgatattgtaaacatcatttggcactaataaaattttagtattaagttggttaaacttttttaactatcacttgcacttaatcgttaaaatataaattttgacggtaaaattttacaagttactgatctattagtaaatttaaggtatcattcaattaattgttattatggactacttatgagtacatttttgtaattttgtacacgtgcacatttatattagtacacttaatattattatttcaaaattcaatttaaaattatataaaacaatatatattttaaaaaaatattataagtttttcataattttttaataataatattaaatatattatataaatgtgacatatgtacaaaagtagacacatataacaaataaatgacatttcaaatttactaacaattcaataatttaaaaaattttaacatcaaaatttaaaaattaagtacaagtagaatgataatcaaacgagtttaaccgcaaaaagctctttcaataatcattttcaccatgcaaagatgattgttgaaactgcaataaataggcccccataacctacagctttcaaagcaagaaatccagaaataaattgcattttagtgagtagttgtttatccactacaaaatgcaaaacttgaaattttgtggagagaagatgtatatatatataatattcaggatctccaaccagaggattaagggactcagaattcagggtaaaggaaaagtaaaataaagcagtcttataattgaattttaatctataacatagcacgaaacaatttaaaacaaaatgcaagtcctctgagctcaagaaaacaaggcaattcttgcaaataattccaacagataaagagaagcaaatcaaaagtcatcatcgtcttcctcggctatatgtttagcgagctcttgttcctgctgctgtctttccctcctcttctcagcactttctttttctttgtgggagtttggtgggaatcggagtgcacgcactgcttcattatgcaagttaagacaaaaggcaatcctagtgtcaaatgcactttgaggctcgtttgtagagtagatatctccagtttcctttgacaccatccatccatttccatgatcaagagtagcatcaattgccccatctcggattgccttggccacaatactctctgcatcagcgactggatttggagagtccaatcttagctttttggcaacatcaacaagagaaatccgtgaatatgagatgctaatgttacgcagcccagtcctaatgacattatggcgcaacctaacaatcaaattgtgggttctatctgtattgaaagtgctggagaacttctcagcaacacttctgaaaagctccaaatctccaattcgtacagcctgtaaaaaaaaatacatattaaagaatgcagcaaaagttcaaccccataattcatgagttgatatgcataagtcatgtcttgaagcaatgacagcatcaaaaaacccagaacataccaatgtcaaacaagagcaatatcaaattatcaatgtatgcataaatttatcggtacttaaaaaagttgacgtcaaaaaacatttaattaagtatatttgcttttacatttgaaaggcaatcaatcaagttcgtgaaagcatgtttctacagtagggactaaattcaatgaacaaaatcaagaaaacacaactcacatttgttagttcaaaatatggcctcaaagccttctccatccctttttgcataaaaactgtcctctcgggtatttcccccaacagtaagcggacaatgatagcccacttgttacactgaactcggaaaccaagggctgcaattggagctttcctagctgcttgcaggagggactctttagcatctgtatactccaactgaattgttctgatctttcctaagtaaaagaggtacctacaaaactgtaagaatccagcctcagaatatgtatcacatatctacagtacaataatctatgcagaaaatagctaaagagtaaaatagatagaaaaagacctgctggtttgagtgagcttcaaaccggggagccttggacctcagcttttcagcctgatcgtacaagttgtaatggaggtaatttcgaagtaacaggttaagaagcgtttcctgcatcacatcatcatgagagcataagactcaagacatacttagatagacataattgcttaggtaggaagatttacctgacccaactcatcatgacgtaatgttgcaatacgatggagagcaagaaggtttctgttaaatgaaataaggaataagccaccaaaagcagaagtaatatgccattctaatctaaattatggacaactatatcatagagacaccgatgacaaacaataactatagtccgagggaaacaaaggtaaaggttaagtaacactgcatgtaaatacaatgctaacttaccccctaatttcagcaagatcaccggtgagttcataactaagagaataataaaagtatagccttgatgctagaacatcaacagttctcctattcaggttcttcaatcgagcaatgctggctgaggcacaagctttggcctgcaagaaagtaaagaaacatcaaatgtttaataagcatgtccaataaagtaaagagaaaggaaaaaaaacaggtgggaagaggccatgattgattatgttactcacctcactgtatttcttctgatcaatcagaaaaatcagcacaagcaaatagcagtaaatttctagctccggtatcgagtgctttactggagcttgagttgcagatgttgcagtatcaacatccatgtcatgttcatcctcctgaaatcaaaattaagcatatgaagtgcttcgtataaacaattaatgcacatacatctcattattaatagcagccagcaactttctaaatatattagcaaattccatctcatttccttgtaaaccaatggacttaacaaaatttaaatccaattaacaaagcataattagcttcaaagaagcaatatagtctgcccattagaacttaatcgataccccatcatcacagaatagataagctatgtcttcaagaacattttatacattggaatatccacgatattggaagtattcagcagagcacagcaagaacacaaattcaaaaaaaaacccaaatcaagaaaagagttaaaattttacctttgggatataggaagataaccgagtgtgcacctccgatcctggagtaagagcgaaattgaggaacgcagagagcactgaagccttcagctttcgcctcaacgccatggtcaggcgaacaacacgcacaattctccgaacctcccgtgcatacgcaccagtctcaataagcgatgcaatctccttcaaatctgaaaaaaaaaaattaaaattttacaaaacgcattaaaaaatcgaaagctcaagcacaatcgttcgaatctaccgaaaaaaaaaagaacacagtagaaatcgaagaaacaaaaaaaagttagggttaaagtgtaatgaagatgagtgtttgaatcatacgttgcagagttgaaggagtaggagaagggactgggactgggactgaattggaaggagcctgaagctctttcatctccacgtcttgagtcatcttgcagagactgtatcgaaaatcacaacaaacatagaagaaaaaaaaagttaaatgtaaaatggaaatggcaaaattagaagtaagatatagatgatttgacctaaatcgtaccagagatggtggagctcgggttgatcgaagaagagattttagggtttcgcccaattttcgtacagtgcaagtctaaactggtagaaaggaagaagaagaagaagagagagaaagagagcatccaggtagtgaaatgaaagaagcaatctctcactagctgtaagccaaacgacgtcgtcgcattatttatttattttttaataaaataactcttaataccattttattttacaaaattatcgaatgaaccattttttttttttgtatgatttgctgtataaatacataaatttaactaattttttaagtttaattttatatcgtaataatacttaaattataaacgtacctactacagaagttctataattataatttaagtattattactgcaaacaattaaacttaagtatttatttacaattaaaaattaaacatgtatttatattacaaatttctcttttttttactatataaaaaaggtaaatatattgattttgaatgttaaaaaagttatttattgtagttttgttaaatgacaaattagatttttttttaatggtacaattttttttttagtacaatttttgtcattttcattaataaaatcaatctaaaatcgatttttagtaggaacagatacaatataagaataatttgcatataagagtatcaattaaattttattgttaaatagtgattagaactaccactatatgatgtataacacatttttatcagtctaaaaaatattataaaaattattttaaatggttaatatttaatgctggcatttaactaaacacttatgatttgcaaataaaaatgaagttcaaagagagtgctataataaaaaaagataattgaaagtaattaagatctcaatattcccatgtgaattagatgtattacaatttgagaaatattaaaagggatctatggttagggatgcatacggagggggaattaatggggagtacttccctcgtcttcatctttattaaggattttaattttggtcttcgcttatttcccatcggaggatggtacggaaaatcccttaatagggacagggacgaggcagggaatcccttaataaaaaaataaaatttataataaaaatttaaatatataaaaatattaaactacatgaatattataatgttacacattaattattatccaaaacacaatttaaattcataaaaaggatactaatatactaaaaaactacaaacataacttataaattttaaaatattattagaaatataaaataaaatactaaacaggtccccgttggggcagggagtatcatctccgtcccatttaacattcagagacaaaaaataatcttcgttcctgccatgtttcccatttagacaggaaatctccgtcccattaggggcgggtcctcgcggggccatccctgaaaggaaatgtgcatccctatttatggtgcttaacacttttatgatgtgtaatattactgttggtgtaattttatatcaggtctcccttattttaattaataaaaattataaaaaactactaactaattataaaaaatcatgtcatagaggtgttaggcacgttaataccccatctcaaagtatacattatataataagtaatatacattttctcacaaaggaaaagtcctaaactagaaaacattcaaaatatgaacaaaaaatactcaaatttttcatgaaaaattactcattaagctataaataatagagattagaacattgttataagatactagtggtatctagcacaacttatagttgcgacactttgtaaatggttagtgatattctataatagttattacactaaattatataaaacttatacttaattacttcaataacaatataatacgttcaactactacttttttaacatttttatcaacaataatataagtagtgaaagcataactttgagtcactagagcactactcacaaataaaagttcccaaaaacattatttcacttgccaacatgaatcaatctctcattaaaattggtcacaaaaataaaataaaatctactattaaaagaaatagtagctaaagaagttggaactatttaaataaattgcgagtgagattctcacaatgtgtgagtgagattctcacaatgaaagtcagacttcttaagcacccaactagccaaaattgtaggctcttccatttcctcccactagcatacttcttcaaccccatttcaatgttcttataacttcttcaaggttttcacattttttacttagagtttctcatcaacacctccccaagacacctagccaaaatgacaccgacttctagagcagaccattcgccttggccgatagagggaatttccggccgcacaaacattgcttttgttaatgcttttccatagatgctcccatggtgatggtggtctaaatctaagttgaaatatgacttgaagggttctatttttgttgcctcaaatacattccttacttcaattcactcaacacaaaatctcttgatttatctagattctcctttagctctttctctacatttttatgcaacaaccaaactaaaacaacacatatcaacataagttaaattacttcttattcataatttacttaaaagcattggtaccttgctctagagatggcaccagttcccatactctgtgtgtagctttattaaattctaaacaatcagttcattctatcagacccaatcaacacctttcaatatttcataataaaaagaaaaatttaagactaataaatcactagttttgaatttggggcaagatcttgaatatttccagtgttacaatagtgcatatttctagtattacatgtgttacatctataatttagatgatgtttttttacattagcatacacagaataagtatagcaagatcaccagtaatctccacaagaacatgaaccgtttacaaaatggtgaaatcggtttctgtctctcattatgatctttcttcctgtaatctttgaaatcaactttgtaacggcatgacaatccgaacaaactcggaggttctttacaatggttattgtggttcctggctttgtactgattagcccaaaagccatggcaagcttctcactgtgaacttggagagattgctccttttgtctctcacccaaatcatgtaatactatatctgtatgtggggtgtaaccctgagccttaagccaaccatttatctcttccaacatcttgtatatttctttgctttttgggtgtttcttatcccctgcaagaaattcatgtaccttattattcacttcaattgagctacaaccgggctccttttgaatcccactctctttcattacacctctcacttttgcaaccccttcccaatttccagctgcagcatatatatttgaaagaagaatatatgtccctgagtttgcaagatcatgtcttacaagatactctgcaatctcctctcctaaagtagcattgttgtggagtctacatgcaccaagtaaagttccccacaagaccggatcaggatcgattttcatgttcttgatgagttcataagcttcctctagatgccctgcacggctaagaagatttaccatacatccataatgctcaatcttcggttcaattccatactcaagtttcattgagctgaaaaactccttgccctcatcgaccaaaccagcataagcacaggcactcaagacaccgatgaagcttatgtcgctagggaagtatccaatttcaagcatttcattgaacaattctagtgcatcttggctaaaaccatgcattgcatacccaacaatcattgaattccaagccacaacatccttgtcttgaatgctatcgaaaaccagacgagcattctccacactaccacatttgcagtacatatcaatcaaagcagtgcccacatgaacatttattcgaatcccattactctccatgtaagtatgaagccacttaccagactccaaagctccaagctgaccacaagaagatagcaaagaaagcacagtgacttcattaggctttattctctctctcaacatcttcctaaataacaacaaagcttgattaggcatcccatgttgagtatacccatcaatcatcacattccaacacaccaaatctctgtccctcatttcatcaaacaacatccgagcttcatcaagcttcccatgcttagcataacaagtcatcatggcagtcaaagaaaccaaactcctcttaggcattgtaacaaacagttgttgtgcagaacaaacatcaccagctctagcataaacaccaatgagtccagtcctaacatacaaatcaaaatcaaacccaaatttaatcgcttgaccatgaagcaattttccatgcccaagtgggcaatctttcaaaagagctgagaacgtaaagcaattcggttcaacaccttgtttcaacatctgggtatagtacaagagtgcttgatcgttcaaaccagattgggaatggccatggataatattagtccaaaagaaaacattgggcatttgggtttgttggaaaagagcaacggagtagttgagacgggcaagagctgcataggagcgttggagcttgaagttaataatggagtggtcgtggtagccatggcggaagacagctgcgtgggtctggagaaggcgagtgattgacttggaattgtcaattaggaagatgaatttgtcaactgaaggaagagatgtagcggttgtggtggtggtggttgagggagacgacaacgtcaatggcatcgtcgatatcatcctaatgaaaaacaacaatagtttttagactatctccattctcaactgcataacagcaaaatattagatgaaatttgacataaaaattaaatattagtttgagtccgcattgaattggagaagaaattttttcaaaaacacaaaaatatagcattaggcacttgattgaagatgatcttggtaagaaaaaaatgtgccaattttcatttccaccacacatctttgcatgtgaagaaacgacatgtcatttacatatgatttgatcacatcacacaaaaataataatgaaaccattaaagaagaacccttttatttatgctgtttcatagaccactatatcatatatctatattatattgttaatgtcttttgtaattttgaaagtgtacattttgtaagattggattatataagtggtcataggtgggtgtgtgtgtgttggagattctgggttcgagttccaaataaaaaaaaacaagattatataatcttgctctcggtgtgtttagcattcctttgttgtgtgcatctattactttaaaagtcttggtgttggaaggaccacccttcaaatttaatggttcataaaaaaaattatttttgaacttttatttaaaaaaatataatatgttttaaaatcaataaataaatatatttttaaaaagaaaatttttttaggccttaggctaagtaggccctaagcacaacctatactcaagaccgggcctgaatattggtacaagttacttaaaatcggtttctctctttgtcagctagtcaactaactcgacttgattttagacagttagagaagttagttagtaacaattgcgtcactccaacaatcttaaacaggtctataaatacaatctagttaatctcattgatctctaatctctactctcctctctaaaataattgtatagagttttagactagagaactccatcctcattcattgtaactaagtatttgattaataaagatccaagctaaagactgttcccttagggagtagacaattgcactatcaataataattgattgaacctctttaaacttggcgttatttgttttctttgattagttttgattaggaatgtcaatctgggctattttcgcgggccgggccgggcccc

SEQ ID NO: 296282 - DNA, 5186 bp, Cannabis indica
aacataaaatgttatttctgatctttattaactagtaaatctcattatattgaaatggattttatttagggcacaaaacccaacacttggatcctacctaggaactttgtgaaagacatcctaccttggaactttgtccaggacttttatcctacctaggaactctctccaagacatagatcctgtctacaaactttgtacaagacttagatcctacttaggaactctagccaatacctagatctttcctaggaaccctgtccagtactaagatccaatctaggaacaatgtcgaagacatagatcccgtctaggaactctgtgcagaacttagagcctacctacgaactctatcgaagacataaatcctacctaggaactttgtttaggacttagatcctacctaggcactctttcgaggacatagatccattgtatacccttgtctagtacttagctgcttcttggagctcttcctagtacgtctcgagccaaattttctctggctggtcaatggcctttgattcgtaggctatttagttcatgatttttgattttatactttaccaattttaggttttgtattttaatgttgtctagttcatacccttaggttttggccagttaacccatcttttgtctaaatcctcttatgttctctagtttttcacctccctttgtctttttccagagatgaactcgcacaacttttgtagaggtgacaattggatttatgaagatatacttactctggatagctagtccttcttatacaactttgaatctgccgactccaattattattctgaagacatttgaggactttgttatttattttttatgcttttattttgcatagttcatcttttgttcttgtatggcctttaggccctttacattcgaacaggtgatatttttgttcttgtatggccttagggcccttttctttagaacaatattcatgtatggccttagggccttttacttttgaacatacgactggccaggcagcctttaatcctaactttaacttcttttgttagatatgtagctgaacggacagtttttaacccaggacttattttatatctaatctgaagtatgcccttcacacttacttagctctcaattttttgcttaatttaaatttagcttaattttagttgtgcttgttcgattttgtatggtctgggacatgtttgtatgcatgttgaacaaaaaatattaattttaagaagttatcttgttagcaagttgttaaatatgatttgaaaagagaaactcttttatccatttattggtcttacttatgtgtgtttgttgtgcaacgtacatttttttgataatgaaatcttacatttctaaattctgctttcattcatcattttagctatccttgtgtggcataccgggtaggggccacgactgaagagttgtggaaactgagctctttcatactaattcctgtatattgagctgtacaggaacctctatggaagagtagtatttttacaagttggtcactggtagtactttttgagatattctccattccagtaccttggtaggagaattaatttcatgttcccattgtacctaccaagcttgtacgcacctttacttattatctttgtaacatggtacgcaacttctcagtttcatccaaggaatcctgctgcaggatccttggtactaaggattgctcttcaaagcagtaagtctcctacttagaatttttcccatgacttgtttattgaagtattaggctattttttgctgataggcataaagctttaagtttccttggactcttctttcttcaattttataaagggattctgccgacaatgtgtggtttacttcttggtcatagtaggcaaaaaatacccttggctaaatatctttttggatagcctttgcccccaagcatgattgccatagatgccttcatgcattaatagtcattcaacttctatctaggtgacatatcttagaagttgtattatgaaaccatatatgtacataacctcgtctagtattagatacatagtagctttcctcctccttttttcttgcttcattcttattttctagcaagatttttgcctggaggtatgccactataggtgtcctccatgttggatggtcatttagcatgtttatctcttttgaaatagtaaggctcggttcttttaagaactgaatgggcaataagttctcctcgtttgtcaaggcgctgctagctaattgagcgagtgcatcgactgttgcattctcttctctaggaacttgccttctagtatagccttggagctgactttataagccttgaatcttgctcaaataggctatcacttttttccttgaactctatattcacctatgacatgatttatgacaaactaagactcattgtatatgtcaaggtaatctgctcgcacttcgtgtgctaacttaaggccaacaattaaaccttcatattcagcctcattgttggaggctttgaaaccgaactctattgcctcgtgcatctggtgccctatagttgtaatgaggcactacttgcaccagacaggtagaaagtacaggttttgtcaacatcaaacttttaggctaatttttatactcttgcttcttctctggttcttgctttctcctgaatcttgagagattttaggagatatgcatgtgcattcatccaggaagtcagcaagagcttagccttttatggccactcttggctagtaagtgatctcatatgagccaagttcaacggcccacttgtgtagttggccagatgcttccggtttctattaagagagtgaagcatgtgtacttctactgctccctttgattttgtggcgtaggggaattgttaagtttcccttttttgccaatatttcgaccatagccattattattgtgtttgcctctattattcttattattagagggctagccggtatttcccatgctagcctacatgttggtcagagcttggggctgtatgacacccttagtctgcccaacactgtcctgtcttcctttctgagcttgtcggatagctgcttccaactttatgaaaccatcagcttgcttaaggaactatttcatgttgctcgttgagatccttttaatatctttctagaatgcactcaacatcatgataccttcacgtatgttcgtatactaaccttcttctgacaggtatttgaccttagtggcgtcgaccatgaacctttgaatgtagtctttcaagcattcactttgtctttcttttatttttacaagatattctagttgtgagggtatttgtctaatggacgagaactgagtatagaattctcaagagaattcttcccaagagttgaaccttctttgggccagtttaaagtaccacaattggattgtgtcagacagggttgcaagaaagatccatcattgcacatctcttattactttctagagatctctttggatctcaaagtattttatgtgcgctaggggatcttctttcccaatttacatcttccaagttggcattttgaacttgggaaggggaagtgcattaatgtatgctataaagggtgatccccttaacttgttcagctctaggtcagatagcttttggccagataggcctttgatcatgtctctaagattatcaaactatgttcgcaagaatggatctattgtattggcctcttatacggatagctctccttggctagacaacctcttctggcgggctagctctcctttacaagctagatccacttgactggccagatttccttggccggctagaactccatggttggccagcattccttggctagtgaggctagtttgtggattgatagtgggtcggtcgtaccaactgcctaggttcggcggatccacctatctaaaatcactgtttaggggcaaaatatagacattctgattctgccttctcgaattagttccctgtgataggaatttatcttttttgccatacggtttatcaggcaagacttatccgtcctcaagtaggatagagtttggccacttattcgaggcacctaaacaggttgtttgtctattgtatacctattggtagaccttggtcttcacatttgtcgatctctcaagcaagggatctctcattagggccttgcccctaaatcctattttctcatttaacaaccttatcaggttgttggcctcctaattacaatggttcatctctgcctagttggcccagacgatggcctcctactcatcaacccacttcatgaatttccatctctacttagcgaagacatcgcacacatcagtgaaggtttcttcctctcctattttagtgacctggcctacaacttctctgagcctaacaacctcaacaccatccccaaggtccaagaagggtttgccaatagcaggttggccaactcttggcccagtttctcttgcataaactcacaaggcattcttattagtattatgagcaggttgttccacattggtctgctcttttgtacatgttgacctcgctttttaccaacaaaagtcagtctaatttagtaagcgacaagtagtttataacgatggaaatataataaagcaatataaagacacgagaattttatagagattcagccccaagcagttcggtaatagcctaatcctccttatttgtattaactcaagaacaaggagaaaggttccttttcttgtgacccttaaaacaatatctctgaatatgaattcttagaaaatatctctaaagtaaaatctttcgaccctttgcccagtgaatatgcatcattatttatagggctatgagctgggagaggaagtatttcccttctcgttacaataaatataagcagaaagattgtatagtaaatatagaatacaccgattgtgggatttggacaacttgccatatctctacaatctgatccccaagttataggaaattccttgatgactcacaatacgaaagctcaattcgctaagtgttggtcgctctgtgcggattgttgaatgctttgcctcgagcatgcgtatgaggtatcttgttcgaactatatcttgcaagcaaatactcggagttcattccacgtgtcaccatcatgtgattgcacttcagagtgcaaaaattgggataacatttgcccccccaagtctgtatgggactt

SEQ ID NO: 296283 - DNA, 11037 bp, Cannabis indica
ttgtgattaaaaaattaaaaaagcaaaagtgttaccaaacggcaccgtaattttttttatttgtgctgtatatttatttattttgccagcttaaaatatttttataatgttatttattttttaattaaaattaaaaaaaaaactcttaatgtaatattaacacgtgaaaaaagtgataaccaataccaatagtaatctttaacatttctctttaaaatattacgactatacatttaaaatgaggtagattccgctcctataatattattttcccaatcgccactatcaaaaataatattattttgccagaaaaaaaaaaatggtaaagagtgtcgtaaaagttaaaacaatagaaaagctcgatctttgtgtatcattatcatgttcttttactgttccaaaaactcacttctttcaactcaaaaattccagaggaatcctcctccgttccgcaggttgcctcaactccaacacttccactttcactatactacccaacctatttgtttccttctttggatttctcactctcatctcatggaatcttcacaatagtaagttaattttcaactccaaatgtctttttctctcaactagatgtatttactattctaatcaagatttttctttgtttgcttaacggtagtactgggttatactcgctaatttctataccattagattctaacctaacatttaattacaaaattatgctttaaaatagcaaggattagagttgtacaatgtattcccacttgcaaatggggagttacccatatgcatagtttgatcttcaaaagcttagcttagcttaactgcttctaaaatttatgctgcagcaactaagaaccaagttcaagtttgtgtctcctctagtctagcttgaacatgataacttaacttccacttgaattgggttttaagtgttgggtgatcatggggtaccagttccagtttggcaagcttggtcgaaaaagagctcatagatggatttttgtggtggtgttagtggctgtaacacatttgttgtttcagtctttcctgttcccatatgaaaatgcccttcgctctttgtttcccgagagagaatttcccattaatgtgaaatataatgtgcttagtactgctgttcgttcttcctcttcctccaaatctgtgatggttcggaaccctcttacagtttatgcaggaggagaactggggtttgatacaaaagaaaaggaaaatgacatagataataaggagattagctttggcattgatggaacttcttattatgttatggatagatttgtagataacagttttccattcaaggattctagagattcaaatgtggtgtccacagcacttgtaagcataaaaaatgaggagagtgatcctgtaatgggtgatgatgctagcagagatcagctagaattctctgtggagcagattaaggaacaagatactgaaatttctaaggacaatgttgtagtggatggtataagtttggtgcagaaaacaattgatggtggctcaaacactcctttcaaacattctacgcttgtatcctctgcttcggcttcaaacaatatgacatatttaactgcctcaacattcagtgaaaacccttctttagcttttgcttccaatcaaagtgatcaacaaatctcgaagaacaattctgcaattgttagtgtcccaagaagaaagaagatgaggtgtgacatgcccccaaagtcaataaccacgtttcaggagatgaacctcatattagtaaagcatcgggctaaatcgcgttcaatggtatgaagatatagactttattgatcaagacatttactttttgtttcttattaacttcgaactaacatgattatggttattgtagagaccaaggtggtcctctgtgcgcgatcgtgacattatggctttgaagccacaaattgagcatgctcctacaacaaatgatcaggacctttatgctcctctatttcgaaatgtttccatgttcaaaaagtaagcaaagtaaccattttcaaccattgctcttagtttcaaacttagttaaattcaatgtgttaaaattagaggatgaataaaagcagtctctttctgaaaattgtttgatgtcaaaaacttgcttaatttttctctaggagttatgagctcatggaacgaaccctcaaagtctatgtctacaaggatggcgaaaaacctattttccatcaaccaattttaaaaggattatatgcttcagagggatggtttatgaaactgatggagggaaataggcgttttgtggtaaaggaccctcggagggctcatctgttttatatgccatttagttcacgaatgctagaacacaccctgtacgtaaggaactctcacaatcgaacaaacctgcgccaatatttgaaggagtacacagaaaaaatatctgcaaagtatccttacttcaacagaactggtggagctgatcattttcttgtcgcctgccatgactgggtaagctctttgtttgtgcaactcttgtctatagacagctaatttcatttaactttgaccaattctaacaagatgtaaattggattcttacattacaggctccatatgaaacaaggcaccacatggagcgttgtatgaaggccctttgcaatgctgatgtaactgcaggcttcaagattggaagagatgtatcacttcctgaaacatatgtccggtcagcgaggaaccctctaagagatcttggtggaaagcctccatctcaaaggcacattcttgccttctatgcagggagcttgcatggctacttacgcccgaacttgttgaagtactggaaagataaagaccctgatatgaaaatctttggtcgaatgcctcttggtgttgcaagcaaaatggactacatccagctcatgaaaagcagcaaatactgcatctgccccaaaggttatgaagtgaatagcccaagggtcgtcgaagccatcttttatgaatgtgttccagtgatcatatctgacaattttgtgcctccattttttgatgtcttgaattgggaagcattctctgtagttcttgctgagaaagacattccaaggttgaaagacattttactcgcaataccgaaagacaagtatctggagatgcaatttgcagtcaggaaggctcagaagcattttctatggcatgctaaacccatgaagtatgacctcttccatatgacccttcattcaatttggtacaatagagtttttcagataaaacccagataaaataatgctagtctatgaaagaaaaaatggtatttttttttgggtaacatatctgcctgtacatattttgctgtacgatcttgtgaaacaaatattatgttaatgaatgtaactgttaagtctgttacctattgtaatgtcaggaattttatgactctttctctggattactcgaccaatttggctcatatttccattaatctttttcaggccctttaatcgtcttaggtggtgaagttattcaaaagaagtaaacatggataggattggattaaagccaaaagaattttctttattgttttgttactttttcttactaagcgacaaattctatccaaaatataacattttgaacaaccacgcatgcaactaaaggggcatcaatcaagtcaccatttttatggaacttatccaatgatgttcttccacgccacccccaaacacagagtacaacacgacacgtgtccctttcttcaaacttcagcaatccagttccagatcttttggtgggtccataatccattttctgttctttctcaagtttctccctaaagaaagttatggttatagacttaaatgttaccattaaacttggtggttttttcgattaaacaccaataataaatcatgtgattactacttctaggtcggtttttatcttttctgaccatttttaaagagaggaatttgaatctacataccgatgtacgtagatggaataatcttttatttattattaattatttgtgggtgggccatatcagatgtggaaattaaagcaactggataacgatcatcaattgcttcaccatccccttttttctcatgactaaatctataatttgttggttcggttggtacactttcaaaacatttatctttcatgattcaactttaatttattgctttaaagtttaaatttcaatactttcttttcttggaaatgggtttctgattttatttcttgtccccttttcccgctttaagttcgattccgatttggttattggcttctggagactaaaccgtttctgggttttgcagatttgagtgtctctttcattgttgggcttccaagttcagagttggggagctgtatttagtgtaattcattctcttatacctttgtctacaagcacttttctttttcaattaatgattagtagcatacctgaatgtgagttagtttgatagtttaaattggttgtttttgtaatgttatatctatgcattttataatctcttgcttcttttggtttttttacttgttactaattgatgggtcttcaaatccaatgagtttgaatatgaatatttgtttttgttctgtttgaatgttccaatagtgtttttgcccgtagtgtcatagaaattgttcatattgtatgatcttatggaagctattcatattgtcatagttcttcatattgtataaactgagttcatctttgatatcaactcttgtactcttttagctttaagtttctatttttgtttgcagaagatttgatgggagatgtacatgtgagcaatgaaatatatgaaataccctcagctgtaagtgcaaatagctcatatcatcctttttatcttagggtaaatgtgtttgtttctctctgtgttgatgaatctctcttgacaaatatattagtacctctttgcctaatgagtgatgcacgattgcttttttagttctaatattgatccttgtatcaggctcatgacaatgctgtgaataatacagatgttactgaattcaacttgtcaatagacgacattttcaccagtctgtggacattgactagctgtataggtgaacaattgatgcaatttattggtgagttattggcctgtgatggctgttcatgtatttgtcacaattagatccattccttcgatatgcaagatgtattgttttcggcaagtcacgaattcacttaaaagtttacccattatctatgttatacttatgcccatgaaacctaattttgctcttattgtgttgggtttgatgatgttattgcagaggatcttgtgctcagagatcttaatagatgcctagagaatttagtgtattattctcctgaacaagattcattagatttgagaaatatatgtgaaacattttctaaaggttcttcctcatcatccaaaccttgttatgactgtacattgcccagacttcgtggaagaagagcccaagaacccagggaagagtttactgtaaatacaagttctgacattgtagaaattattgattattatgcgggttcgcttatcatttttcaagggtaattaaaaatatttacttcgtatctataaagctcttgaatggttgaaagtttttgtaattttttagcataagctttaatgcatttgctgatgatcttatttgcatttctttctttggctgaaggttgttgattttccctatattcggattgcagtttgtctggaggttggcattggactcttgtagatgctctttatcttacattagatgtgctgaacttcgtattcgtaggtaaataaaataattcagtctttactcaaattagtgggtttcttatacctattgaagagcgtttgatggctttctttcagctttttattttaggacacgttcttttaactttctaagaattgtgacttatttacttctacaattatttgttgcttaatttagcatctcacgggtcattaaatcctttatctgcagtatcctatctcgaatacggaagacattgcgtggctcttctgatgatataggatggttacagcaaactccaggaatgccttctgtgacagatggtacagcaagatttctggaattgcttgctgaaataaggtgccatttccataataatttgatacttattaactcttcatttaaattcattatatgtttttgagtaatgactttaggagcttaaccattataggtgctttgatagaattcatatggagtttggtttcttcatagttcatcttattattagctgtttgctaacttttagtttaataattattacttgtactcactttaggaatggagagcactccctccctaattcatatgtttatctactaatacctggtacgggaagatccctttgtcacgacatttaacatgactttatctcggctcattgaacatgtaaatttaataacatcttctacaaattttgatttgccaggcctctttagtaaccatggtcctttgtacttcgtgggaactaaaaggttcttttcaaaaatgggtctagcttgccatattgcaaagattcacagtgaggtatcgaatgatttactcttgaataagtgcagattaaacattcccgatttgtcaaatgttttcttgaaccatttgtaattcatcttcactcacattgctttattttttgcatgaaggcgtctgtagagcacaatgcctgggaacttaagcaatacattgaggagctttactggggatctggcaaacccgtgatgcttctaggccacagtaagggtggagttgatgctgcagctgctctatcaatctattggagtgatttgaaggacaaagtggctggtttagcactggtacaaagcccatatggtggcaccccaatagcttctgatactcttcgagaaggccagattgctgacaaggaaaccaggagaattatggagcttttaatatgcaaattgatcaaggtaacaatttcttttctcaaattatttgtctaaaaactcattaattatttatttgtgggggaattggaagggaataaaactggaatttatatgagtagcttttccttagaagaaggaaatgatgtaaatgaaataaacttaattataatttgggtttgtttgatgctaattttggatgtttatgcttttagaccatttttagcctcaggggttatttggtgttcatattattacactataaaatgctatgatttgggttccttgtacccagaaagttcatgggtcaaagctttaatattttatgagctgcatgctcatgaagagaatgaaacaagcccatctataattcttctaccaaaggatttagtagccactactagggagctatatttgatataatttgatgcattagtgtaaacttttctctcttctcttatgtgtatgcatgggatcactcactctgaagctcttggaaaatgacatgaaacttatttggatgttttggaaaattactttcaaactgatctctgtataatttatagggtgacatacgagcactagaggatctgacatatgagaaaaggaaggaatttatcatgaaatacaagctaccagaacaagtccctctaatctctttccacaccgaggctagtacggctcctggtgtccttgctaccatgactcagatagctcatgcagagcttccttggcttcctctcctcaagtttgacaacgaggagtctgatagttttcttcgagcaggacgccaggtgcctgtggtgatgcctatatctgctgccatggctttgtgtgcactccacctgcagctgcgctacggagagaagagtgatggtttggtaacacgtcgagatgctgaagtcccgggttcagttgttgtcaaaccagataggaagcttgaccatgcttggatggtttactcttcttcgaagaagaatcccatggagccagatgcctgtgaaatgtgtgaggctcttttgactctccttgtggagattggcaagaagaagcaagaagaaattggacaaagttgagaaccaagcaattacttcaacataagcaattcttttttctttttttcttttttttacaatattatattgtttggcaaaagatttgttgttttgaaatcagaatcacaaatattttgatatgcaattcatggacttgctttattcttgttgaagttcttggaacaaacaacctgtagatgtgaacctgatttttctttttgacaaacctgttgttttgatttaatactcagatgaaagagagaaaaaaaaaagtgtttataatacattgtacgttataattggggtagtagatcaagaagaattactttttcttgtcttgttatagtagatgacccaaaaatatattataatgtaggtaattgtctgttgttacataaaatttactacttaaatatggtcttttgttacataaattctttatagtttttatatttttaaggtttgatttatatttctttttcatatattttttttccaagatttacaagcatattatttaaatatcatggtatatttatattagttttattaaaattatttttattttaaagttatgtttttttttacggaccattgtggattgttagtatacatattttcttgtacattattattttttgtatgatatattattattattcttacatacatatttattatttttttcttttgtataatagtggtatatattttgttagcataatatatacatttgaatgtatgtatataattttattggcatactacatgttgacagtgaaaacccatcaacgaacttaagaccgaaaaatcaaactttaaactagagacttaaaatgaagataaaagtatagaaattcaaaaacttaaggaaatgcttagagcaacaatagtgggagaggaatgtttgtatttcttagagtcaaaagttacaatgattttccaatctcctctcacatttgggaaagaggtatttataggctttaatggcttgggatacaattgtggtcccaagggacaagatgacatcaatgagctggaggtgtaggtggaggcctcacgccttgtacctttgcttggtgttaggtggtcccgagttgcaggggtaatgactgttgtgcatccttggtcgggatgtcaggccttgcaagtgtggtgccttcactactcttacctttttgccttcagaacttgcaggaggtgtgattgtactctccttgcatgcacaccttgtccttgtgatcgtaccccgtttccttcttcttcaatacttacacaaatttcactaagtatagctatgttgttgagaagggcatgtcaagtaactcatgacgcgagtgacatttccccatgcatggctaagttcatgttgagtggctatggaatttttctctaaatttgctcatggttacaatggcctttgttgtgaaggggagattttaatgaaatcttattcaaccatgagataagaggaggggtccctaaaagctcaaagctgatggataattttcgtaatacgttctctggcatagaattatttgatatggggtttgatggttctccgttaggctaagaaatgtgggcaaagtggtttaattcaggaccgtcttgattatatagtgtgtaataatgttgagtctaatttcttataattctttggtcaagcatcttggtctttggaggtccgatcattgtctgttgcttacttctatcggtaagggtggagatgtggttccagttttctccaaaagcaagaggtttttctttgaaatagcttgggctaatgaagatgactgtagggagttggtgtttgctgtctggaagggtggtgggtgatgttggttcaggtctagagggtattcctcatcgtttcaaatatgcttccaagaattgggctaagtggattatgaatactttcaaacgtaccaagaaagaaatcaaaaagaaaaacgttgagttttccaaatttgaagattttaatactgaagagtcttggaagatgcatcaaaaggtagagaaagagctcaatgtcatagtggagaaggatgataagtattggacatccaggtttaagccctcttagttgaaggttggtggtcgtaatactttctatttctataattctgcttttgctcgtaagaaaaaaaaattaatcaaggggattttaaatggtatgggtgtttgggtggtgttagactgtggcattgaaaaagagtttattgactattttaatcatctgctcacgtctgattcccctcttatagaagatatgtaaagagtttttgatttggttcatgctaaggtttttcctgagatgtttgatttacttcttgtgcttgttgcggagtcatacgtcaaatatgctctttttcatatgagtccgtataagagtcatggtattgatggtatgggggccgacttctatcagaaattttgggatcttattggtaataacgtgtgtttggatgctttaggggttccaaatggttatgattctttagattgtgtcattgatactactatctgtctgatttcaaagattaaagagcttgactttagacctattttcttatgtaatgtgatttataagatcattaccaagatgatgacgaaccgactatggggggtttcaagtgacgtgattttagagaagagaagtatttttatccctggaagacttatcctgacaatgcaatgattgtttttaaatttctaaaccttatcaaaaggcacacgaaaagaaaaaagggtttcttggctctcaaggctaacatgactaaggcttatgatagggtggaatagaacttcatttgtggtatgatgaggagattgggctttcctaaattacgggttttcctggttttcaagtatatctcttctattcggtatctggtcaacattaattgtaatgatcgctctagtaatgtggattagtaaaggcaattagcactaatttttattattgtattattatttgtgaattaattttatatgtgaaccccaatatttagaaataaatattaaagttataatttctcaattccggagatttt

SEQ ID NO: 296284 - DNA, 1056 bp, Cannabis indica
aaaaaaaaaaaaaattaactagaaagtgcaaagtagaatgtaaagagtctccataccatggattcaaaatcgatgaatagcatttgctcgaaaaaatcgataactaataaatatatatttataataatctgttttaaaagaaaaatgttaatggcttgacatttgtataatgaatgaattggattaaagatttagtttttaatccaatggtttcaaaaccatgtgaagcttcagatgtgattgtcttgcattgcaactccgtcataaacccctccaaaatctcgagtgaagctacctcactctgccttcgtccatggaggttctcaaaccttcacctcctaccaagcttacaacttcatttctaagttccactttcacttccaaatttccaactaaatttcgtggaaaacataaccaaattgtctacaacgtacccacctccgtattccacaagaactcatctttgtcaatatatcttctacccttaagtgatcgtagaagaaacttcccagttttctcccacttcggtcgaacgacgagccgccgcaactcgctgaggaagaaacttattgaggatcaacaggtacgtcatcgtgtgattcccggttctgatattcaaaatgaaaaatcatttcctaattttggggacacagagaagttaaatgaagaaataagaggtgacagtgttgaagagagcgtatctagtaatggggttatcgaaaacgaatcaaagtcgaaacttgttggtgaatctgctctgttggcgaaattggagaattgggctgagcagcataagaaagatagtgagtattggggcattgggtcagggccagtttttacagtctttcttaatcccgatgggaatgttgaacgggtttctgttcacgaggatgaaatattgaggagaagccgggtagagaaagaggaattagaaaactcgacagagacgaaattgaaaattttgcaggcagagaatttagctagagagatggagagtggggaatgtattcaaggacagtcgtggctaagttgtattgaagtggtgagtctaagttc

SEQ ID NO: 296285 - DNA, 1382 bp, Cannabis indica
gagtagataggacctatttgggattggtcaaaagtatataggccattcctgtgtctccccatcagcaaagtggtatgactcacttcctccttaacataacaaacatcagcatgaaattcaaaatagacattgttatccttagagaacttagcaacactaatgagattttttgtaatttcaggcacatgaagaaggttatttagaacaagagagtgagaagaatgctgaggaataaaataagattgaccaatatgctttattgacaaacctgtaccatctcctacatacatttgatcttgtccaccatagtcataacaatttgcaaggttctgaacttgaggagtgcagtgattagttgcccccgagtccggataccaatttgcatcttctatgctgctgtttgtagcaatatttgcttgtggtaaatgtgtctgcatcgaagcattgttacctgaagtagcaccagacagagaacctgaaaaggacttatcaaagcgatagaagcagtcgtgtgctgtatgaccaaatcgcaagcacaattgacattgaactttattgttcacattcattccagacctgccccctcgattctggaaaaaattacctctaccaccagaattctgaccagaagcaaagttagattcacctgcacgattgaaacttctgttattgaggaaatttacaaattgaccagctctattggactgaaaatttccacgcccatactgttgtttgaatcgtctccatgcgatattagcctcgatcaacgaatcttgatcatcagtgatgagattagcactcatatccacttccttccctgatttttcgattctggactcagaagccaaaagcaaagcttcgatctctcctacggagtactgttcaactctagtgttagtagagatgacgaaagtatcgtactcgctcgaaagacctttgaaaatagctgcgacatgatcacgatcacttaaggtttctcccacggaggcgagaaggtcgacatgctgtttcactttcagtagataatcgttgaggcttagtgtccctttcttgaggttctgaagttttgtgcgaaactctataatttttgaagacacttgcagcgtgaaatgtttctccaaggtgttccagatctgaagtgccgagttgcaacctaccatcctcgtgagaagaccttcggtcattgatgataagagccacgaaactaatagctggtcctgcacttcccagtcgaagaagacttgactgactctgttttgagtacgatcatcattagaggcaaactccggtggtggtggttccttgatgaacttcaagagtcgatttcctctaatggcggcaagaacttgctgtttccacagcaagaaattgtggtcattgag

SEQ ID NO: 296286 - DNA, 1363 bp, Cannabis indica
aggttgctccattagttgcaatatagatttctacggaagtgtaaaaataaaaaaaatcccaatattctaattaaccaaatctcaaggtaagttaacaatattaatattaggtaaatactctccataaaaatatattaggtataagtaattaaagtacgtagtcatgtgtgtactgcggatgcatattgtactgcattatagaaactgtacttcctaaaagaggacttaattaatacaacggaaaatttcttcatatatatacacacataatcatagaactatttatattattagcatcaaatctctatcagctcttgtttctggccggcggtggattattttggatttatggtcaagttagcttccgagataggttggcgtccggtccacgggactgtacagtgcagtgctatatatcaattcttagttagttcaattgttttgatcagcataattaatatttatgtatatctatatgtatacacacgtgtgtatattaacacacgtataggtatatctacagtaaatttcagcggcttagaagatcatggcgtcagaaaaggtttggatacatatatacagcatcagtttaattaattaattatcttaattttatatctgttttttttgaagaaattaattatatactttccttgactctcttattattacataggaaaattattgtagtttttatattttgcaatatataacagatatatatagcatagttattacaaattttacatttaattaattataacatattagatatatgtttagtattacacagaatcagattgaaattacaaaatagtgtctaatactactattaaacaatataaataatataattactattttcttcatccaccatattgtccaatattatttctaatttttccaaaatcctatacacaagtgaaaaaacgaaaaatacagttgcagtacttattttgggcatgacgtaaagataagacaaagacaataacacagcaaatttgagaaaaaaaataatgaaaattaaatgtgttttagaagttgagaaaaacaaaatatttgtttaacttggcacacacatgtacaaaaaataatgagagttgaatagtgttctgctactctttaattattagtttattatcaatatgaaataattcaatttttgttttggatataataatcagtgttttattttggccagttaaaagaagaaaaacaaagtggagtgtaatatatacacaccgtctagcttttatttccttcctatcaagtcataatttatatatgggatattggcggataaaccacctgagttttacggtttgtaacacttaaccacaaaaaccgaatttttggcggctaa

SEQ ID NO: 296287 - DNA, 3817 bp, Cannabis indica
gtagaaaacaattggatacatagtgagtttggaagagacgagctttgcatttgcaattgcaattaaagaaagtcgacaaagcaaagttgtttactcctctccaatcggccgttaccttccccagacaaacaccactccactcctctccctaaatccctgcttttttatacgcctataaaactcctttcttctgctacacatttgatttgtacaattacttagattagaacacaacactctcatccttgattcctctctgctccctcccatggctcattcccatcccgattcgcaaactccccaaacccttatcgacactaatgttctcgtcgcgaaatcccttgctcgattcggcatcgaccgcatgttcggtgtggtgggcatccccgtaacctcgctggctaaccgggccgtagcgcatggcgttcgatttatcgcatttcacaatgagcagtctgctgggtacgcggcctccgcttacggctatctcagtggccggcccggtgttcttctcaccgtctctggcccaggctgcgttcatggcctcgccggaatgtccaacgccatggctaacgcctggccgatgatcatgatctctggctcgtgcgatcagaaagattttggccgcggtgacttccaagagcttgatcaaattgaagccgtgaaacccttttcgaagctatccgtgaaagcaaaagacataagggaaatcccggaggctgtgtttcgagttctcgattgcgccggttcgggtcgacccggcggatgttatttggatcttccttctgatgttctgcaccagagtattccggaatcagaagctgacgacctcttggctgctgtggccgacagtttcgccaagcgacagttgttagtgagtttgccaaattcggagatcgagaaagccgtttctttgcttagacacgctgagagacctttgattgtttgtgggaaaggagcagcttttgctcgtgcggaagaaccattgaagaagctcgttgagagcactggaatcccatttcttcctactccaatgggtaaaggtttgttgcctgatactcacgaactggcagccaccgctgcgaggtctcttgctataggtaagtgtgatgttgcccttgttgttggtgctaggctcaattggttgttgcactttggagaacctcctaagtggtctaaagacgtcaagtttattttggttgatatctctgaggaagagattgagttgaggaaaccctatctgggattggtcggagatgccaaaagggtgttagaaatgatcaataaagagatcaaagatgacccattttgttatgggaggaatcatccatgggtggaagccatagctaagaagactaaagataatgtgttaaagatggaggttcaattggctaaggacattgtgccatttaatttcatgactccaatgagaattattagagatgcaatcttgggattgggtagccctgctcctgttttggtctcggagggggccaacactatggatataggacgagctgttttggttcagacggagcccaggaccaggttggacgctgggacatggggcacaatgggagttggtctgggttactgtattgcagctgctgtggcctcgcctgataggcttgttgttgcggtagaaggggattctgggtttgggttcagtgccatggaagttgaggtatgtttcttttcttaatatgctaacttaacgtagaaactcgtgtgcctctagcaataaaacatgccttctgtcttatgatttccatggccttcatattctagtaagcataaaacatgtatgtatgtatgtatattagataagataagatgatagaattatttgatatgtgttttgcttatgaaacatgaaatttttctttctaagcaaaaacttgtacaacttaaaatcatagtttccttattggataaaatgcccacctagcttggattttttattttatttattttttagatacctacctagcttggatttggttgttcatacttcatagactggggttcacacaaatcataaaattattggtgtctctgattaccttgtgaccttcgataggcgttatcactatctatggttgaattcctcctgccttactctagttgaactacctttgaaaagcttagtaggtagaataatgaaaagaacgtggttaagaagccagtcagaagatataggattttctattttttttttttattttaattaaacctgaacgtgatctcagtggctatgatgaatttttctaagctgcttgtgtatttctctgaaaatgagaagtgtttcaattttaataagttcgaatgactgcagcctttggtattatctcagtttattataaaatgaacagtgctgctttttttgttgtccttttcttttgcctaaggtttgcagcttgttaagtttgatttttgttaccataattgttagtttatatggctcattctaagcctaaacctgaatctagaactgcctttgagatatttcattactgtatgctcatattcattttctcaaattttgcagacattggttcgatatcagctgcctgttgttgtcattgtctttaacaatggtggagtttatggcggtgatagaaggaaccctgaagaaattagtggcccttacaaagatgatccagcacccacatcctttgtacctagtgcaggataccacactctaattgaagcctttggagggaagggttatcttgttgcgactccggaagaactaaaatctgctctttcggactcattctctgctcgtaaaccagctgttataaatgttataatcgatccattcgctggtgcagagagcggaagacttcaacacaagaattagttcatcattgttgtctattcttattttctgccctccaagttggtttggcatgccgatttgataataaataatagagttgtgcacatttatgttcatattatataatataagcctataagatatcatttcaatcgtgcttgttgactccaactattgttatgactctattacttgattcatgagcggtttgacaggaaacctcaaaataatcaagcttatcacataaatttatattttttttaagttgtgttttattgggaggaatgaaaagaatgagaatgagagtaatagtattggaatagaataaaatttgaaatgcataataaaaattataaaaaaattataaaatttttttcattttaaaataaaataatcattcgcaccactaccatctatggtgccactgcaatgattaggtttacaaggtgttgatcagcagggtccttatggtatcaccgttgaaaaaggagaagacataataagaaagttcagattatttgcgtcacagaagtgggtgggggcgagtagtgtggttgttgagttagttcttggtgatgctcttagtctgactcttatgaagtatcagaggcaaaaacgtactacaacaaaactaaacgatgtgtatactgctttctttgttttttttttacaaagattaatggtccattgttgctctccatcaaacattgttcaatgtggttcaaacataaagtgtgttattatatgacctgttattaacttaaatgatatatcattactctgttctaacctttccacgttgccatcgagaaaattttcaagaggtcctttgaaagaaaagaagtgagaaatttacaaaaattttggattttgggcaaatattaacaattttattgccacacgacaaaaattacttttatactgccttagaattttttttttcttttatactgtagacaccaaatatcaagaaca

SEQ ID NO: 296288 - DNA, 4531 bp, Cannabis indica
cataaaaagacttagcaaatctttccaagttatctgatccacgtgtcccctcttgactggtccacgtattttggacgaattttggagcaacatagatgatatcttaaatttacaaataataaagtagtttaaagtattttaccgttaaaatttgagtttagatggttaaatacaaatagatgtgatacttgaaaggatttaactataacaaaactatatatgctttagatagtgtcttgtccttctatttttaatgaacggtttcgttaataatgccgctgattatattatttgcaacccctaagtaagaaaaaccaattaaatttttattttaaaacattaaaatttatacaactcttaaatgtcaagagagatcctatgaaagaaaaagatcattagtgtaaaatgtaaattgataagtgaaataatcttagagtttgtgcatcaaaaatagaattatttatctatatttcaatatattgatatttttaatacaaataatatatattttttagcacaataaaatcaatagtaccatgaatatacgtgttggttttctgtgtatgatttgctggcaacctccacttataaatgctctccaataaataataaataatatataataaatataagatatttttctatatatatagtcatatactacaaaccaaaaccactatacatcttcaacttcttcttcttcccaaaattctcagccatgcaaagctctaatatgcacagcttcactccaaaacccttttctcatcatcaaaacccaaacttttcacctttcatatcatctaaaatcctcataaacccttctagaattctccccaaaaaaacaaccaaaacgccaccgtttcgagctccaaagcccaagcccaagcccaaaacccgacttaacccggcccatcatgacctgaaccccattcagaagctagcagcttcgcttcttgacactatagaaacctcactaatagctccaatggagaaagcccacaaattacccgaaaccgttgacccgaccgttcagttatccgggaatttcgctccggttccggaatttccggttcagtcgggtctggaagttactggtcaaattcctgagtgcttacgtggcgtttacttaagaaacggggctaatcctctgtttgcaccctcaggtggtcatcacttgtttgatggtgatggtatgatacacgccgttaagcttgaagccggtaaccgagccagctacagttgtaggtacacgcgtactaatcggcttaaccaagaagccaagctgggtcggtctgtttttcctaagccgattggggagcttcatggacattctggtttggctcggctcgctctttacttggctcgagctggtatcggcttaatcgatacttctaaaggtagcggcgtggctaacgctggtcttgtttattttaacggaaggttgttggctatgtccgaggatgatcttccgtaccaagttaagatcaacggtgatggtgatctcgagacgattggacggttcgattttgatgatcagatttgttgtccaatgatcgcgcatcccaagttggatcccgtgacgggtgagttacacgcgcttagctacgacgtggttaagaaaccgtaccttaagtacttcaggtttgacacgtgtggaagaatgacacgtgagatgggaataaagttggatcagcctacgatgatacatgattttgctataactaaaaaccacgtggttgtaccggatcaccaggtggtttttaaattatccgaaatgattcggggcgggtcacccgttatccacgacccaaataaatcggctcggtttggtattttccctaaaaccgaagtttccgggtcgggtattcagtgggttgacgtggcaaattgtttttgctttcatttgtggaatgcatgggaggaaatttctagtaatggtgagaaaatcgtggttgtgatcgggtcgtgtatgaacccacccgactcgattttcaataaaaatcgggccgaaccgattaggagtgaattaaccgagatccgactcaatatggtgacccgagaatcgagtcagcgggttatattgccaggtgtcaacttagaagctgggcaagtgaatagagagttgttagggcaaaaaactaggtatgtttacttggccatagcggagccttggccgaggtgttcgggtatcgccaaggtggatttggaaaccggtgatgtcagcagacacgtgtacgggacgggccgatttgggggcgaaccgtactacgtggccgaaaaaaaaagaattaaaaataataataataataataattataatgataatgataataataacaatgatgacataaataatggatacttggtgggttttgtgaggaatgagaatgaagagaaatcagaattggtgattgttaaggcttcgaatatgaaggaagttgcttcggtgaaattaccatctagggttccttatggttttcatggaacatttgtgagtgaccaagatttacttgaacaggtttaattaaaatatgtatatgtacatatgatcatatataatgtaacataatatttagtttgacccctaaaagattaggtgtaattaagatgtaattcaaaataataataatatattttggtaaatattgcctcactacaacaattagcggtaatttttaatcataatatagtatttaaatataagttgtcactaatttattatggctaaatgtgagttttaattttttatttatttgtgattataacatactatttaaatataatttgtcactaatttagttttagtcgcaataaatattgtaactaaaaatacatttagtcacaacaaattgtgatatttgtgattaatactttttcacatgcagattttggtcccttatgttgacgcaagaaactttagtccacaaattgatataattgtggtgttgaagcttacaacaatgacgaaacactctctccatcaataatgtttttgtttgagaattgaaaaggatgattctttacaatatttgagatagactagtttaatatcgtgtcgagataaaacctatctagtaccaactgaggcataattacctcaaaatcaacatggattatgtttaacccaattcaagctaagataggttatgtcccaagaatgttaaacgaagaacatatcagagatcactgtcgagataagataaaaatggaatcaagtcgaaataaatttttggacccttaggaaacaaaactaggacaaataaaacaaaattaatccaaaagagataaccataacacaatgcattaaagaatgacatcgcaatcatacatgcaacgaacacgtagaatataaatggagcaagatcgttcacgttaaaaggcaagaaaaaacaatcaaaatagaaggagtactaagaccttaaagaggaaaattctaccaaaaaaagtcactggttaatgttagaacactgtaaaacttaatttggccctaattaattcatgagaattaaacaataggattaaggaatagcggaagcgtaccagagtccataaaatcgacctttaaatgatctttaattggtatgatcttccaatttgcagtgagttctttctctgtaacctttgtctcttgaaaatggggtttcaagaaaataaaaagatacgatactacaaattggagaccattactgtttatattaccaacagacaaaactgttggtaatatttattgactatttctatttggcccctcatcaaattagaaattgtctttatggtatccacatattaaaatcatgacaattatacccttaagtcataaactttattccaaatagaccacataaatttgatttatttatttgatgacccaacacacatttttagtcaaaacaattatcacgtgctttgtgaagtttgtcttatggaaatgccctagaaacacaacaactataaaactacttacaaattcccaccttaatttaaaataatacaaagtgtttttgaagaaaagtttgacctagtgtagttaaattattttagttataactatcatccatggttataaatcccattaatttaatatattattggtcgaagcatatatatattggaatttatataatagtttggggggaagataatgattgttgtttgtgtacacatattaatattattatatataagatgtttttgggcttgaattttgttcctcttcacaaaaataagccagcaagcaaatctgataatgtaggcttggataatatcttttatggccaaaaaaatgagtgtatcattattggcacatgaataatgtgagataattttttttattggagtcagaacacgagaacacaagagaatgtaaagtcttgtgcattcataaatgtcactaatacaccaatatcacatttttatatcatttttattttcggtatctcgtcgggtctacacataagtttagagcactcccaacagtttctctactctattttttaaaatatataaccaaaattctattttatttatttta

SEQ ID NO: 296289 - DNA, 2691 bp, Cannabis indica
atccttttaatggagggataattttaatgagcacattgttaaatcatgggaattagcatataattaaggatttaattgttatttaatgattatatgtctcttagtaaaaattagggcttattgctagaaataggccttaggaaaatattttctcaactacggggatatatttgaactctagatgcattatatatgttatatatgaaatttgataatttttatgttttgtgcccagtaacattagaatgcaatgatttggccagggattaaccggagttatggttttaaactattttacccctagaaggtgaggttgcttcctagtaaagctaagggtagaattgtcttttggctttatttagtaatggagaataaatgatctttctagtaattatccttaagtttaattacattaaaattaagctggatagaaaaaattaagtatcatccaaactcatcacatactcttctccctttctctgtaattcagaccaagcaagggcaattcaaattagatttttgtggttaaagggttgagaagattaaactggtgggtcgaccaacacctcgtcatgggtacctgataatgatctctctcaataagtagtagtctggtctgtctccatctagctttcgaacaatgccttcccgcaggaaagtgttctctccacaaaggtcgaactgcctatgtatgacaactcagctttagggttgcgcagacaaaactcgtaagtaagtttggaggaaaagtcaaggtaatattcgttaatggcctcctggccatcaagagcctcacgtaacttctccttatgttcctcaagatcaatttgcaacccagagatgagagcagcttggttggtgttctcagtgttcctagcactcagcataatctctaatccaaagaccattctctgctagaaggacctatggttcagaattggctttatctttcgcagcatgggatgcctccaagaccttcacacgctcgtaaaaagtgtttgaagaccctctagagtcatcgcgagcgaaactcagcttcattaggtcctaaaaacaaagcaaaacaacgtcagtatcaaactgtcaattctggctgcccagtcccctctttagactgccatggctggcaagacccttgtatggaagcccaaggccggccaggcacttgcaagcaacaccatggctggccaacttatatagtgttaagatgatggataaaggtgaaactcaccacagaaaggtcccgaagttcggcactatacaacctgtcaggcacactgtcttccaactcctataacgcctcatccaagaaagggatagccctctctatatgtcgagtggctaactcagcagcctccctaccagcagctaaccgcactcctctgctaggccttcttgtaccctggtcggcaggttgaaccataggctacccggtaggtgtaggcccaatgagaggtcctggccaccttggccctcactcacccagtaggctcatttgaaggcccacctgcgagacctctcagcctgagacatgcctaccaaaagaaagtagcaaagtcaatatgcattcaaaaatattcaatacaataataaaagcatggtgctataaactatcaaataccataatcatcagaagaagagctattagagctcacaactatagctttgcctttacccctaaatgaaggcgcagggcgtataggtcgataagaagctgggcctctaggcctgatatgaagagaggcgtcaccaacttgacccccacgggccaggcgcctatggagagccctctctctcctctccaaattctgtacaatacgagacaaaggtgcttcttcatcatccaagtcagggccttgctcctctctaaggcaagccacaccagcaactgacattctcgcaaccctaggagtaggggatacaagccatgcatccagaagttgtccacactggtcaaccaaataatatttctctgttcagccgacaaagaaaggatgtgattcgctctatctcttaattccaaagtaggtatggaacatccaaagagcgacaccaactaaaactcatagtgcacatttctacaaaggtgttgtgccataaagtatttttttgcatacttgccaacttttgacatggccttacagttggtgtcgcccaaccattggtgaccaagctggatgaagtaaaaataaccagtcttgctctacttcggaccaaacttcaactcaaaagggtatccaatctcgtaaggggtatgcggaggccaaccaagctacctatacaagacaaacatcgccgacagatatttaatgctctttggcatgagctatgtcgggcacatctcaaagtaggctgcgacatccagaaagtattgatgaagtggcaacactgatccatgttctatgtggcaccccagccatgccaaccagccagaacggggcttgtgcgctctacaattattttgaggaatctcgcaatggacaccccctactaggccactagccatgactttatcaaaggcctcattagagagagcaaaagctggggaaacccaccttctgttaggtggttttgaatctaatatctctggcataggagactgttctaggacatgacctagtcctagtactgaaggtgtgccaagcccattcagcggattgcatcgggcatcataatattgttgggttttat

SEQ ID NO: 296290 - DNA, 11388 bp, Cannabis indica
cgtgtagcagtcccaacacgcttcctcccatgcgacattaaatgcgacttgattgctcaggggaagcctgacacctcgcggagatgccttagtgttacttgggcttccgagagcgtatggggctccttatgtcttctccgggaggcatgtcccgaatgctgtcttattacataaagacttagcaaataatttgaatgctaagttgtttgatccatgtgtccttgtctggttggtccacgtatattgagcaaaatcaggggcaacatttaatattttacttttatctatactgatatatattttttataattttgaggtcctgagcatgcaggatctgatgtgcatacctctaacctatcatgcctatttatttgggtatttgaaagaattttttaatttaatttgtttataattatatttaggttaattagtatttttttctccccaaactttgatatgtaccaaatcacgctccctaaatttttttggccgttaaaaatttcttctgaactatcgagattgttagatttaaggacttttgtctaatttcattcaattttactgttttagtaattatttatgtactaaatcatgctcctcagactttgatatctaccaaattacgactctcaaattttgttatgtactaaatcatatcccttgaactttaattcatgttagaatttttttactaaaattatataaaaatccttaaatttaacaattttaatagttcaggagaaatttttaatgtcaacaaaaatttaaaaggtataatttggtacatattaagattaagaagaaaaaatcataactagccttagatttacggtagctatttaaaacatgccgtaaaattttaataaattttgataaatttatataacaccctaaaaacatgtatgtttgaacactagaatattgatagggtagatagatgcactctttttaggttccatccaagcacccaatattatttaatatttttttcaaaaaaattaaattaaataaaattgaagatgatagttactgagatagagagagaatatgtgctggtagctactctctctctctaagctttttctctcttcctataaatactgaaacaaagcctcacttgtcccgaataaaacagcagcaggtataaagatagagagagagaccatcagaccactctctgttgttgtgtgtgtccttctcttctctctctctctcactcttttgtagggttttcattttctcacactctctctctcatttccatttctctctccttcttagagagagaaactgaaacttcgagtcatggattcctatacgctacatttggctatggcggctctcgtcggagcttcctttgttgccgtatccgcctactatatgcacagaaaaaccctaactcagcttctcgagtttgccaagaccgtggagcgagagagggaggaggtttccgatgaaggcggcggcgattcgccgcagcatttgaagaggagacggagccacgcccggcggaaggggaataattattataggcgaagctcggcgtcgatgccggatgttatggcgatctccggtgcgattgagagcgaggataggcggaatggtctgctacatgttgacggtattccgtctgggttgccgaggctgcatacacttcctgaaggtatggatttggaactcttactagagtaatatgcgttgtggctttggtatcgtgcttttgatttggttctgtgtttataattttttttggattattgaagtttagtagcgtgttctcaactgcctctgtatgagatgatgatatgtatgaattgacgtgtttatattcgtcttcgaagtatcaaggatgtttggttatgcagtagaaagccgtgtaggattttgtttatatatgtgtctgtgtgtgtttgactgtgtatttaatgctagtgggaaacagagttaacatggaagttggggaagtaatgtgtttgaatactgggaatgccccttcatacatcgatggctaacagagtcgaatttagctttgtcattattttaaacaaccagagaaaggaaaaagaataattagaacttagaagcacaatctaagttcttcaagcccctaacggagaaaaatgtaaatttctaaaagacgttaagtatttctctttatttaattgttttgtttcatttgttttagaaagattgcgtagaggaatccataataactgtctgattttgtaggtttctgatttctggagtctacatgctaatatgtatgatttttcctatagtattttatgaataagaatttggtgaatgacccaatgaaactttattagctcctcatgtaataaacaagaggaacaattgtggttgttactgaaggtattttttttttttttggtttttaaaagacatactaaaagatttaatttcttattgtttaggcttagacttcctcttatgttggtggtttttttcctaacacagaaaaagacatgaatttcttatatttgggttcttttgtttgataggtaaggtaattatgtattgtacgcactgaacttgtttgcactgcaggcttgattatttatttataaataagtaacaatataatgtgaattgacatcatacaaccatattttttatgcagggaagtcagctttacatacgaccacagccaagagaactagtagccttttgaggacaacttctcccaagtcacctgttgcaagtggtagtgcattcgagagtgtagaaggttcagatgatgatgacaatttgactgataattctaaactagacactacatacctccttactaatggaaatgcggtgagttatttaacaactatgcaaggggctatcattgtactgttgatttgaactttagatattactccctgcatgtcctgtgaacatattctttttagtcacaggagttatttttatttgtaatttttacccatctgcagcaaataagttttaattgcaagggactattcttgaattttggaatatgcagggaacagataaaaacctatgtgagaatttacctgaccgtgttaaggaaaatggggagccattgccaatagcaggtcccactatgatccgctcacatagtgtatctggtgatctacacggtgtccagcctgacccaattgcagctgatattctgaggaaagagccagaacaagaaacatttgctaggcttaaaattaccccaatgggtattgatactctctcctctgtccttgacttggatattttggcccattttttgtttaatttattaattttttttataagttaatttatggacgcgaatctggaccactccgtacacacactcccacccaactattggagttatctttaagtggtggctttcacttcttgttgtttatgtattttgaatgctgtttttatatgagcaattgggtttgatatcataacaaaatattttagtccagtatgtaaagcacgccaaaaaaggagtgagatttggtttgattatgaaatggccatccatataattatattatacaatagtatttaaaaaacaagttgtgatgtttgttgttattacttaagttgataatttgaatgtggttctcgtgtataatatagatgcatcaaatgggctaattttggggaaatctttctctgcttctactcattatatttcttgagatattcatggcctgagtagtgtatgtgttttaggttattaatttcataaaaaatccttcaactttgaaattactgagatggtagcaaactgaatgcaaatatgagatcgaagggttttgtttcaagggttttgttctactaatgtttattgtattttctgacagaggttccatcgcctgatgaagtggagtcttatattgtcattcaagaatgcctggagttgaggaaaagatacttattcagcgaggcaattgctccttgggataaagaagttatatctgaccccagcaccccaaagcctaatccagctccattcttttatgctcctgaggggaaatctgatgtgagtttgaaattgtggctcttgtattccattctacagctgaagaagtttgtgtttttaatattttttgttattttcattaacaactacattttactctgcagcattattttgagatgcaagatggtgttgttcatgtttatcccaataaagatggtaagaactgtaacccttttttggtctatctttttgtctgttcaagtgaatgtctctctttctatcacatttgaataggggaaaggaaataaaggaagaacaaagaagaagaaaagtatgaatagagttggagtttcttacttgcatttttatccttttcagcaaaagaagagcttttccctgttgctgatgctacaaccttcttcactgacctgcatcatttacttcgtgtcattgcaactggaaatattagaaccttatgccatcatcgactgaatcttctagaacaggtaaagtttctgatctgtgcttcattgcttaactgcactctgatggacctattttgttacaaagttattatggtaccttgacaatatccttatgtgtttgccattcagaaattcaatcttcatttgatgcttaatgcggatagggaatttttggctcaaaaaagtgctccacatcgtgatttttataatgtgaggaaagttgatacacatgttcatcattcagcatgcatgaatcagaaacatcttttgaggtttattaagtcaaagttgagaaaagagcctgatgaggtaatataaattttctgatatattattaagtgatcttgtctccctttcatctctctctcggtctctctctcttaatgtgcaatttcactttgtttaacaataaaaagtttactaactctgatgtggagatatccacacagtaactaataataagaatttatcttatctattttgtgaaaactgcctagcactgtatagttactgaaacgtaattttgacttttttcgtttttaggttgtaatctttcgagacggcacatacttgaccttgaaagaagtttttgagagtctcgatcttactgggtatcatttcatttgcttattaaattttactcatctaatataaatatgtgtatatatattattatacgagtaattatatatgcacccaattattacagaatgtggcattgcttttttaaatagtgggccttagtttaaataaatgtgaattagaaaaactgcaatgttactgtgtgtaatatttctgtatttatggtgtacaatacatatcattactcacatatattcctagttatcacacttcctacaattgtctgtttttgtttttacactatgtaatctttctttgcatctccttggacaggtatgatctgaatgttgaccttttggatgttcatgcggacaagagcacattccatcgttttgacaagtttaatcttaagtacaatccctgtggtcaaagtaggctcagagaaattttcctaaagcaggataatcttattcaaggtataatctttattatcaatatttttccattttctttttaaatgtcttatgttaatctttatgtcgaagtacaacagtcttttttttaatccttctagctattgttcattttgataatacattttttgtagtgcttgcttctatttctctctatctctcttcccttcgctcatcttaataaaaatttgatccttggatcattctgtattctgattattgaaaacacagttttcttcttgatgattcatcttataacttgcggtttgcttttgacactttgcgtaggtcgttttcttgctgaggtgacaaaacaggtgttcactgatcttgaggcaagcaaatatcaggtagctcacttactccatattatatttcctgtacacaaatttaggccctgactagcattgattggttgctagtttgtattctgagctaattggtaggagagtcttgagtagcaccaccttagagtgccttttatttctgtcagtaaaatgctttaggggcacgacaaattttataatttactatgaaaattggatggtgatcaatataacattgctgtggtggagttgaaattgtttttttggagtagttttttacggatgctaaatgtttgatatgctgttcagtcggatctcttatctttatgataagtctaattaagtatacttctaatatatattattgagtggctatcatattgttaatatacagttgacgaccaaagcttaagttctggagttgttctattgagtcattgtataattctttttaagcttttttaatttatttttattgttttttcgtgcagatggctgaataccgaatatcgatatatggtaggaagcaaagtgagtgggaccaactagcgagctggatagtcaacaatgaattgtacagtgagaatgttgtttggctaattcaggtatttacatgaaataatactatgaaacatctttagcaatttctcttgtaatagattatcaaatacttgcacacatacaccgtcatttcatatttgtactattttaatttcagctcccaagattgtacaatatctacaaggacatgggaatcgtcacctctttccagaatattcttgacaatatctttcttcctctatttgaggtcactgtggatccagaatcacatcctcagctgcatgtttttcttaaacaggttttttttccttgtatatttaatattaaaagaccaaagtttgctgcaattatggaatctgataggattgctaggtatatgctaatcagttatcggaggttgctctgatgtgaaagagttgtctcttttttacaaatatacttacagatgtgccatgttatacttaaaaccacaagtgtcctctactgaaatttttcgtcttgtatttatccttcgctctttatttatctccactctacagttgactactgtaatgtccaacttttaattggtttggaattttcaggttgttgggttggatttagtggatgatgaaagcaagcctgaaagacgccctacaaagcatatgcccaccccagatcagtggaccaatgccttcaatcctgccttttcttactatgtgtattactgctacgcaaatctctacacgttaaacaaggtatttcattatagaattttataacagtacacaccttgttaggttgcatagtaaatcatggtcctcaaccaagtcaagtagtatctgtttgtatcctttgaattaatctatcaaagtactagggttggtaatattgactttggttacttcaaaatggttggttctggagcaataattgtagtatcatcacaatttagaagctttgccatatgtatctttagtatatatttgttgctttgtacttgaaatattagtttctttcctagtataatatttttctgtaactgtttcttggtgctgcctattgtattgtatttctgatatgatgagcgtgtaatttcaagatgcttacaccttatattttgtctcttgctttataagtgcttaccttttagatttgtttttcagcttcgcgaatcgaagggaatgacaactatcaaattccgtccacattctggggaggtattgattaattccgcctttttttttttaattgatacagccattgaattgtactcacattgtgctcatgataccttcaggctggcgacatagatcaccttgctgcaacctttctgacatgccataatatcgcacacggaatcaatttaagaaaatctcctgttcttcagtatctgtattatctggcacaggttagaaaaaaagaagactttgtctcagggtcattaatgacttgttctttgtgtgatttcttagtgggggtacaatacttgcttgtcttatcagattggtcttgccatgtcgccactcagcaacaactccttatttttagactaccatcggaatccttttcccatgttcttcttacgtggcctcaatgtttccctctctaccgatgatcctcttcaaatccatttaacaaaagaaccattggtggaagaatatagcatagctgcttccgtgagtctttctcactctaaaactctactcagaattggtattttgtggttgatccatatcatatgtcagctgtattaaaggcttgaagctgctttacaggtatggaagctgagctcatgtgatctatgtgagattgctcgtaattctgtctaccaatcgggttttttctcatgctcttaaagtagagtattaacacagtcattccttgctttgtagttgtagggatgataactttttggaagtaatttatggtaaaaataatagtaataacaataatgaaaatacgagttcagctccaatttccagaaaattcacggaatctcttaagaagctttttcacatttccataattttttaagagctggacgtttgtgatggatcctaagattaggttagctgccagctaagatcatcagtcctatattttctggaaattatatttgataacattcacagcttcatcgcacactcataagcatgcacattacacatttattcatataggagtgcaaatatgtgtatgaactcaaccacacttcagagagcagtcttctgcagaatgactatccattctttaacctttagtaaatggtcttgttgaaatctgtgctattaaaatgagatttgtaatttatttgttctcctttgtggtttgtacattatacaccacatttgttgtagcggtgactccttatttatgagggtacttatttccttgtgcaataaccaattagcgattgtttctcagccttactctgagtgataaattttctgtttcagtcccactggattgggaaagagtactacaaaagaggacctgacggtaacgatatccacagaactaatgttcctcatatccgggtggaatttcgtgacacggtatgaatccttttaatggcgacaaagaattactatgcctctgatttacctttctcttcctccattgccttttgtgtttgctctgcatatcaaagaaatgcaattcttaattcttattaatgctgtactccggtgcttgccagatctggagggaggagatgcgacaagtgtatctagggaaagccatcatccctgatgaagttgacaagtgattctgtgagtcaggtcaaatattaatgtcattcttgaatggccatgtatataattaaagtaatctccaaggtgcctagtttgttaattacttgtttaactcaaataatagcaatctctttagaaacttaataatttccatctaattccatgagctaatctaaatcctggttcttctcggcttcttcaggatgtggaaaacttgcatttcgacagcaatgtggtcgataaaaccttacgaccatgcgaatgtgaatgttcgaaaattggctttggcaggcaggcaagcatatattgacatcaacagatgtcagagggaggagggtctaagaatatgaaggtataaaccatgtatatgatatataattcatatttagatataccgcctttatgtagagatataaggttacgagtgtcacgaatacaaagctgtagccaagaaagacatcgaaataattttgttccttccaagagttgaaaaaaatacgtattaaagaactattgataaagctgccgcttttttgtggttttgcagtatcttttatgtgtaaggtttctagaaaataaaaagggttgttaatggcaaggagaggaagaagctctctttgcctcttcaaattttgactcatttctattttctgattatatattcatacctgtgtgaaatatgctatgcttgttttaagttgtttatttataatttaaaccaacaaatcaaaatataccaagaaaggtgtttgctaatttcatatcaatgacttccacttaaattttattataattctaaattagcaaattactttctcaaaaggattactttgcggcatttttttaacgtaacaatacttaagttatatttttaaaattctgtaggtacttaactgttaaatattaagttattattcatatgttatttttttattgatatatttaaattaattttttttttttaaaaaaataaaaatttaataaattgtaccaatgcttgacctttagctacctacaaaaactttaggatttatgctttaaattacttttattcctattgtttttatttcttttgtggctagattactcaatactgtatgttaggaggccaattttaacgttatagtagtatatattgctaaagagagcaggcttttttttttttttttgaacaaaagcacaagcttacttttgattataaaaataatttaaaaatttaacacttcgaaaaatagagtttgaactttgaacaatttattgtacgtgtgagattttttaattttatacatgtgtaaaataaattgtttgaattctgtttctgtttttagcgtgttagatttttttgaattttttaaaattttatagaatgccgattatgaaaaaaattaaatgtaaaaaattttttgtttttaaatgtcaaaataaataagtgatgatatttaaattactactataaaaaagtactatatatatatatagtaaaatggcttacgatatctgtgggattcagttactgatttgtgggattcattgtatgttctttaatagcattttctaaaataaaatatatgcattactgtaacgatttgggtataggttgtatatgaacaatgtttaaagtaatatacaagggacaacctactttctgcttaccttaatctttccataatataacagttaatttatatagagaaataataagtgaaacttttgggatgattgattaggtatgtatgttaaactttcttgatgattaagagatcatagtgtttattaaataattttgttatgaatagaagaataatgtagttgaatttataaaagaataagctgggcacactttgattagtaattttttttatgtcaatgcctccaaatcaagaggtgaaaagtatcaaacaaaactcttaggctaagtttgaaatttgaattttggtgaggaaaaaaagagtaaggaaaatataaggaaaaaagaaagtgagaacaaaaaaaaaatacatcaattttccaagtttgatatggaaaatttagttgaattgagtgttttttaatacaatttttttttttacataccaaatatgagaaattatttttgtttaatttttttcctttatttttctttactcactaaacttcaactttcaagcataaccttagcaattatattcactttttgtacattaattggagtttttttgtttacacatcaaacaatgttacttgcttatgttaaaaatgatcaacacaatgtaaaaactaaag

SEQ ID NO: 296291 - DNA, 1936 bp, Cannabis indica
tgttttttttttcttcatgatttaatgtataaagttgtatatttaataataacaataaatctgaaaaaaaaagagcaattcacgcaaagtactatttttcattttgacacatttatgttcaagtattcttattttttttttatatatataaatatattttttaattttttatataaaaaaaaatacttgagagtaatatatcaaaacaaagtcaaaacaaaaattaatatacaaataataaaaaccaacaataaaataacaagaatgtaatataataaaaataatataaaaacgttaaaaaaccgtattttttataaataattttaaaaactgtaaaaattttaaaatattgtataatcatatttttgtaattttttttattattttatatttttgaaataattccaaaaatatatcaaaaaatattgcacacatgatgtgcacaaaagtatttcacacatcatgacttaataattatttttaaaagtaataatattaattttaactaagacttcctgctattttaaaaaataatataaaattagcatcacattattgtactcagtaatataatattttacttagtgtaataattaaaagatacctgcatctaaattgttcaaactctggctgtaacggagatgcggacttagatatcaacttataattatgagatccaaactgcaaacaagtccaaaataataacattgactttaattaggatactatgtatttttctttatgttgattgttattagctaaatcaagtttaatatcaaaagaactaagctaactataaaatataggtaagtgtataataacattgagtttaagtaggatagtatatatttgtgttgttctccttttttcattttttatttctagagggattcattcttaagattttggagggaaagctcatcccttcctatttacactctctccaactttctttatagccaatcaagtgattttggctctcctcccacccctttccttcctactctctctttatttattttttttaattaaaacgtgtatatatacattgtacaccctcccatacctttatgatacttgagctagtcacaagtgatctccttcctactccctcgatcattttaaaaattcctcttgccaaacataatattaagtttctaagatttgattgcaaaatattaaacttaaaatgaaattggattaagtttctctacccaaggttgattaaataaaatgtctctctagccaatatattgacttgtacaaaatttgagagaaaaaaaaaaactaaacttttaaatatcttttaattttagggataattacataagacactattttttgtaaaaaaattacatttttacattttaagaattttttccacatttttacggttttctataaaaagaacacgaaaaaacaaaaaaatacataaaaataacatcaaaacaacaacaaaaaaaaaatatacaaataaaaaaaaacaacaataaatcaacaaaaatacaacataaaaagaccatattttttgtaaataaaataaaaaaaaatcataaaaatatttaaaattccgtgaaaccgtatttttgtaacttttttgttgtttttgtatatttgtaaaataatcccataattttacttaatattgtaaacgaaagaaacatttacaaaactatcataaaaatttcaataaaacattattttttattctatcatataatttttttttcttttaacatctaagacaaactttaaatgaaaaacatattaaatagtctcactaaaaaactcttacttttataatcacaataaaaattatgactaaaataataaaattgtaactaactataaatcattcttattttattgctaaaaggtccgtgactaaaagtattagtcaagaaaatcacaatttgttgtgactaaatgtattttt

SEQ ID NO: 296292 - DNA, 3347 bp, Cannabis indica
cgtttaggggaaaagatgggaagagaggagttgatgtaattgggggagggtattttggagaaaacaataaagttgtcatatattagaaacattgataggtataagtttagaaaaaaaaaaataagataacataagcacagaaattcaaatttccttatgtatattacttttgtttttagagaattcaatatgataatttgatgaatgatgattattatacatgttatgatgttaaaaatttaataagaatttttgttttattctattcgtatttttattcttatttctatttttatatttatattttcattcctctcaaccaaacggcacctaatttaatttaaagtaaacccccaaacataattatgatttggctagttaggcactgacgcagctgcactaaaaagcaggccatgaaattcaatattcaaagtggagtagttgtggaccctaaaacaatgtgctatatataaatctaccaaatatatgttaaaattattggaaaactatcatatatatttaaattaaatatatgagacttgctattattttgaaccaatgacattatccaaaatatttgagtgtcttatggtactcatttatctaaacaaaccttttccttttcttcgagaatatacctaaatatctcactttttcttaataatcatatctttatttttattttttttttatcaagaaataattatatattgatatatcatattattagtatgattaaattttaaattttatataataattttttttatataaaatattgctaattattcttaaaagtactctcaataacttttctactgtatctttaaattataccaccaccaaaattttactttcgcctttttaaacacattttttatcataccataccttagtttttttaaaatatatcaccaaaattaatttttctaaattttaatatatttttttccattttaaatatataatattaatatatacttatattttcatacaaaaataattattaaaacacaaaaaattaataaaatatatttagaacaataaataatattttaatgaaactttaaaatgaaaaaaaaaaattagagcaactcctataacgttttttattacgatttttaaaattttttaaacttctgtattttagaaaaactattttaagtgctctaatagtacctaatagtaatactctatgaaataacacacttttatctcatattctaattatttattttatgattacgaaaattaaaatatgagggtcacttaaaagaagaaatatatgagctcatctcatatagtaatgacacataagtagattgtatatgtatcattaactcttttcaaaaaaccacattatttatatttttaaatttactttatttaatttattaataattaaacatagctagagaaactttatttctccacatttttgttctcccattcctctataaatacccttctaataattcactactcctcaccatctctcctatagtatatctttgtccacattattatagtatcatatataatgggagaaaatattaataatggaggaggatatgcagacctagagaagcagatgctaatccttcatgatcatgaagaaaagcatttcatgtcaagtgagatcgtcagagacatcattatcggtgtctctgacggtctcactgtcccgtttgccctcgcagctggtttgtcgggggcagacgtttcctcttctattattctcattgctggagttgctgaagttgctgctggagctatttccatgggtctcggagggtaaaattaccaaaataaccctggaaattaaaataataatatcattaatatatgttaattagttgtgttttaatattaattaattaattattatgtgagtaaaaggtacttagcggcaaagagtgaagctgatcattatgtgagagaactcaagagagagcaagatgaaattgttgcagttccagatacaggtattaattaatattcattttttttagacattattaattacttcttaataattattattatatatatttatgtatttatatagcctctcattctttttattccttttaaaacaaaaataattaagaaagtaaaaaaaataaaatgagcatatattatatactcatcatgaagagaagtgtttgtccttaaatatttcataattaacatttagcagttttttatattatttattagattaattttaaatgaacaattatctataaatgccaattcattcccgcaaaatcctttctcttgacattggttagtaaacaaataaaataatctttttttttcttttttctttcggcaagtttaagagttcactcgaaaactgttgttagatatttggtttgaaacgattttgccccaccccttatagtaaatactaatcacaaagaaaataatttaaattaaaatgtataaaatccgatattacatacttaaattaagagtattgctattaggtaccagtagtacctagcacatttaagacgtgtcgctttgcgattggctagcgatacacttcttaaaagcttttatattaaactatataggacccgatattaaattagacgaatatcgatattgacacgtaagagagtgctttataccactgatattttttagcatttctcttaaattaattaaagtaaggtggtatagagttagataagaaaaaaattggtgaagtaaatgctttttattataagtagtagtggtgaatggtgagagagcaaagcatctttttgtgagtaaaccaaatagaacatggtgataatattggagagaagagaacagttctctacactatacctacttttttacttacccaatataaaaaccatatgaatatctccattaagcttggagccaagagcctcaaaacagctagcataacattattatttatttatgtcatatcttcttacactttattttatgagtaaatttataagaattaatgtgttaaatgatgttaatgaaataaaacagaggcagctgaagttgcggagatattggcccaatatggagtggagccacatgaatatggcccagttgttaatgctctcaggagaaatcctcaagcttgggttgattttatgatgaagtaagtatgcatactatttctcaaaaaataaaaagatatatatatatatattctaattttttttttaaaaaaagttaacataatattatagctcaataaaaatacttttctatatgtagctataaacactatgaactaaatctttgagctataatagttcatttgatggaacattattttttaccacttacctaaaacttttaactatttt

SEQ ID NO: 296293 - DNA, 2033 bp, Cannabis indica
aggcatcagaaaataatgggtagtaggagagtctcagcacagaattaaatcagagtggtgcatgacattctcaatctctcatcattgccaatcctaattaaaaaaacaaatttcacttacactaacgaaaaataacaaacgagaaaattaaaatcaacaaaatatgagaaataacaagaaagattagtaagggttgaagagatccacgagaatgtgatcctaagggccgtgcttaacaaaaattattactttacaaaaaatgaatgagaagtttaccttaacacaccaaattgtttcttcaatcttcctcactagaaactatgatcaaaccattccaagtcaaaagaatcctagatatagccaacatgtgaaaacaaagcaaaaaaactacaagccaatggagttgaacttcttcattcatgaaaagggctaaccccacgagaaatatgaaatagatataatggtgatggatgtgtatgatgtaccattcatgaaaatcaactgaaaagaagaaaaaagcacagctgacaaagttaatagaatggaaaatttaatgttgggaacaagtataacctcatttgcacaatgcagcaaaaaaagctaagattgtcccgttgtattaggttgattctgtgttcaaaaccagcaagaagagaaggcggaaaaaactctttaacaactaaattttctgagttttcaaagttaagattgaccttgatgagcagaaatacagaatcaacaaaagtaccttctttgtcttggatcttagccttgacaattgacatcgtcgatggtatcttaaaccaatgacttatcacttagaaagataagggacaagaattagtattttatttcagtcaagctatgtttttaatgtacaataaacaacactatatagtaaccaaaacaaagcgggtgttgctgcaagtcgtcgatggtatcttaaaccaatgacttatcacttagaaagataagggacaagaattagtattttatttcagtcaagctatgtttttaatgtacaataaacaacactatatagtaaccaacaaagcgggtgttgctgcaagtcagacagttccaaatgcctcaaatatttgagttcataaaaggagtttttatgctccttttcacccatctaattgaatcatcattcttgcaaaagccaaacacaacaaaaccaaatcaataataataaatcccaatcccaatagccaaaaacacctatataagaaactagaaaataaactgtggcaaatatggttttggaaatggaaaattttcacatctcaaattacaaaaaaatgcccaaagaatgatatatttaaggtgtgaaaaattggaaggtttcacaaggaaaaccaataaaacttcaccaaattaacatagtgctataacgcagctatgactcgacacgcttccatgcttattgaggaaggcaatcttaagggccacacttaacaaagaccaaaaacaaaaacaccatcccaaataattaaatgatgtaccaacacaaaagttcaactgcacacaagtacaattgacaaacttggaaaaatggaaattgatttaggaaaccaagatgccctctgatgaaatttactagcaaaaaagggttcaacgttttgtttccatttgcaatgagcaattatgctaatatatgatgagcaactaggacttaatctaaaaaaaataaaacataaaaactacaggccaaaatggttcacacaatggaaaaattcagaactagtacacagtatggtgcaaagagacatctctaggagacatatagatataatggaaagaattgaaaagaaaatagaagcaaacatgtacaaggtgtgccatgccattcaagaaatgataacaagcactagaaagttcaaagttgaatagggaacaagtacaatctcttcagaggaaaattagacatgcatttcagagtaaaggtttgtgaccaataaaaagactagatccataacatgtggtgcagctgcaagcaagtcagacagttccaaatgcctcaaatgttt

SEQ ID NO: 296294 - DNA, 3219 bp, Cannabis indica
tatatatatatatatatatatatatctatgaagattgcttaattataaatattttccccttgtttagaatcgtttaagatgctgtacatatatatatttatatatctgtgtgcttgtgtataattatgggagggaagagatgagaatgggtcttttttgatttggttttataacaaagaaatagaaaaatgttgaccaaagtattgaattaggcagagtattcttaaatctttttgacatgtacgtatactcttcaaaatcaatcagtaaagaccacagaagaataaacgaagtattatttagtttttcggctgagccatttagtattttattgtaggaaatcaagaaagctagttggtaatgtgaataatgctcaaaattcacgcatcaaggccgtttactctagtgagtattgggtgccagagaagaactcgcgcgagggaatttggtccataaggttggttttatgtagttgattatgttctcttaataatgcctgttttttatttcttacatttttctatcgtttattgattattacctattatagttttaaaattggtggctggactttttaggaaggatttgctaggcccgttgctgattatgttttcataacaattcccctcttctatttatgtacttgtggctggattttgtagggaggatgtgcaaaccccatcatcaccgtacttccccacatatgcacagggacaggggccaccaccaatggtgcaagagcgctttcagagtgtcattagtcagctatttcagcatgtaagggagtaggtatttgatgttttaactgattaccttggctttggcttgttagtctcaatcagtttcttccttctgggtatggttttcagagaataattcgatgtggtggtgctgttgatgatgacatggccaacataattgttgctcaacttctttatctcgatgctattgatcctagcaaggtccggcgatggatgcttttttttttatattattatcaatcagcttaatttttaatattttctcatggctactaaaattttaaagattttatgattaatccatattatgctttctgacactaaattgtactcaggatattgtcatgtacataaattcacctggtggatcggttacagctggtaatatatacatccgaagctggtttgcattattctctcttatgaaatgtattgccacttaatttatttaatgctctatatttgtaggaatggccatatttgacacaatgaagcatatccggcctgatgtctccactgtatgtgttggactagctgctaggtacttgattgattcaatacaaaattagtcgccttttggtgacttttaattaaagacaaattactctgtgtgctaattttgtatctccacttttctgtgtacagtatgggagcgttcttgctaagcgctggcactaaaggtaaaacagtttcgatgacaggttctgtttatagtttttcatttcatgttttctaaagcaattcttttgtttgctatataaattaagggaaaagattcagcttaccaaactcaaggattatgatccatcagccgcttggtggagctcaaggtgggcaaaccgatatagatattcaagtaagtaatattttctctcgacttcaacttgtcatcatacctttaactccttgttggttaacatgcttaaaagtggtcttttgatagagtgcttatgtccaaatagtggcctatcacatataaagttacagattagaattgaacttttatttttctctgtgttcttacaagttctacttcaatatttatttaaacagggtaactgcagaaatggagttgtatctatttttttttcttccataactagtttatgattggtcagtcagtccctaacacatgagttatttgtttaggcaaatgaaatgttgcatcacaaggcaaatttaaatggctacctctcttatcacaccggtcaaagtctagacaggattaaccaggacaccgatcgcgatttcttcatgagtgcaaaagaagccaaagaatatggacttatagatggtgtgattttgaatcctctcaaagctctccagcctttgcccgttgcagcagctgacggtgaagctggtaaatctgccgcagaaactacatcagacagctaaggtgatatggcctgtaaacttctcccaaaaagcatatgattatgaataactgttgtagagttcgatgaaaggattcctatagttttcccatctcattttaatgtcgagcaatttagtatttttgttaagacttgagacagagtagtaggaaatctttaagttttgacatttcgtccctctgagatacatattgagaaatagattatttgcaattgacttatttgagttttttctcatgtgaactgctggagataaatttgtgaaagagaaatggaaggaaaaaaattattgagagataggattctttcctttctataactaattgataaaagtgtcaatatagccatagaaagttaacagtttattaatcaagaatttcaattaatattagactattgtccaagttatgaaactaatatatgtctatatcaatttttgcttcaaggatacaaattcaagcattaacttcataagatacatgataataatatatgcctatcattacaaaattaaaatcaaagaatttatcatgcaacattcaaattttgcgtctattaatcacaactttttcaaatttgacaattggctcaattgccaataaggtaataaaacaatagcaaacattttaaacaataaaattacttgaatgcatatacatcaatgacatttaatatcataggcaaagtagtaataattacaaattaagatttatcaatgattctaactatatgaaaggttcagctcataactatccagatttgatcaaattatatgttagatttttccaactgaaatggtaaatactattttggatcctgtgttttgcaaaagttactaattagaccttctgttttgttaaatgacaaaatagattatgtattttctaaaattgtacaaatgggaccttgaattgattttttgtcaaaataaaacttaataataatctgatctagagatattatgacaaaactggttacattttctatatctgttcgtgttagaaattgttttaaagttgattacattaaaaaaataatttttttaaaaaattgagctcagggtc

SEQ ID NO: 296295 - DNA, 3595 bp, Cannabis indica
aataaataattaattgtaacacaaaaatgttagtttcaggcaagatcaataagaaataaataaagtcgaggtaagataaaacttcaaggtggatggggattaaagccaatatagcacatgttgttaatggggtaactttttatatttatttgtgattgataatttttttttgaaaaaaataataatcatacttatttttacttaaatataagctgatcccaggacggaggagcttccagctgttgtggacacttttcaaaagttttattacaaagacatcacttggcacaatgaatacgtgcaacaagcttatgtaagtttacattgatatttattaattgttaaatatttctttcaatttgtttggtattcaaattgaccatttaatttatttgatttttgtaggagaaaatagttgaagtggctacaaatcaatcagcgcccactaaggatcagcctgctcatgatgatatagatcctacctagtacccacgagacctacctattatgaggcaagtactgagtaagcgatctcaacatgtcagggggccatctctcgatattgaaggcaattacggccaaaagagcaccggccacgtcttctgctgctggctcacagactgttactatggaacactatgaggccttacaaaggcaggtgcaagaggcacaacaggaaactcaatatttggctatctctctccagttgttctcttgttttaacttgcttgctatggatccacttctgccattccccactcctcctggtgttaggtcatcatcacttcatctcaagactcagaacaacaacgacgatgatattactcgtctttatgaccatagataatttattactaacttttgaacttgactttttttttcctgaacttcttttaatattttactttagtacttttgtttagttactaactttataactcaaacatatttttatagtagttcaattaggattctatttaattatatatgtgaataccgttttttttatttgattatgtttctttaaaatataacttaatatttaaaataaattaaatactatcattaatcattaaaatataataaataatcaaatttaaaaaaaccgaacaaatttaaaaaaaccgacaacaacaaagcaagcttttaccggcgacacaaatgcgcctacaaaacttacccaaccatcaacgaaaaaatggtaggtaagtgttttgcctatacataagtgtgtcggtataactatttcctgtaatattctaattggagggtaagagttttacctgctgatataaaatatacgtgccgataaaagttttactcaacatttaaaatatatgcgtaaactttttaccaatacaaaactgcggtggcaaaagtcattttacccaccaatgggcaaatttagtcatctattaacatcaatgtttgaatttatgtcgatgcataatctcaccagtataacctagttttgtcggtgcatttggctattgcaccgataaacactgttttaccgacctagtactgcaggcaagttttattggcacattgtgcctagttttgttggcacgaatttgcgaaggaaaaaatcttctttcatgtagtgtgatcacttataattgttattcaggaattcaaatcgaaattctaaaaaatgagatttgaatatgtgctttgaatattgttatggatgtaaatttatgagttactttatttaatgttttctttgtgattaaactttgccatagaaatatagggaattttcacatagattgactttgtaagtcttaaccagattatgaactacttaattcaacttgtcaattgaatagaaagaaaaaaattcggtaattgcattaagatataatatttaagggcttttaatttttacacttcaaaacgattttttttttgtatttttacggaattcgacatagaaactttcatagcaactaacggagcaacctaaatcgcaactaaaattcacatagcaacttaaatagaagtcgtcggagaaaccaccgaagcaactcaaactgtaaattttaaaaaatatattaaaaaattgtatatggaacaatttccctaataataatttaaattatgtaaataagatattaataaaataatatatactataatttataatataaaagtgtgaggtcatgaaataaaagaaaaatgtaactttttcatttttatactttaaaataatttttttggagtatttttacgaaattttatatagcaactaacagagcaacttaaatcgtaaccaaaattctagcaacccacatagaaattattggggcaaacctataccttaaatttgaaaaaaaaaattaaaatagtatgtagagtaatttttcgaaaaaatactttaaaataattttttttggagtacttttacgaaatttcatatagaaatttctatagcaactaacggagcaacttaaagcgtaaccaaaattcacatagaaacccacatagaaattattggggcaaacccaaacttaaatttgaaaaaaaaattaaaatagtatgtagagtaattttccgaaaaaatattggtgagttattttaattaaaatataaagtatagcatctgctgggagtgcttaaagaactgaaactcccatatatatgagacaccccatgaaagctaaattgtcttaattagccaaaacaaagagatgtttttgatataatccctacctatcaattatatatacataaatataaagagagagaagaaataaaaagatatagcatatcaagtaagttgcaagaacatgtgctgtagtcattggcatattctaattatgtgttcgacctaaactaaacccaaaaacacataaagaaaaaagcatagaatattatatatatctaaggaggatttagagtacccacttaaaaatggtagctagctttttaaaatagtgatgagtgtacttcaatgcttcaaaagtctagatcaaattccctttctcttttgctttctttagctcatgatttactttggacggccctcaatattttaccttttaaatatttatttataaattaatatatttatatttaacatcataaataatatttctactgcctcatcagttcgtcctctctgatgctctataatttcgaaaaagaaaccaaaatgacctcctctcctttgattatcatattctcatattcctaaatatttatatcatatattctaataacatgttataaatttacgtaccatgtttttttttttgtacaaatatatatgtacataagtgttttatgcttgtttcgttaaattctatatgcaattacacagaaaaattactaattattaacaatttatatttatagctaataatacaaattcaatctttaaaagttttgttcggtactccgcatttttctgtattgtattaaattagtaaattatcatgtttggagcatagaatgtattgtataattaataattacaacattatattttggaatacataaaaaaaaatgacgtataaatatgtattgttatgaacttttttttttttttttttggaatgggaatgggaattttattagcaaaccaaatccg

SEQ ID NO: 296296 - DNA, 3321 bp, Cannabis indica
acattggttaagcaagttaaacaagtaagtatatgttatgtttcgtacactatgaggttttctctgtgtcgtacagcaggaggtagtgtatctgtacggtgcctgattggtgtgcaacgataatatactctggtgggcagcttttattgatcctctggtgatctagggttgggttttggctcttattccctcgtatcctttcggtatacggctctttttctttctttctctctggttctgctcagactttctgcttgttttgtgtctgtgttgttctggaaatggctagcagttctaaaggttcggaggttgaggtgtgcattgttgaggattttaagatttccttggatgaaaatcctgagctggggattgatgtggtggaaaaatcggtcgtagctaagttagtttctaaaagagtgatgtttaatggtttgttgcgatccattctcgggaggaaatggaggttggaaaatgggtggaagctgattgaagtcggtccaaatacgtttatcattaggcttacgagaaaacaagaagccatcaacattgttcgaaatggtccctggcctgtggggaatggttttctggttgtcaaagagatgccggaggatggaaaatggacctctgcggacctaacctctactccgatatgggttagggtgtatgaagttcctcctagatactggactttgaaaaatgcaaatgctatagctaagaagattggaacggtggtctcgatcgatcgtctttggagaaacgggtttccgaccaacgagtacattcgtctccaggtcagtattcccttgaataaacctttgtttgttggtcttttcttacctatggaagaaggtgtgagttggtgttattttaaatatgaaaatctctcttctgtgtgttacaaatgtggtatcgttgggcataaggaaaacttctgccgtcggttgaggagattgattgctgatgattttaataaaactgtgcctatgtatgggccttggatgcggttgggttcacgtaaaaaggattgcttttctgagtatgaaatatatgaacaagatcatatgaaccgtgaaatggtagaggctcgatcacaggtggaggcaagagctctcctagtgccgggggaggataacttcgaaccggctctcgtggggactgagattcacctggaagctttagtcgaagctgcggctgtgaatgcgggtaatgatctagaggttgctgtgttgacagaacccattccggagatagaaggtgcggtggtggaagaggcccagcccgtgactgcttccgttacaggtgaggggcagattggtaatttaactgccatttaagacgtgcatagtaaggaagctattgaggttagtggggagtctgggagcacgtgtgttttttctgctggggaccattgtgtttctttgaatggcaaagaaaatgacaaaaaggttggtggagagaatattccgcatgtggatcattttgctatggtctttaaagccactttgggctctacgatggggtcggcccataagagctctaggcctactagagggaaaggaaaacaaggtgtgttatgttttaatgaggggcccattaattcttttaatgttttggttaggcctgggaaaaaaagaagaatagatgaagtggataatggaaagtgttataggccttcaaagtctcctttctctgccactgatttgttttttgataataagagtaatgttgaaagctcttctatgccttgtgaatggaactatggaaatgatatggtgaaattggatggtgcggtggataattttgaatctatcaaggtggttagtttgggggaagaaaatgccgagaaggtgggagaagtggtcgatggaggggtttcagtggacgggtttgagaatgggtcggattttgctggggccgaggaggcgggccgtatcatgcccccaaccccccatgttagtcttatcttggaactgccgagggcttggcaaacctgaggcagttaatgagctccaaagattaattcatagtgccaaccccgatgtcatttttcttatggagattaagaataatgcattggacatggaggatatatggtttcggttgggctttcttaatgggacgacggtctcttcgattggcccgtctggtggtttagctcttttttggagacgcggatgggatattcaagtgattgaaaaagatcttaataagattctggttcgtttcggcggtaatggaaataccggggattgggtgggttgtttcacctacgctccgccaagaagagacactaggctggtttttttgagggatctttgtgttactatggaaagtttttctgacccttggattgttatgggggatttgaattcggtgttatccccggatgataagtgtgggggccgtccagtttctcaggtggagggccaaggattgagagagtttatgtttaatctgggagtcgttgatttggagagtgcgggtgtcctgtttacttggactaatggccaagttttggataggctgattcgggaacgtcttgatcgggtggtagtttcctcaagttggttgtttcttttcaagaaggctggggtgaggaacctgcctatccggtattcggatcatggagctattattcttgatacttatatggaaatggagaatgtggtgacgccttttagatgtttggacgcttggagtcgagatccggattgtagaagggtgattgaggaagcttggaaggaagctattggcggttttcatagcttcattctttgtcaaaaattgtctctcactgctaaagccttgaaagtgtggaatgccaatgtatttggtcatttccaaaccaaaattaaagctcttgaaaaactgttaggagaggttcaaaagcggcctccttcaaatgagaatgtggagttggaaggaactattatgtcggaattggaggaagcggagctttgtttggagtctatttggaaacaaaaatccagggatggttggcttaaggagggtgatagaaactccaaattctttcatgcttctgtggaagtgcgccggaaaaggaattttatttgggaaatttcttgtgatgatgggactttgattgagggcagagataatattgtgcactatttcagagctaactttcaagaagtctttacctcttcaaatcccttcattgatgatggcttggatgatcttattcctcggtctatttcggatgaggagaacaatttattatgtgccgttccctcggagtaagaagtaaagaaagtgctgtggtcgatgctgttgggttttatgccctaaataaaacttatt

SEQ ID NO: 296297 - DNA, 1630 bp, Cannabis indica
caattatttcttcagcttttggattgtgcttttggaatgtgctttcacatccgtttgttaggcttatcattttatagggtgtaaatagaatacccctaaataaattgtatctgtgtataaattctaaaacatgaggtattaatgtcgcaaataattcttttatttttactcaaattaaaggttgaaatgatgcgggtcttaatcagattttattttttaaaatttagttgtgattggtaaatgtaatttgaactagtattaaaaggatataacctaatttgcatatgggtttaacatagacttctagtcatagtgttaattaattttggtattttctaatatgggggttcggagtgtgaattattacaataaaatacaatctatactaagcacacgatttaattgataaatatgccattcaattccacttgtgtgatatatcttagattataaattagttttataattgttgtcttattttctatttttattatattttaaactagtttctatttagtttttaaattataaatacattttttaaaaaaaaaaataaaaactaaatatttatttgtaataatttcaaattatatgattatatgtgaaataatttaaaattataaagttatatgtgatataattttaaattataaagagttttactataaatattttaataatttaagtaataaaaattaattgttaaaagatttttttatagtaataaattgcaaacaaaaaattgataattataattaatttaatttttaaaaataataaaaatttataaggaaataatatatcaaattatattttctttattatttatttaattcaatttttaacttaattataatcatttaataataatctactaattaaaaattaatataatcatcataattacatattcattaaaattttctccgtattaatatatatttacaacttgaaggtgtgtgattttctggaaataggtagtattgtattgaaagcaaaataaataaataaaacagattattaatgatgtaatggatgagtttccttatcgtcatatgggacaaactttggaaacataactagaaaaggcataataatgtaattgtagtaattaaaattcatgataatcatgtttttgattgaattaattttatttaattaatttcaaagtgtgttgggtttggagttggggtgcgtttggtggagagtaattaaacaaatcaacttcgaagcgacatttggtttaataaaaactcaattcatttttattttataaaagtatataaatatatattattggattggagtaaaaaggcagcaaacccaaccttgttttgccatgcaatctcttcaatttcaacaatacaacaattacttccattctcgcgtgcaccaaccagattaagtgagacccacttggccgacaaatatatttcatttatttataaaagtaacataaatataaataccacatttgtacaatggagattggagagtggaggcatatatttggtatcaacgtatttatttttaaaatacaaaatcagagtgttaaagtaaaatttttatttttaaaattttatttttggaaaaataaaattacgttttgtaactatttttgttttttaat

SEQ ID NO: 296298 - DNA, 1654 bp, Cannabis indica
ggacaaagtaaagagagctagtaacttctagcaagtgaattctttgttttggccatgtcaaactgaacagaatttatgttgttttaataaaattgagtgctaattgacaacaaggatgctccagacatgtttgtcttctagctgcagaaacttggttactggaggattcattttatcttgttacacaacattttccttctcactctactatgtaatattcaacatttgcgcttgcatggtagatgttctcatgttttaaaacatcttttgtgaattactatacttgtttggcccttttctaattccataatgtgttcaaatttcttctactgaaaagaaaatttgttggaagtatttggttgatatagatattatatactaacctaaattcttttatatgatgtacattgttgttcttgcatgcaattggctaattttaaaatagcgaatccaaatttatttttgtatattacaaattcttaaaaaaaatttcaaataacatttatattatagtcgcggtaatatttttgttttaaattttttgtaatcactaaaaataaaaaattaatttttttagtttttttagtaaaaaactaaaaaaaaaaaaaaaaaaaaaaaatgatatttctataatggatttttataatggatattgaactttctaacttttatactgtggggacaattttttttcctttataaaatactgtatattttttatactgcttaaagttttcacagttattcaacaattattttttagttattctattattattttaattgttctgttttgttgttttacggttgttttataaaaaattccatatgacagtaaaattataaatttttatataaaattcagtatttttgtaaaacctcttttctcaatgctcctttcggttggggctttaggcataggcccacttatatttagggcccttttgactcgtttttattcttgatccaaacaaacaatatgatcatgaaagtgtttcccattttaagtaatatcaatgatcataaaacaatgtttgtttttctcataaaaaataaataaataaaataaaacaagttttttttttttttttttttcattcttccttgatggttattgtgtttctttcctttttcctctttacaagataaaggaatatggcaatgaaatgaatgtgtattttatacgtatacaattttttttattaaggcaagtaaaaagtaattgtgtgttaaataattgtgatataaaaatatgcagtgtctgctcgtcacgctcgaattgaaaagaagaaagagaatctattggtgacggacttggagagcaccaatggcacttttattggagataaacgccttactcctggtgttgtcgccactctttaccctggaaattccattacatttggtaactcatccattatcctcatcaaacattcatttataagtttagagtttgtagtttgtgttctcgtgttatatttgtgttactgttatatgttatattcatttataaaagattatttcacaaatacataaaaataacaaaaaaattacaaaaatacggttttattgaattttaaacattttcacaattttcttttttattttatttcaaaaatacagtctttttatgttgtattcttgttaatttatt

SEQ ID NO: 296299 - DNA, 5367 bp, Cannabis indica
aaaaagaaagaaagaaaagtctatacttctaattttattttatttgtttttctaaacatgtcttagtgggtaattaatataaaagataaatgataattttatatcaaagggacatgggatgcgataccaaaatagtttagacaatttagttactgagttaaggcggactagatatgtacttaacgtgaacccaaacataaaacctaatttttttataaataatatgaatgtgaaaaaaaaggatacttttgtaaaattttgagacatagtcacactaatactcacatctactcttacacaagtcaaatccgttttacataacacaattcttaggctcattttaagttaggaccagactttgcttgttttgtaacaatttaaaaagcaattttgtgattaattgttggaaagtataaaaaaaactatacaattttgttaagtaatttagaaaagaaaaacaaaaagtaaaaatgtcatgaaagaagcacgttaaaaaaatactctaaatcaaataatatatatttaattattttaattagagatgcacattttcttcacgggaatggggcttcgcgggactctgtccctaatgaggcggagatttcccatctaaataggaaacgaggtggggacgagaattacttttaatctccgaatgttaaacggggcagggacggggattacattccccgccccgacgatgactcgtttaatgttttaacttatttctactaatattttataatttataatttatgtttacttttttagtatattagtattttttttatgaattttaaattgtgttttagataataattagtttattaaataataattaatgtataatattttaatttttatgtagtttaatatttttgtatattaaaatttttattgtaaactttatttttctttcccgccttgttcccgaccccattaggggattcctcgccctatctccgatgatgaataagtacaaatgaggattaaactctttaacggggataggaacgggaaagcactccccgccaatcctccgcctcgtgtgcatgcctaattttaagtcttcataaaaacaaaagaaaagaaaaaaagtactttaagtggcataacataggaacaaaccttcaaaataatactaaaacattagaaaaaagaaatattaaattattgaaaaacgattgctaatttttattgttattactagtattatgaatataatgattagattgaggaaattatttccaaaattgaaaaagagccagtgtggcatttgacttgacctactctatttcattaagtgggagctacatgtctatccaaatgcatgcgaggataaaaaggtaatttcccaacacacttggcgcagcacctaccaaaccatatccaaaccaaacgcacccaacaactgagccccgacattgaggtcgagcctcaactccccgcctccttcgacccaatcctcgaaccccaaaaacaccgccgccgccacctaatccctaaaattaccaaaacaccccaaacccactaataaataaaaataaaataaaaaaaaaagaatgcttaacccaatgctattattgcacaaattaccatcagtgccctcgtcctcactctctctcttacagcaacagttctcgcttcttgttagacccgaaagaatcaaccaaacgcgaagaccaagaaaatcagactcgaacagaagaagtagtagtagtaaaaggccaggtactagcggcagcggtggtgttactggaagttttagggttacggcaatgcctggttcttcattcggtgctgacgataatggttcgctccgtaaattcaaactgaacgagtcaacgtttttggcctcactcatgcctaagaaggagattggtgccgatcgcttccttgaggctcaccctgaaaacgatggacgtggtgttgtcatcgctatctttggtattcatttctactgatgatttaatatgttgatcggactgtctcactgacttggattgaggaaaatgaagtagacgagatattatatgtatatgcatgttatgttttttgaggaataacgaattgatagagtgagaaaagaacaggagtttcgagtttttttcgttgtattggatcgaaatggttttatttagtaaatgtgatcgaattatagtagtactgttacatacttaatggatgatgttgatttcacattcaatcacccgaaatttgtttctcttgctcttttgaggttcatgcaatcattttgaacattaatttggatttttttgggattaattttctgttatcagattctggagtagaccctgcggctgatggattgcaagttacctccgacggaaagcggaaaattatagatgtcattgattggtagcttctctagttgaaaatttaattcacatatgttgaaatgaaagttatcttcacgagtattttaatcacataacttttgtgaaattttcagtactgggagtggagatattgatacgtctaaggttgttaagactgctgaagatgaacgtattatccgtggagcttcaggtcattttgaaaatttacttaatgattttatagaatcttctcagttttcagtactttatttagataacattatggaatgatagtatggaggttcactaatcttgcaattatgtttggttcataatgaaagcttattggttttttttttctctttctttcgttcccagaattatttttttgcttcaatggctatatgtgtaattctttttcttgcacacaaaatggccctgttctgattttgatagtatgttttaaataggagcttccctggttgtcaattttatgtggagtaatcccactggtgaatggcacgtgggttataaatacgcatatgagttgtttacagataaattgacttctcgattgaaggtaattttttttttaagattgacagatgaagcacacttgatgtgttgagaataatgaagttggctgatgaacaatgtttataactttattcttgacagaaggaaagaaagaaaaaatgggaggaacaaaatcaggaagaaattgctaatgctgttaagcaacttgatgaatttgaacaggttgcttgttagttctccacttgctttgttataaatacatcgattctgaaagtgaatattatcatgtgatttgatttttatataaattgggttaagcatgtgtgtgtttgtgctgtgacaggcttcgtgtgttattttttccccctgttgttttggagtctgttttgtcacattttactagatagaatccttttcacttgtgttgatagaagctcttataaaactttacttatcaggcaatggagcatgtatttgaaattgccgaaatgaactactgtcaatgtgctttgctgcaaattgttgaatgtgtgatttttttgatgtatcccttattgagatataattttactgtgatgttttatttccagaaacactgtaaacttgaggatgcaaacattaagagagttcgtgaagaccttcaaaatagagttgattatttacgaaagcaagctgatgtcagttccaaattctcattttattattcttaatttccttgggtacttgtaaattctgatccatcttatgttctagagctatgatgacaaagggcctgtcatagatgctgttgtctggcatgatggagaatattgggtggctgccttagacacacaaagtcttgatgatgacccagatagtggaaaacttgctgactttttgcccttagcaaattataggtattgtttacttgccagtgacattctatgttggatatgttctttccaaggacgaagttaggtggaaaataatattggatttactttaaaggaaataaactttttaaatgagcatacaatttttgacagggttgaccatgatatggtgatcttattcgaatgaagtatacgattgttgcacttgtatgttgattttaagccatttgattttatttgttttgatgggtgataaaataatattaaaactatttttctaggatctgacttatgaaatttcgaagaacggaaactatcacttcaaaattctctagtgattttgttgggatcgtagatcacttttattttaaggaaatatctgaaaagtattagtacaaactattcagtgttattgcaaggcattctgcttgtatgttatcaaatcttttgcttcatttggaattttgcatttgttttagttttttgaattttagttgcctcattctggtttgatgtattgatttcttttggtgctattaattcttgaatcctattgattgtttactaaaataaatacaatgacccttgcagggttcaacgagagtatgctgtgctcagcaagttagatgcctgtacagtcgttcttaatgtgtatgatgagggaaatgttttaagtattgtaacagacagctcccctcacggcactcacgttgctggtattgctagtgctttccatccaaaggtacatgaagtttatctgtctgctgcaaatgttttgaaacaaaccaatataattattgatatactgtgtgtcaggaacccttgttgaatggagttgcaccaggggcacaactgatatcttgtaaaattggagattcacgcttaggttcaatggagacaggaaccggtctaacacgagctattatagctgctatagaggtaggtgattggaagtttgctctgttttactgtttcatttaaaaattctttacaccaaatatttctgattttttttattagaattatttttgaattttgacgtgtattctttcttatttaagattttaggaattaatattcttagggtgcatttggtgggctggacacgacattagaactggactatttagtccagacccttgtttgggtggttttgggaggctgggcaattttttccagtcaccataattgttatatatttatggaaaaatataattttttaattgttatatataatattaacataacttgttctttaaatatgtatttttgaaatattatttaattcttgtaaattttatttatttgatatcgtcaaaaaatttatttagagcatctctattggtgatctattgctaaaatatagtttcatattataaaaattttgctccaatagtgtgccaaaagttgatctaaatttgtcacataccaaaagttgatccaaatttagatcacaatatggcatgatacaaattttgcattacaataaatgtattacttttatatttacttttatgttattttgaatattttattttaaatttagttattgcattaaattataaactttttacatttgtttttattgctttatataataaaacaataataaaattatt

SEQ ID NO: 296300 - DNA, 5539 bp, Cannabis indica
catgggcttaaacacacactggtcttttattgggtccgccagtggttcgtaccatcactgatacctgagattataacaatgctcgtaaataaattgtcactaattaagttgcttataaataactcatgttaaaacaaattgtcacccttatcgctatatatgctaatgtaagataataaagattatagagatgagcctaccaacctacacaacaaaatctagctagtttattatgctctacatgaaattttgtacatatggatgagaatcttgtatatttagatcacaatttttctttagtaattacgagataaaatatgtaaaatttaagagactttataaagtaatatttgaatataggaatatgagtcatatttcaaaattattagttaaaaaaagtagtagtgatccaattatttctcaacaaaaaacaaaggtggatggagtagataaagtcaacttatatgataattcaaagtcaaatatcaaatgataatgagtttatggttggttggtggggttaacaaaagaaaagtccaccaaatcaacggtggagatgcaatctcatctcaattgacatgacctgtaatctataaggttcttgttttctcttttatttaagcacgattgtattcaattattatgccaattttatttattttttaaaagtttacaatacaatcacatatatctatctaattgcttatcaatcttaattatttttgcttgaattaaattaaacaaggttgaccaccgtaccgtacaatacatttgcttctctgtattttggttaatttgtgctttaattataagtattattatatggtaggattagctaagccatgcagactaattaatttgtgtttatacataaattattaattaatttaatatacatatagtactgttttaaggaagagtaaaccaatcatatcaatctcaatgaatattccaataactattggattattgtcaacttgtaaattgtaatcataatttatcaacatcaaaacttctcttaaaaaataataattatcaccaagtttatttaaagtagtgataattatagtctcctattacaatctcaaaaatacaattttttttttctattttcgtgacggtatttacaatattattctagtaaattttttatttttttaataggttatagtgtcgaaaacaaattttaaattttttgaatatttgtagctggtatagtggaatataaagaattctctcttgtgcaaaattcataattttttgaaattaaatttataaattttatattataagtaaaacaaatatcatcataaaaaaattcaaaaaaatattatagcgtgtgtttttaataattgtaaatgttaaaataagaagttgacggtaacactatttatttattaatttatataaataaaaatgatagtttattaattaaatataaaatatttatggctatgcattacaacacaaagtataataattgtcaaatttaataccaattttgacactgtattatagaagactttttttttccttagatgagcataaaattccaatatcgatttatttataaattaaataggggcctcagttgcaaattaagttatgataagggtatacaagaaaataaatagtgcctcaactcaattatgattcattaacttattccatttgaaaagagaaaataataaagaacaagcctgcactcaatcaattttataattaaaattaatattttcatgtatactcttcaacatttgtttgtgtggttgactgtgcatctacatttatttattcaaaaataaatatacaaaattatgaattaaaaaaatgaacatctgtcctttaaagtgaatcttggggtagcctaaaacaataaataaaatttaaaaactaatatgtttttaggagtttttcagtgtactccatcaactattccatgtttataaattgatccttacaaataatatgaaaattagattcttaattttatcaataagccatattgttgtctcaaataattgtaggtagggataattttatcaataagccatattgttgtctcaaaccctattatcgaatcgaactcacactcgtactccttttatatatacgtatcatttgagctgacctcaattagtaaagttagttaaaaaattaattaaaaaaatatcacttttattattgatatattgtatcacttctaccttgttatgtaaaatatgtgatcgaaaattcgtcaagtaaaagtaatcaggtaaaaaattctcatcttgcccaaagtcttatcaaaattctttttgtgagctaaaaaaccaccaaaatcttaactcaatcaaaccaaataactagcacctcatcataagtaaaggactaaaaatgagttcaaattttgttacaaggaccaatttgcaaatcaaataataattcaaggatggtatttaaaccaaagaaaagaatgatgtgtagatgcgtattcagcacccaccagtataatattattacggtgctaacttacgcctttggcggtaaaaataatatattttaattaaatttcattacactataaatagccgtacaatgtgtttgagacagaaaaaaaaaagaaaagaaatattcattgagaatttgagagaatgggaatctgtatctccaaagtatcctctgagattcacaacgctgattccattcacggccatcaaaacgctgtcgttttcacccattctcaaaccaaccacaaacacgaagcttctcttagtctctactccagagaaggagccaagtgcctcaatcaagactccgccattatctaccaggttagattttatgctcttattcagttttgagattctgtacatgaatgaatctgaatctgtgtgttttgttttggtttttagggttttggaagtggagatggtgtttttggtggtgttttcgatggtcatggacctaatggtcatgtagtgagtgagtttgttagaaatcgtcttcctctgcttttgctgagtcagaaagagtctgttgataaggttaatggagttgatttcaacgatgaaggagtttacgaaagttttagagataaaacgatcgatactgttactactactgatttggtggatgaagattctcggaaatggaaggaagctattactagctcattcaaagtgttggataaggagattaagcttctacagaatttcgatttctcttgtagtggaaccaccgcggttgtcaccatcagaaaggtaaaattaacaccaagctttaaataatttatatgttatgtttatgttcttgttcttaatttctgtgttctggtgaaattgaaacagggagaagatctaatcatagcgaatttgggggattcaagagcaattttgggtacaagaacagagaacaatgaaatcaaggctgttcaattgaccactgatttaaaacccagcatacccagtaagatcttgattaaatcactgatcaaaattaattaattaaatcgaattttgcttaatcaattaactaattacgctgctgttgtaacaatgaaggtgaagccgatcgaataaggagttgtaatggacgagttctagctctgaaaaacgaaccacacatagagagagtatggcttccgatggaggatgcccctggcttagccatgtctcgttcttttggagattttcttctcaaagatcacggcgtcatctctgtccccgatgtcaccttccatcgtttaactcccaatgaccaattcatggttctagctactgatggggtatatatatatatttgaattcaggtttaatttgatgaaatgaaatgaaattgttttctgatgaatatggttaattgacacaggtttgggatgtgttgagcaacaatgaagttgcgtgtattgttttggaagctaagagtgaagaagaagctgcgagaggagtggttgaaggtgccatgggagcttggaaaaggaagtttccttctgccaaagtagatgactgcactgcggtttgtctcttctttcatcaccatggaattttcagatgaagaattattagagacaacattaattgttgttctttgtttcaatttatcaaaatatatgattgcttgtttatttgctttctcttttgtgtatttttttttagaatggagaaggctccaatgataatatagagtagactagtaagagcatatgataatatatttatgttatatctatatatatgatcatatatagtttgatcatatataatgtgataattgatgttaatatatagtctatagagagatcaaccttgagaagttgatattaataaaaactaaatagacatttcaatttcatttatctcttcttacattgcattttattatgattgtgcaacttttgtatatttattctttctttggttagatattctctgtacaaattgtttttgtataaattatttaattaaaaaaaggttatttgtaatttggcagattaataaaaaaaaaaatcaaattagtatccatatatatatagttcataatatataattataaattaatgttgtgtcgataaatattctcactaagaaagattgatttgttgggaaaattaaaataaaacttctgaaagaaataattaagcttcacaataaattgaatgatttttatgtgtaaattttattttatttttagagagaaaaaaaactaaaaagtccacaaattttattgaagaaatatatgctaacattacttgggtatgagaaactaaaaaataatgtacaagtagattagaagctattgataatttggtttggccaattaattcataatttgaagtaggaggtggcataactaagttttattttattttaaagaaatgaaatgaattatagtagaagaaagactaattaattaatttattatatatatgtgaacacgattgattagaagagtcaaccaatgaaaccaactaacttaaggagtttgataagaaaaagattgattaatcaaactaatttttatattacacattgtgattggaacttctaagacaatcacgagctaatattaatatatgataaataaagtggtgtttagggtgtgaatcctgttagttatgttattggttgaatcctattagttatgttattggtaaaattaaccattagattttatatgaatattgctattgaatatttatgttcttgaagtacatgattacagaatgaatagtaagtttggaaatcggtaccttatatttattggttagacatcaatgaatgtcataactaattattaaaatattataattaaaatagttatttcactataataataaatatcgaatactttaaaatgtaattaaacaaagaattattttctttctatttcattaactcccacaaagccaccttaattattttaaagaacattgttataaaataatataaaataatataaagtagatgagaagaaagaagaagaagatgaagagagaaagagaaagtgaatgagaatttctgagttatttattccaatggggtgaacccctatttat

SEQ ID NO: 296301 - DNA, 8357 bp, Cannabis indica
atatatgtaaattctatattctgaaatataatttcatgtctattcattctcttcagagaatgatatttaaatattctgaatgtacaataaatttgtgatatactaaaatatatgtacaatttacactctatcaaaaatcaaatataattttatcttgattataaatgtgtttgtactatagatacttgactactattattcaatttcacacatgatatatagatttcatgcactttaattgtgtgtggtattttatcacttagttgtttccaataaaaaaagaaaaaaagattcttgaaattatttcagtcagataagtatatatatataaatgtatatatatttagtgtatcttgaccttaaaataagattcaagaacatttacaaatatttacctgagacttgggcagagactcatgctaataacatgttataaaataatataaaatatataagaaaaaaagaagaagatgaagaaagaaaagaaactgagaatttctcaattatttatttcaatggagtgaacccctatttatataaaaatatgactaaaaactaagaaactaaaatacaatgtaaatgcaaatgtaaagctaatgggatagaatttcctagggtaggtctaagtgggggtttactcttactttggaaagctgatgtaaatgtaacatttcttaattatggtataaactttgttgattgctatattgcgtttcctgacggtcctcattatcatttctctggtttttctggggcaccagcaacatcacaaaggccactcactttgcaaattttaaaaagactaaaagataccgctccattgatgccatggcttgtcatgggagacttcaatgaaattttatctcaatctgataagtttggaggtcccctacacaatgatgttcaaattgatggatttcagaacacacttgattactatgggctacatgagctgtcttataatggtccaagattcacttggcacaataatcatgtcaatggaacgaatgtgaaggagagacttgactataccttagtcattgatacatgaactagcaattttgctgctgctgaagtggaacatcttgggttttttaaatcagaccatcgtgctcttttaatacaactcagaatgagtgctcaaatccctgccacaagacacaagtcaagatttcattttaaaaatatttggttaaatgaagaagctgccttagatatcgtcaacaatagctggaacaattgtttggttgatccgatcctgcaagtggtcaacaatctgtcttcatgctcttcccaacttcaaacctagcataaacagaagtttggtgcactacctaggaaaataaaaattacagaagcacaagttgcagctttacataactctaatgacactactttccaacactttgaacacatccaaagctgtgaaaacatccttgatgaactcttagctcaagaggaggattattggaaacaaaggtcacgaatgaattggattaaatctggcgcctgaacactaaattctttcattagaaagcaacaatcaggaaaaagaataacaagattaccaagttacttgatgaccaaagtgttgagcacacaacacaaccgggaattgccaatgtggttcaaagttattttcaaagaatttataccactgatggtaaagatacagaggcaatgcagtatattatgtccaaaattccttgtacagtctcagctgaagacaacaatacactcacacggccatacactgctgcagagatattcgaaactctctcaaccatgaatgcagatggaagtccaggaattgatggtatgactgtgcgtttttacctgaattattgggatattgttggagatttagtcacgacatcggttcttaaagtgctaaacaaaggtgcagatccttcaatcttcaataataccttaattacactcatttcaaaagttaaaaaaccaagtagcatgtcacaactgagaccaataagcctttgcaatgttctctataagctagtgtccaaatcaattgttttgaggttgaagccattccttcctcaagtcatatctgactcacaaagtgcctttttatcttcaaggctaataactgacaatgtgcttgtggcatttgagttaatacactctcttaagcacttaaagagaggtaaagaaggctttgctgctatgaagcttgacatgagtaaagcattcgatagagtcgaatggcatttcatccaaggactgctgtatgctatggggtttcatcaatatgtagtggaacttattcttcaatgtttatccagtgtgtcttactctttccttgtcaatggttcagctcatggatgtttgattccaaactgtggcttaaggcaaggtgaccccttatcaccatatttgttcattatatgtgcggaagcactctcgagactgtttcagtatgaagaaatgaatgggatgcctactagtctacgtgtttcaagaggaacaccagcaatttctcatctttattttgcggacaatagcttggtactatgtcgagcaaattcacagtctactgaagcaattaaacgttcactaaacctctactgccgtgcttcaggacaacagttaaatgctgaaaaatcagttctctccttctctccaaacactactatgcagaatcaagaaaaagtccaacaggtttcgcaaatgccaatccaaccatgtcatgagagatacttaggactgccttcatattcaggtagggataaaaaaattctctttgctgatatcaaggacaaattatggagatttctttcttcttggcaagagcaattattttataagaagttctcctcaaaggggtggcacaatctattccaacatatgcaatgagttgctttcaactatcaaaatctctcatcaatcaaatgagactatgatgaataaattttggtggggctctaattcatttggaactggaattaactggaagacttggaaagttctatgccaatcaaaagttgaaggtggaattggtttcaaaagttttgtctatttcaatcaagcattactcgttaaacaggcatggcggattttttctgaaccaatttgattcttgatcaaccgtgtactaaagcaaagatacttcaaaaataattcctttttggatgcagacacaggcttatatctatcactcacttggagaggaatcatatgggggaaagaacttttgttagaaggcttaagatggaaagttgggaatggtgaaaatatcaaatgtgcaaccgattagtggataccaggtcttacatatatgaaaccactgctgttcaataaccaggacagagaaatgcgagtgtcaagtctcataaaagatacaagacaatgaaatattcccctgctcaaatcactcttcctagattcagatattgagaagattctaagtataccactcactctgttttcccagaatgaccaacaagtttggcaccatgaatctaatgcattgtattagttaaattgggctacaaacttactgtactccttaaggaacaacaaccgaatactagcaacattgaagctatcacttggttgaagaaatgctggcctttatccataccatctaaagtttgaatcttcttatggcgagctattcatgattgtctaccggttttacacaatttgcacactcggcacatcagtgacactgcttgatgttctctatgcaatggtgcaacggaaacaatcattcatgctttgttcttatgtaaaaggcctaagaaagtttgggctgcctcaaatttttacatcagtaattttctctcaagagatatgtctctaaaggaattaatactgcatgtatccaaagtatgggatgattcaaaaatagagcaatttgcttgtatctggagtatttggaagaaacgtaacaaagaatgtcatgacacaaaaccaaagccatatgagctgctgttgtactcgacactctcatacttggatgagtataaatcagcccaccaatcgcctgcctcgagcacttctcaacagctgaatcagaacagcagtgtcaatcctactccacgatggttaaatccgccttcgggtcggctgaaactaaatactgatgtggcagtcgatacaaacaaacaaatttctgaatttggtgtcatacttcgaaatagtagtggcgatacaatcgctgccatgtctaaacctttcccaggttgttttaaaccagaagttatggaagcattggccttgatgtatggtttgcaattgcttaaagaataaagattaccaattcactacattgagtctgactcacttgtagttgtcaaaggattgcaatcacatcaaaactctgtctctgatttccattatttgttagcgaatatttcactgttagtgtccaatttccctggagtgcagattactctgtcaatagatctgcgcatactgatgctcataacctagctaagtttgctcttttggtggatactgagtgttcatggtttgaggaacttccacctccactgatgtctattgtattataactcttgttttaatatagtagcttttatctaaaaaaaaaacaaaaaaatacaaccaaacagtaggggtgagcataatatccaagaaatcgaccgtccgaacaccaaaaaaaccaaaaaccgaaaaaatcaccttcggtttaaaccgcctttgcatggtcagttttagtgttgatggaaaattgatcgattaaaccaaaaaccgaccgaacatatatattatacactatacatatataatataattatttttgtacatatttaatatacaattttattaaactagttttacctcttatcttttttatttgaaatctcaattattcattgttttatattattataatttgatgtatttacgtattatatacacatattcataaaataatacgagtttttaatataactcattaccaattagtagtacaaattatttgagttaaatttttttaaaaaattattttacattatttatttaactaaaaaaattttgttcttaaattatatgatatttgatacaatactttaattatttaattatagctaatttaatttttttttttaaaaaagcttggtttggtcagtttaaaccgaccaaaccgtagattaaaacggtcggtttttttatatttatataatagtcggtcaatttttcggtttataaccatgaaaattgaaagctaaatttcaaatttttttacttaaaaaaccaaccaaaccgactcttaccaaacataataattaatttagtgatttagatatcaataaataatatttgataccaattttctttttctcacatttcatatatgatatatcacaccgtccaaattacgagatgtccaaagaatattatgattcgagtgctaggtggcatttgctcaagatccgtacttgaaacttctagatagtttttttttttttcttgatgtcaacagtcatcctctctctattccttccaaaattctcgttctctgattctatctccatctggaaagttcacaaaaccctctctctcttttggtacattaaacaaaataatatttgatcttgaagaacaactttctcaaaaggtaatattttattgtattcttcttagttttgagttaatttctcacaaaatttattacaactttttagttatgtaaataatcatcctttgattcgaaccccatttttctaatttgatgtactcttctgggtttggaaggaaaatctaaaaaagaaaaaagtatgtaatatttctttagttttccatacatctaaacatgactttctacagatagattgattaatcattttgttggttatttttctcaggatcactaatatagttttcttaccattggtgagctttcttatttttaggccaagtcattcatgttgggatcaaaagcattctcattcgcacctgcaaagaacaagatcaaacaactgtaccctttgaaggattcttggggtagagccctctgatctgtctttttctttttcttttccaaagaatgaaagctttattttcaaaattatatgattaccaacaattatgtatatgcatatatttattgtaacaggtactttgtcatctacaacgacgaagaaacaagggaaagatgttacttcttcaggaggaacattaaaagagaagccagaaaatcctattgccatttttagtcgaccacccccactcccaccagttcttggacccttcatagtactgtctttaatggaaacttggtccactcgtgatggtaatgacgactgagtaactactacttgaggaagtgctttagaatttggagcacaaattgaaaaacgtagctttgtagtaaagtagcgaagttccaaaggtgtaagtagcttttcagaactgggcttatgaagagtcccaacataatgctgtaaacctttagtaaccaatttagtataacgtgtggactctttaggaaccctgcacatgttttaatagtgagagatatgttttgtatcattacgagttctttttattaaaagaaaaagaaaaaaaatagtacgtagttatgcttacattcagttgctcgtgggaaatcatcaaatgtttttgttacaatctttaacaaagactggattattatttattacatgaaagccaaattagtatgaggaaaatatagtttctgagttggccaaaactagtagtgaaacttacgagtacataacctcctggtttgaggggtgattcaattacaattcgagcttttctgtattgatgagcaaaaaattagtattcatcgaacacataataatagtcctaaatcacttatatggaggttgaaattaataatatgtaatacattattctgagtttgtctccttcttgagcacattcgaagaagctgcagcctctggtgaagggtatctgtgactttttccattctataaagccaaatatgtaagcctttatcaagttcacataattgaaaataatgtaataataggacctcttccaagtttacatgatagctatattgtcaatggtaacgggggaaagtacccatgtgccattttgcagctgctatgagttgatcatcttcttgacatacatgttgaacattgaacttaacattttctcccatacttgtgctaagccgtttgaaaaagcggaaaacctcctacaaaagttaactttaagattacatttcgataattgaattgcattgatttaagattaagctaacaaaatttcatccaaatgttatgttttttgatgggattaaactatctcaatataggggattaaaattagattatgggatgagttttttcatccaactttgttaagaagaagaaaaagtttatacctctttgccatcaattggactggggaaagagcattcctcaatgtaacagtcagctgagatgtaatccccaagttttctcatgtttttctcattaatgcatacatagaaatccttgattaggtctgatggagaagtagaggcaggatctgagttgtgatagttgttagtacttctattggaagccataataggataaaatttgttgtgaccattgatgagaagtttgctcaattctgcattttgaagaaatttaaggtgctctcttttcaatctgtcctgatcaaagcgacatgtcgttttgacagcaaatgattcaatggcagtctttggagttggtttgcggccccgtgtattccgtggggcgacaatgcctagaaaaatttgcagcaatggccattaattgatatggaagaagtagttgagaaagaaagttatgatattatattatattgtttgataggttttgtactattagtatgaaagaatctgggaaagcaaagaatactagctaacatttcttgcgacactgtattaaccaaggaataatctataacgaaaagctttggtttctttgtttggctttcaaatttctattgccttgacctgaagtcaaagaatccccagctattcttattgacctaatcaagtttgagacaaccaatcaaatacttttctcatttttttttatattgtttttttttcttcatgatgatgttgatgaaactggttttttttttttgctgtttttaataaaataattagtttttaacaaaaaaaaaacaaatagtagttttaaaaaaaaacaagtttaatttctgtaaaaatattgagatacaaaaatgtatacttattatatatatttatatatatacaaagagaaaaaaaatagtgagaaaaaaattaaaaaaaaagagagacacaaagagaaattagaaaaaaaaataaaaatagaaaattagagagagaagagaaagaaagaaaaaaaatt

SEQ ID NO: 296302 - DNA, 11017 bp, Cannabis indica
gctaggtattgaaaatactggtatctaacggggtttgggaattgactaatttgccttttgttggcatgctttcatttgtttttagtcaaagggcatattagtcttttccttggacttttgtcttctgtgggaataaagagctgattttaggttataattggtaatatttaatttatattgatcttaaataactaagtgaatagatatattgcataagctttacttttttttttttgcaacaaatgggaaatttggagaatctgttagttttttcatatcattaagtgtaaactattttttgttgaaatttctggaatattttggtaataattaggcaatacagaatattgcaatggttaccttgtcttttggattgcttgtgtaaattcaaatgtcataagcatgtctatgcttacagaccctgtaaagtcttaaatcaacttattttaaaagaataaacatttctgatttttgctctcgttaatgatatccagttggctttgacagcaattttcaacgtgatcggattcaagagatgagtaaaatgttgcgggtcttaaatgctgttcgtaaccatgagattggcatcccacttagtatacaacaatataaggtttttcaaaacttatttttcaagtaattgattccaattccaattctgaatcttaatttgtttcttgttcttgcactgaataacttgttgactgcagttgcttacaacatctgttctgattggtcgtttgattaatgcccaccaacatcttcttgcactacggatctcagagtacctggggatgaatcaagtaagattttagacaaagttatttttctcaaggcacaacctttatgctaaaaatgaattagtctcaaacttatttcactacggatgctgggaagtagaagtagctagtaatgtatattcttctatgactggcttgatacaggaggttgtgataatgcattgggcctgttcaaagataactgcttccttggcgattccagatgccactcttcttgatattttacttcataaggttgtgaatcttgtttataaatttgtttgatagtagctagtaatcttgtttaccaaacactagtatgaatgtggtttttgtttctgtcttcagttaagaatatgcagagggatatcatttgcagcagttgctgctcatgcagataaaagtggtcgccggaagttagctgctatgcttgttgagcatgaacctcgttcctctaagcaggtttcttttctttttttagccactaaaggatttctttttctttgtaggacagaacaggacttggctttcagaaattagaattttgtgcattccatgcagagtaacagtttcattaaagcatttgggaaataatttttgacattctctatattcctctgtttaggttcctcttttgttaagcataggagaagaagatactgccttagtgaaggcaacagaaagtggtgataccgaccttgtttatctcgttctttttcacatatggcaaaaggttataatgctgataatattcaaaaatctgattttattctaaatttgggcagtctttatttctgttgatatggatttattaaaaatattcaatcatatagaaaaaagcacttgtagttccccaaatacatttattcctgaagcttcttttttttgtcggttgatgtagaggccaccgttggagtttttcggaacgatacaagccagaactctggcacgtgatttatttataacttatgcacggtaaatctaacttctcatttagtattatgttctatttaataatttagcatgcaaggattcaagtgttgaaaggtttttatctagttgtattgacggagagatgcaatgagtggccttctttctcacagaaaattactgatacttgtacttcataaaattagattctcttaacaaatatagttgtgttgaatgatattgggaagaaaaaattctgagcttgtaggagaaatgaattgaataaaaataccaagtaaaacctagagggtaaagttttgacatccgagaaaaggaataatagtctgataatatggtcaggcatgtggtttgctcccacaaggtctgaggttcgaatccctcctgggtacctgtagggcaattgctatagtttcctagtcctcaaatactgtaggcttaggagggaatcctagtttcaaaataaaaaatctgataatacatgcctgacatgatgttgctctgcctcattatgacgagcaacagttaattgattttctttatcagactataaaataataaattaacaagtagaaaaaaaaaaagttgtgctctttcttttgcatgttttttgatgggtgttttacgagtagatgcatgatacatccatgggaaagccgacctcatctgattattgtgtctgtttttcttctgtcctggctttcttttgtgcacaactactgatcttctctttcttcttcttttaattccaggtgttataagcatgaattcctgaaggacttctttctatctactgggcaacttcaagtatgtcaaataaatttcacagttcttctttgtctttcattctaaatttggaagtcatttgggtctgtattgaacttggctaattgagtggcctatctaggcagtgcaaatatacttttaatgtctttcactttatattgagcaatgtaaatgtcaatgtaattgtaggaggtagcttttcttttgtggaaggaatcatggcagcttggaaaaaatccaatggcaagcaaagggtccccgctccatggtccacgtataaaattgactgagaaggcacaaagccttttttcagaaactaaagagcatacctttgaagcaaaggctgcagaggagcattcaaaacttataaggtcagatatagttaatcttacctattaaactttgactgaagtcactaacatgaagaactagaacagtgctgtttatcacgttaggtttcatgacagaggttgtgtagaacgtgtgatttaattgagagggtcaggcaggcttatggtttgtgggtgaattccttaaggccaccacctagtgaataatctcatacatcattcttcctaaaaattgtagggtttggcgggtgttagattttgccctaaagcctgctaagaagatgcatatgcctgcaatttctgggatattgaagagagaaagaatgtgctgcttttggattgatttatgcaatagttttttgttaaaccctaggattagtagaagagggtataagagtaattgtatatggtggttattgagtgggaaattagatagtataaataggtgagtatagggagtgagagagttatgcaatgaaatgagtattaccctttgcatcaaaaaggcctaagggctccaatagcttgtaaccagttttctgatcttattcaatatcactcttctatattttctactgtttggctactgttttactgttattgagattaatcgtgatcaaaaggatagtcggttcttatcatatttttataacaggaaaacttcaccattttatttttcttctgtactccttaagtataccagagagttttataattgcaagattcatgtaaataatgccaaaggggtctgctaacttgtttttgttacttttgctcctgcagaatacagcatgagctagaagtcgctaccaagcaggctatttttgttgattcaagcatcagtgataccattcgaacttgtatagtcttgggaaataatcgagctgccttaaaagtgaaaacagaatttaaggtttgtaggcatacgcatacccatgccaccaactgaattactgcttttgagtttggaagagtgaaaaggggtttgacttgcatcaggaatatatttgtaatagtgacaaaagataaaaactttttcaatgttcttctgtgatagtcagtgtgtcaaataatctgtaatcatttttatttattattggcttctgaacttgtttcaggtttctgagaagagatggtactggctaaaagtttttgctttggctacaatcagagattgggatgctctagaaaagttctcaaaggaaaagagaccacccattggtaatttttcttattatttgaatatttttagtctcttttaaatatttgagttcttcatggtgggaatcataaacgaattgcaaaacaaatgaagattaaaaaaagaagtatgtaaggatggatgtctttggggatcactacatgttttattttttaattttaatttttggggagccctcgtggtataaatactgttttttcttgaccatctcatgacacacttgctgacttccttttggcatcaaataggttttaggccatttgttgaagcatgcattgaagcagatgagaagggagaggccttaaaatatatcccaaaacttgccgatcctcgagagaaagcagaggtaaaacgtctctcgagagtctcatctgttaactagtgttaagtcaattacttcattctactgctgtattgtatgaacaacttccttaagaccatttttattttgtagtcttatgctcgaattggcatggcaaaagaagctgccgatgctgcctctcaagctaaagatggcgagttgctgggaagactaaaattaacattttcacaaaacgctgcagcttcatcaatttttgataccctccgagaccgtttaggtgtctcatagttctctcatttatttatcttttacgtttttatttaaagtttattgttgtgtggatcgtgtgcataatcttttcctaacactgtagtatattacaggataaaatgtaatgtatagcacaaaatgtttcatagagagtttgttttggtgttgtttcgttgcctttgttctttttcttttattgtgattatattattaatcttgatgtttctcatatcaacaataaattgtgtttcgtactgtttttaatgtatgggataatattgccatgccatgaaatttgaaaagggccaatttttggagcagttctcttatacaggttgtaacaacttgacttctgattttattattaatacaatgatgtactctaagtgatatgttttcaagtacattaaggttttcttaaacacttgtttaaagatggatgtaatatgtaaaaactcgtttgcagatgtaaagataagcatctttcaaaacaaaatatgtgttgaacacatacataagatgattctattaaatacataaaatatgtttacttgctaatagttgatatacatttattacaagtattattgataatttagtatactacaagtatagaatagatgatgttacattcacgatgtacaataaaatttaaagtgtaactgtttatccactttttcaaaaattaatttaaaaataaattaagctaaagaaaatatatttagaaagtaaatgagatgagatatttatgtatccatgaatcaataatattttactctttgggccatagagtattttacacaagtgtgtttcccagaattttgaactctgaaaatccaaccctttgcatgaagggttcttgacatttttataggtgaagggttgggttctcaagctgacctgaacttggtagggtttgccaaatagaaataagcttactgatatgaaaaatataattaaaaattgactattaggctgggtaggtgagacccaattcctgccttctttggacacgaagaaggagcaggcgaagcgtgtcgttcgtaatgaaaaaaagaaagaggattgtgaccgttgtccgtacgggactgtaccattttatggtgactgttgggcgtgtgtcgccggtttgttgaggaccgttagaataacggccttggacaaaaaatgtgatcatcttttttgctgtgagcctttcaaatgtctgacacaggagacaaactcttaattttttggaatttttgttggggggcgtgccacataggattattcccagacggtgaacattttgcgacactctttcgactattcttcttggatgacctttacgggtatctgtctgtatttttttttagatatttcacaatttgaataagtattaagtatcaactaatgtgaatgctcccagatgcattggatggtttgacatcgattctcaacccaatcaatgtaataattggactgattagaaaaataattgaatctttagtagaatttttttggactgaattgggcagattgcttttttttttttgaatacccattagccatttgggttcaaaggtatcatgtgattcatgacatgacctactcttttaagggcatccgtttcttgccgtaggaagagatgattttaatgtgtcaatattgtgataagtttcaaataattttttaaaatttaattagattattatttctatttctattttctttggttgataaaaaaactattataattttcatgtaaattacatgagtacgaaaactgtagagagatcatactgatggccataacatatttccaattccaagttttgtcaaacaccacataccattattttatttgatatgacacacttctttatgcttcagccaatagtactgaagtgagcatttattttactagaaagttacaaagctaaagatttgtgacttagattccttttgacactacaagagctaaagaaaaaagtgtcacataaacacacaaaccagcccttcaagatgctaaacttggatgagcaagttcatgttgttgatgaagattattcctcattttgttgtcttacataagccataggttgaattctcatatttcccatcccacctgtttttttttttttggccaaaagattgttgaattagtttactaaagtgatataatataatatagtaggatgaggtttgaataatatataaacagactcagttacctgcattcttctgtttctggaatctgaagctctaatttttcttcaaactgctgaaatataaggtcaacttttccttcatccactttgtccagagatggtggagaccactaaatgaaagaaaatgaaatcatatcatctttgactttgaatgtagatgaattttgttcatgaacaccatttagtcataccaaatttgtttactcaaatttcaccaaatctgtgtttagatatatattaatagagaaaagagaagataatagaaagaacaataccttgggagaattatccttgtcaatggtcagagccctgatacccttttggccaaaacagaaaaagaaattttcagaagcagccataagtattgtttctaaatttaagcaatcaaatatgatcataactgaatagttacctcatacacatcattagatatggtggctcttaatatgtttattgttaatctaaattccttcttcaaacattccgagagtgattgttttctaccttcacgaatctggaaataacgagttaatagagacaatggaagcatgaatccagtatgcatctcttcttaaaacatagaactagaagaaactcgtaccgatttaagtgttacatttagtccagtcggggacgatctttttaacccttttagaacaggacctatccacccatttccttcttttttggattctacttcctgaaagtatgcagcaatgtcatatggaccgtttggtgtctaaccaaaactgaaagactgttaactcactaacatctgttacacaaaaagggaagagcttacaaatgattgtatgatctcagccacagtatcctttgaaaaacattcattaataatagattgcctgaaaagtcagcacaaaattaacagcaaaatatgtggaacttagagaatagaaacctttactattaaagatctaagtaagaaattgtaaataaaatgacatttgatgatttcttacttgtttagaacactttcatcatcaagtttaacttccacggaaaattcttcaattgctgatttgactgcatcagctttgccagaatttaagcttatcaatcgcttttctagctcaggtattttctaatgtaacaagaagaaatcttttatcaaaacaaagaatggttacaaacaatgatccaacaaaccaataaccttgatgttattcagttctgtgaaagcatgttctagcttttataaaatcaaaagcaacactccacatttctgtgttgtatcgattatgaataaagagttccggtttcttgtgatatttgtacaagtatttttggttaaggtaacaaaatcaggaggaatgattcaatgagttgatttcagtggcagaagtgcatagatccataacttacctcggaaggaacgaaatgagttgccagaccaattgcaaccaattctttaccattcaaccttgctccagtcaaggccaaatactcacctgcatgttctaccactgttattgtctgcagaaaagaaacaaaggagaatcctttccctttatattgacatgcttaccaaggtttccggggagacgagaatgtatgtaggaaaagccacaatcagtatgaaacccaatacttgcttctggagtggaaaagacctatttagaaaagcaatttgcaatgtgaaacctatagagaaattataatgaatcacacctacaaagtgatatatatttaagataaatttaagaaatggtcaaatggacagggaagagtaagtgcctacagttttttctgtgacaactgagaatttcaatgggaccattaatgatgcacctccacccattgatattccatgagcaagagcaacctgtggatcaacatcaacatctcaattgtacattctataagtaaaaatgaagaaaaatattgtttttatcacaaaccagtcctgatttgttacctgggttttcttgtatgtatgaatatgatagcaaagccagtacatcctataaaccacttccaaacaagagtcctctgccaccaataagctcaaaggtaaaatcaataacttcttcttctaattttctcagacataaaagtaaaatcatttgtatgtatgaatgtttcagagttgaaaatttactttctgtcctgccatcatagaacattttcagatctccaccagctgaaaaagctctgcctgctccctacataagataaatgataaaacaatttaagaactaaacaaaagtagttctaaaacaatgtaccattatcctatactaggtgcggcaaaatgagtcagatacgataacacgaaataaacaggtttgaattttccttaaatgagtttgggttattttcaggttaacacacctaacctgaaaatgatacaacaacggcttatttgaaagtataacactcttatatttattacatgtaagctgctgtattaagttagttaaataagacataaatatgttaaatcgctagtgaatgtcataaaagggttgtaaacaggttaaactgacaagtcaactaaaattaagcatgattctttacataaacagtttaaatgggttaagccaagtcaagttagctcgtttataaacaagtttgggtttgggtttaagtattcgaaaaaatcaataggtcgagtttggatttggcatttgcttataacacctaaacttcaacacgtcacgaacacaacccacaaacatgaattgcaacccctaccctatacctataaggctataactaagcaaatccaattctgaaaattcagaagcacataagataagatctactgaccttgattaaaataagctctactttgtcatctttttcccacttctccaagtattctgctagtagagaaaccttttatggggtaaaaaaacaaaagaaatgttagaaatctcgaaacatatttccccaaataatgataataatgcaagtaagggactcaaatactgaatacatatatataaatatataccactcttgatgagatgacattcaattgacggggtcggttcagtgtgattaacctcacatgatctatttcttctccaagaacaacctaacaatccattcccaacaaaacccacattctgattaacaaaaccattctccataattttgaaaattttcaaagtacccatcaaatgaaatgaggtaaagaacaacaacaggaataaggtatcttagttacctcttcttcatttggctttccaacttcttgtgccattgatatgattaactggggctgcaccaaaacaagtaattgaaaccttattcattctagttcatcatttatcatgtaatttaataaaaaaaaatcaaaacactagagcagaaactggaacaaaagttacttacttactcaaatgaaaaacaaaacagatgggtttaagaaagttgaaaatctttaatataattgagctggaaatgaagtgggtttttgaagaagtggttaagtttggaagaagagcagatgatgaggttggtagatatggagatgagagtactaaagaaaattttcttcttctactctacctacctaccaccacctaacatatccccactgaatgattcattttgctatgaagtagtactcataatagaatcattactctatatgatatgatacttaaaatgaataccattcactagaaggaaaaaaaaatgattatgtataatattttggtatatacaatgtgtgcaatatatgtgaaaaaattcaaaaaagttaaaaaaaataataaaaaaaaaaaaatagttagagagtaactagttactaccctctttatactgtaaccaataagtaactagttatcttagaacattgggaatactttatagaatgtttgatgatataaatttatttttttgacatcttttaataaattcttactattagaaatttgaaatgaaaaagaatgctaataaagaatgcctaaacaatgacttcctttaatatcttatttttcttttttgttttattttgttatcaagtaaaaaaatttaaattgttcaatatatattaaataataatataatattattttaataatttttagagataattatcattaaaatattttaaaataaaagtgtcaaaaataatgtgaaagaaaaataaaataaaa

SEQ ID NO: 296303 - DNA, 2348 bp, Cannabis indica
  modified_base (2291)..(2291): a, c, t, g, unknown or other
ctatttttgtaattagtcgctaggcgacaagtattttgtatagacagtaaacttttgtaaatagttttgtaatcgggatcccgagtattttatataaatattttacaagtttaattaagaagcaaaaattttaattaatcacgttttccataaacctcgttgattagcaacgagctgcacagtatgtttaaaaatcacgtaatacacctatgctagttagggtgttacaccagtggtgtcagtattttctataggtgacgctccacgattggtttacgatattctccctaaaaattattttcttatgttatatgacatcgatacttaattctatataacaccgagaaaagtattagataccatgatactctttagcaattctctataatatctatacaaggaaaatttgttatgatattatgtcctgtcatgttacaattattatttagtaatttttttttcaattttaggtggatattttaaaggtaagcattgtcatatcatttcatttttttttttttcacctgcttatacaacttatttggaactgaaatgcactccagtcagaaaaatctcagcatatcatgaatctagttcgaaatattcacagtaaaagtagtatgtgttacgaactcgagaaaaagtctgttgggactacacaaaaaacagaacatttccgtatagaaaaatcacagcgatagttacagaaatatatatagtttttgttgtttgttaaatcattcttgtccagtgatgcttcaaatgactggcgccagagcctagccataaattatttcctctgatctgtgagaaactctcaggttattgtctcgctgtcacaaacctggttggctatcttcatgtcaaaaagaccaacggtgaactgacatgttgatacagccaccacatgtttcttgataagtccaagaaaggtaacgttaccaggaatatttgtccttgtttccatggggagctgaccagagagaacagcgctgatcagcccacttaagtccggaccaacaatctggtccacctcgatgaccagccggcatgttagcgtggcagagcctctagccggaatatttccagggaagatatcagcattccccacttgattgttcccataaaacaacaagcttgttccaccattgtgtctaaagctagcatagttccggttcttaactaggatctccaggttgagggtgatgttaagttcgagttgaaccacgggtaaggtgaggtgaggggtaacacctacaacagttgtggagataagcttggttatcggttgcttgggcttgaaaattgttaaggcaaggacgaggatgacgatgaagataaccaagatgaggactataattgtggctccaactgcgatcagacagcggcgtctacgagctttgagtgctttcttgctgctgttgttttcagctgttgtgttgttgtcatcgatctctttatcgatctccatggctattgtatctttctgcttgtccagggagaatgtagagatatgtttagaatgagaatattacaagccacataggcataaagacaatagagggaaaaaggaagaagtagttgatagtttgaagctgagaaatattgttaggagaaaagaatgggcatttattggggagaggaaggaagtcatgcgcagtagttgggcgttgtggagcataatttaatgcaggattgttaacccccagctaacaaaatgttgaaacatacgtccatccaatacgctttgtctcactcaggacggcgtaacaagcagacaacaatacatacagattaatatacctacggcttccgtgaaccacgtgacttacgcacgtacgtaatctatgtttgttagcaactccgcaacttcaatagtttttttttcctttttggtcaacatgatgatcaaatgaaaggaagatttgtatgcccagataaataaaatttggttaaaaattttagttctgatgaaatctagaatttctcaatatttttttcagatgtgtttttgtaaaagatatctttccagatgaaattcaccaattatattttgaattggctcatcaataaagttttaactatcatttttaatttttctaacaattaaattagtggacttaacttggatagaaggtttcgaaaattgtaaattcagcttttcacgattgttttgctggctatcctatcattatgtcacatacacatggctggccgaactctcgagacagattaagcaattgttcaagacctcacattttttgggaagtctttctttttttttttttttntttgttgaaagtaattttgaaagtcaatattattaactgtacttatagggtaaaaaa

SEQ ID NO: 296304 - DNA, 3434 bp, Cannabis indica
aaacatcaatcacttcaaatttcatatattgataactaatcagattgtaaagagttttatttagggcataaaacccaacagtaagaacatacctagctagccataagaggtcattggtcggccatgccctaaaaaatagggttggttggccaacatgtttgcacaactctaaacagctaaagtcgaatgtattgtacatttgtaccccacttttgttttgcaagaacaatatgcttttaattgaatttccaaaacaaattatgcataaatgttttccgatgaaaaagaaaagatgattacttagaaacgttaaatatgatctctaccttcatgcaaaaatgtaaatagcattgattattgttgcttaacaattatgtttattatgagctaatgtacatgatttcaatgaaattgcctactgttcactatgcaaatacatcatatatatatattagtaaataaaacaaaccttctatagaattttattgtatactactatatattcaaaactttttggcgtgggggaaggaatgaatgcattagcagagaatatctggactctagaagtcctttgcttttcttctgagttcattcaactccttctcaatatccgagtcgcgtaaaggaagcacggtgtttatggggatggcagttctcccaggtggaagctccactttctgaagaatgaaatgaataaagatcattaagttatctcaacagtccaaactccaaaccatcattgtttctctcattttcaacaactgaccatgacactataatgtgattgtcaagagaaagaacagaacactttctctttaggatcaaattctcaaagattatttcaagtatcactgaaaggacactggcattggacagaacaaaacttggaaattaatgaatggagagtggtaagcaattaattacctttgagctcccagagagttccttttttaagtcttcaagatcaccatcaacagaagagccctctagcaaacggaactgtatataggtaaaaagtaatatccaagtaaacatcaggctttagcgtattccatataaatagcagtcctaaaggcattgaattgaaagatattcttatttggtgtaatgaaagatgttgatgaatttgtatctgttccagctctatttcttaagggtaatacatacatacatatatatatatatataaatatataatcaatcataacagagaggcttattgatggttgtaacagtgaggtgattcttagtttagttgttcctgccctcaaacataaggatttttttacctttccctcaagatcatcggttgctaattggctataagcttcagcttgagactccatggtcagaactgcgaagggtagaaacaagatcaatttagctactctttaaatatgtcgcagaaacagaaggacaaaatcaaagtaattaaacactaccaaactatataaccatgagacgtgccatattttataggaaaaaacattaaaagatcgaaacaaacctttttcttccattttgttgaaagcatcgagagcgctacttgtgtccacatcacccaacaattcactcactttagttgatgtcctgtaccgaatatactggattagtataaaattgaactgctggttacaccaaaggggaaaaaaatattaacagatgaggagctagaaacaaactttgcagactgagctcgagccttgagaacatctttcttcgaccttgcctcctgtatcttgctctctaaaagctgttggaaaagaaaatcttaaatgagaatcaaccacacatagaatatttcaagcactcagctcttccctattggcaaaggggtaaaaacttaactagatgtatcaaaatgttttccccttcagcacatcatctaaaactaaaacccaattttaccattttaaccatctacgccttttctttttgcctcaataatttaagccataatgttcagattaggccagccagaaatacgcattacaagaataaaatcctggtactgacccttgtgttagagacgagattatcaacaacacttttctgctgatcaagctgagtcttcaaagtattagcattgtcctgcatagaacaaacaagcaaaagaaggctaaatcaaaacatcattcaaatgtaccaaaaaccaaattatacttacagttctatcatcgaaaaattcatacagcatatgatttccgacgcttaagagcttccctggcaagatcctcatctccttttccaagagccagttgtgcccgtctgtacctattatcagagaaagctttaagagaaaataggcgtataacatttacactactgagcaataaacagatcactacagaaaaaataaataaataaataaaaataccaatcttcagaggcttgctgggcagatttatatttgttctctaactgcttttgagatgccaaaaccttcataaattgaaaacataattgaggaattctcttagaaaatatacttgcattgcaccactgtgaaaacaacacaaattaatgtgataaacgtacttgtgcagtagcttgacgcatctttattaaatcattgttcatatcagtaacagcttggtccaaaatcttctcagggtcttcgaacgagcttaagatcgcattagcatatgactacatttgccagaaaattaatcacacaaactcattatgacaaattgacatcaattatatctaaatacgtgtacgtatcttctttatctttgaattattaccttgataactctagcaaatcgactaaagagattcatctgagaaccaagagcaccacccccaccatgacaattacgcctaaatctagtcgagtgagctatacgtagcctagggacttttaatgcctcaactgcaataaaatggagactattacaatgttcaaaaaaaaaaatggagactattacagagaaaaacgaaaacccagctgctattttctcaaaaaacaaggcaaggcggtggtactcgtatcaatatcaaaattgaaactttcgagaaacccagaaaggaaataggaaaaagatagtaaataagaagtattaccaccataaccgagaaacaaagatttgcagggtggcagtccttgagaagaagaagaagaaggccttagtgaaagtatgcttgagcttacaaccggatgcactgtcgtactcgtagccattttaggaagacggagcaagaatgatccactttccagattctctttaatcaacccattcctctttcttataccttcatttcattttaatctttttaccagatttttcctttttatttttctttctttacacattttgtgcaaatttatattcaattattatttattttaatttttttgaaagattcaattattattattattttgttgaaaagtaaagtcttttttttttttttttattttttagaag

SEQ ID NO: 296305 - DNA, 3153 bp, Cannabis indica
atccacagggggaaatccctcccgttgacaattcagaggctctttagaggaacatctagcctctttagccaaaacatcaacaaaagaaattacatctcgggtaataaaagaaaacttgcaattaactaaattttttttcaactcaaagaaccttagaaaacagagcccagcatctccaattaggaatcgattcattcataaatgatttaacaataacctgggagtcagtaaagaaattcacattctcccagttcttctctctcgcccacagcaaagcaagaaaacaacttcaagttcagctgctaacggacttccctgcttccccgaagtagttttgataaaccattggctagtatctccgtctatagccaccattgcaccaccgaaagtgccatccttgaaggaaccatctgtgactattactttaagaccagtagtaggaccgtcaggactattaaacttgggcatgagcatatcactgtgaggagattggatatcgctcatctcagaaaactacttcctgacttccacaataagagtatcaaaggaaatctgagctttggaaccatgacgcagtctatttctttataaccaaacaatttccattatagaggcaaaccagactaatagatcgtgtctcaaagaagcgataagactatcagtggcagcacagatgaaatcaaatagagaattacccgaaataaactctgatctgagtggaatagggcctccgaaccataatgctctagccattgaacatctcacaaagagatggaggggattttcgggttcagaaccacagatcagacaaacgccagagttggagcctccaaatttatcagcagtggggaggactccagcagctgctctccataacatcatactctgacgaggatgtattttactgtcccaaagccacttccagacgacctgaatatcgtcaaaacgacttcgctggctatttaaataagcccctttaaccgaaaagaccccagtatcaaaattcttccaaataagaagatccttctctgctaacttgttgatctgaatagaacttatcaatcccccccaattcacttccgaaaagaaaatcaaggaatccatgattccaagttttgctccgtctgaacataagatcagcaacacagctcaaggaaggagctttggatcgaacaacttccatcgtttccctgaattcttcgtaggccatccacgggatccatggctgccaccaaagattcatgtcctctccattcgcaatcatagtacaagagccgtcacaaattaattttcgagctccaaaaattccacgccaacctgggctatccaaaggcctttcttgaacactccaaaacgattccagaggaaaatactttgctttcagggagacagcccaaggcctgtcacaattagcagctagagaccatgccaatttagccaaaagggcattattcacttcattgaatcttctaaaccccaagccaccacaaattttcggttgacaaagagaattccaggttttagtagcaagaaatctcgaacaatccacacgacctttccaccagaatttcctgactaaagcatctaactcattgcaagaggatgtaggaattttgttggtactcatagagtacataggcatcgccatggatacagagttaattgtcaccatccttccaacagtcgacaaggatttcattcgccagccttctaaccgtttgcacagattagttttaagaaaattgaagtccttcttcctgcttcgagagaactgaaagggattgcctaagtgtttttcttctcccttgatcaaaccaatattcagtttatccgagatagaattctgaagagaaagggagcagtttctggagaacagaatcccagacttgtgtttactacattgttgcccagaccagccttcatagatcttcatacagttttccaatgccactgcctcttggatattcgccctacagaatagaatggtgtcatctgcgaacatcaaatgagatatggcaggggcatcacgagcaatccgaataccattaatcttgccgctagcttgctccttggaaagtaatctggaaaagacttcattacagaggataaatataaaaggtgacattgggtctccctggcgaatacccctgtgtggcacaaacttcttctggggacgaccattcaaaagaatggaataggacactgaggttatacaattcattaccaaagagatgaagtgagaatgaaacccaaaagtctcgagaataatcttaatgaacttccactcgagcctatcatacgccttgttcacatcaatcttaattgccattagaccacccttaccccttttagatttgattgcatgaactaattcttgagtaagtaaggaagattcagcaatccatctaccgagaataaaagctgattgcagaggagaaataagacgatccataagaggccgcagccggtgtgatatgattctagtcaccactttgtatacaaagttgcagagagcaatagggcggaacttgtcaatcgactcaggattatcacatttcggaattaggcaaataaatgtatgattaagcaaaggaggaagggaccccgtcctgaaaatcgattgaatacaagccgaagtttcttggccaatagaattccaacactttctaaagaaacaacaagagaagccgtctggcccaggggatttcaatggatgcatctgaaacacatgctgagagatttcttcaaaagaaggaatagagatgagtccctcattctcacagggagaaacactcttctcaattaagcccagaagatcagcaggaagaaggtactatttacaatttacaatctatactttaaggtactctttacatcatttacaatacctttgattgatctagaatatctattaaagatacatctgttcctgttaagccatatgttgtaaatatcaacagccaagatggtgatgttgatcctttgaatccaagagcgacctaccaagataatccagttatacgagcctttatagttaattggccagccattgtagctcatccaagtaaacatctcatctaagatttttctagaaacacacatgagaaaaaaaggtgtcatgagactcaacaacctcttcacacataggacaat

SEQ ID NO: 296306 - DNA, 1111 bp, Cannabis indica
gaagaaggagagagtgagatctgaagccagagacggtggttttggggaaagtttctttcttctgtacaagtaagaagctttttgttcatgaaagaacgaaattgaatagagagtgagttttgtgttgctgttgctgatttcaatgggaaatgatatattcgcacgtgccaagagtcaactcgtgcagacagagttttattacaccaaagcaaatgaaagatgagatagggtagtggtagtggtagtgctcacctacggcgctgactaccgaagaacacgctgttctcgccaatgaccaatgattccttttcttgcggtcaacgacagtcacgacacgtggagagtgttgttgtttaatgaagacttcatcaccttattaatatttgcattaaagattactgtaccgtcggtggttctcggcacttgatccctgccattggatttttaatcgccttttttaatttattaatgagaaatgctatataagacatttttctaagtgtactataaatatcaaatttaatataatatttctttattactaatcaattgtaatatgatatatatatttttttaaaataaacgtagatatatattaaataaaattaaaccttttggtcattacacaataaatttttctgtacagagttaatcatcaacattcaataatcatactctttattaattgattcttgagcaccaatttcatatcttattcaaaaaagtaaaaacttttttttgactacttcagacttctctcttttatggagaagaaaattaatggtttacctcaaaagttactgtgcaatttaaattgagtataatttaaagtaattgtaaattttgatatgtttgtttaaaattatataattagaggtaattgatgagtctcaattactcttcaattcttataaactctgtaaaatttaaatataattacactatataattataaaatatttttatttttagctgattgatatcattaaactgtgtacaacatactctctaaatactcttcaattaatataaaaagtgaccctataataaacaatctatagggaactctctcctacttttttctaaatatttttaataatatttaataaaa

SEQ ID NO: 296307 - DNA, 3645 bp, Cannabis indica
aaaagatttccgtgtgacagtatttttgtaaaaattaacctaaatttcaatatttttgaaaattttcctaacaaattaacaaacaatgatactaaagccccataattctaattctaataagaaagtcaagcaaagcccattagaagcattaacaagccaatgcccatgaggcccattggacaaaactaaaaatcatcttttctcatattgtacaaaatttgaaaaccagacaacatggactttaagggtgttcattaaaccactcaaactattcgcactgcatcgcaccacaagaaaatacagtttgaaattctttacggtgcagtcgcggtttaaattgcgaatcccccgtcccaggtcatgggtgaccccttatatagaggaaagagtcggtgcttctcgctttaggagacgcgaccaacgtagagctacctcaaccatctctttggttttcgaaggtagttgaagtctgattttttatgataatatcctgctattttcgtgagtttataactatctttgagcttcttgtgggatttgaacatttgaactagtaattgacgatgagggtctcccaagggtgtgacacgctcgttgatcaccttcggggataaaagctaacacttgggggcgacacgacactcccgagatccaacttgaggagggtgacaatcatctcggggtgaccccttgtatgttgttagtagtcataatgttatgtggatgtcctcatatacctttgagtgtatccttatgtctatggtcggggtagtgccatctaccccttagactaacttggcatgtaggtgtatggtgattgttcaccccacctacgaaggtgttagttcatcgtttttttcttcttggagatgcctaccttactcaagctaggggtaagagtgaccgtctgacttctattttaacggtcatgaacacctttcatggttaacggtcatcccaacaatcatgactttacatattcttcattaatttaatcccgatattttcgtgccacgtgttgctactcttgacacgtcatcgtcgttaaaatttgggtaaacacttaactcttcctcaaactaagcatcttgattattatatggtgtttggttagtgattactatttttgtatcttacacacatattttaaaacttatattctactttaattttcttattcccctacaaattttcaaccattaatgacattacaaattttttcaagttagtaacttgtgaggaattagttactaatctaattaatttagttcctttttcagtttagtaaatcaatatccatgatcttaccagctttatgtttttgattaaattaattccttgagtagcgagtagccattagctaggtactgaatatataactagttactaatttttaggttaacacaaccttagtaattttgtgttgataattaattaacacataatgaaaaattcaaccaaaattaacatctctaatcacaagaattctgactcaattaccatcttaattaaaagtctcaataaattgttttggggtgtggtgggagactccattttacatgaacaaatctcctccttagtaactaataatgagattgaaaagctttaataatctaatatggatgaaaccattcatttcattattcaaaatttattcccaagataacaaaactaaataaaaccattcaaaattccttttaaatatttcttggtcaaataaaataaagtaaattatgatatgacctaattaaaaaaacattgagaaaataataataataataacaattgaatttttctttacagaagagcatagaaaataaataaataaaaatgatgataattatcacataaggatctgatgatgtgatctgttttgtttagttttatgttaatcatctcagtttgatgatttcattgtttaggagagagaacataataaacagagatgattattggattgtattacatttagaaagatttagaagagatctgccaaagttgaagaggcagcagttgaaatgaaaccccatgaaagtgaaagaacatatatgatatatatatatatacacataatgtatagggtctaggataaaacttgggcttgggcttgggcttgggcttgggcttggtcttgttagtaggggaccttaactgggcctgggactaaagaggagtaggctgcctacggtggaatacaatttggagaaattttaatttttataagcttttaagcctacaaatttgcaatataaagttattgaagagctcgtttgaaacgtcatattagggtcgtattgtattgtattatattgaattgtattttatgtaaaactatatgtggtactaacttttatggacacctaaatatatattattttagtataaattaaagtttaacatagtattatataaaaatataatatataatccaattcaatataatacaatacaatacgacctaatacgacgatacaaacaagccctaagtgaatgacatgtttattaataagtaatgagaatcaatgataaggtagtcattctcttatatttttcgtttactaattttattaaaattaaaaaaaatgaaaaacttgattaaataaaggataaagaaaatgaatagttctccactaattttttaaggaatgtcattaagactaatagattttatttatttttattttatttgttaatattaaatatataataatgattttatcttttgaaatatgtctttacaaaaataactatcgtatattatagttcaactcaaagggacaatttagtctatttaagtattctgattacgttttctaataaaataaataagataaatcattattattttatttccaaacaattttactaaacaacatatattacaaattttaattctgattattcttcatttactccattaaatttttctattaatttattcaaattctgaatattgtatagtaaacgtgtcataacaaattatccttacttgttttctaataaaataaataagataaatcattattattttatttccaaacaattttactaaacaacatattacaaatttttattctgattattcttcatttactccattatatttttctattaatttattctgattctgaatattgtatagtaaacgtgtcataacaagttatccttacttgttttctcatatatatatatatatatatatttaattttttcattaaaataacttttaaatctaagaaatagtgagaattcttgatccctctcaattcaaaaattatttgaattgatgtcctttcattaaaattaagtccccttaaattgtattgatttaccttaaaagtttcatttcaattagattattttggttattcaccatgtacgaagatccccgctaagcattaatggttgaatagttaaagtgcctaaattataattggtgaattcgtaggttcaatttctacttgatgcacaccaatgaaaccctccaataagtctattagaaatttagaattgactcatcaatggaatctcatcatccacatatatatgagtaatttgcggtataaatatttaagtttaattcccgattacaaataaatacataagtttaatttttagcggtaataatacctaagttatatttct

SEQ ID NO: 296308 - DNA, 6604 bp, Cannabis indica
attcaatcgcctttattaatggaggctcatgcactctgtcatgctctctcgtggtgccatcatcgaaacatacagccggatctcatagtttcggattgcaaaatgctggtggactacattagtaatgatgcatctcacaatattcttttaaacagatttgctaaggatattaaaaacttcctctcttgtattcctaatgttaaatttgttcacatatctagggagcacaatgaagatgctcataaccttgctaagtttgcattaggactagttcaggaagttttttggaaagatcaaaactttgcttgtaacctgtaacatgtactctattgttttcatttttctgcaatacaggtcttcctttttcaaaaaagagagaacagttatatataaaaagtcaaagttgtttctctctctagatctcatgtgtatatatgcatggaagcacttttagggtttggttattatgttatttagattcctgggatcctaaacaaatatgagagagagatgtatctagcaccgtcagttccactatgtatggcccacgtgtcgtaatcgtatttatcattgatatctagctactaagatacgcatgtttccacattcctaccttatatttatatttgccacttattattttggttaataaagtcaacatgatcaacactcacccacccttaatataaactcttttattagttatattattattaatgtaatttaaaagataattaattacttgaaactagtttaaatagctataaaagttattcagcataggtgggaatcctataacttataatatatgtaacttaattaaaaatatatattatatttattaagagtatttctataatatttttaattaagataaataaaaaatatttctaattattttaattaaaactataatatctataacttaatcctaattatcggtttcatatatatatatattatatatttttaattaaaatattgtatttaattatagtgtttatttaagcatattatcatttcttaaaaaaatatgaacaataatatatatatataattagttgaaaaattaacacaaaacttgtatataatatattatgtaatattaatgtttgtttgagttagtacgttatttttttttatttcaaaaatacaatgtgaaaaaataattaaattataagggtccttattttgtccttgatctaatatgtaataccaaatctcatatttttatttgaaatttaaatatataagacttataatataaattagagtaattaatatatatttatatttatttttttaattgtattgtatatgagaaacatacaaatatatatgatatatatagcaataaatattaggaatacaatcaagaactgttcacaagggtgggcaatgtatatgtaatctcttaaaaaaatcttttttattttttaatttaataaatttcacttacaattttattttttatttatgtccctcttcatattctataaaaaaatatcaacactatgttattattctaaatccatcttcaagtacacaacaacattattaattaattaatatatatttttattttaaataatatattatatatccaatccatgagttgttgatgttaatatttgaattttgattgaagatgtttgtttttagagacaacttacactacttaagtggggtcccaacccattacgtgtttatcatgaattattgcttaagatgtttgcgtgattgacgttcaaatcttatatatatcaatctctatatatatacaacaaatatattataggaaatatttgtaataaacacaacaagtaatataatttttaccagcatagtttgttactgcactagtttacttttattagtgcatgcatttcgcaaactacgttgataaaatagtcaaaattttaccagcacacatttgcagtggctaaaatctaacttttaccagcatatttatgcgccagaaaaaatcttttttgccagcagtttttattttttactagcaaaagttctaataccaacgttaatttaccaacacatcagaagtaaattctattttaccagcgcaataccaaacttttaccagtacaaaaatttgctggcaaaaatgaccttttttatagtgaaatagtcattcggtatttattttggtattttaaaaaaaataatttattttttataattgcatatgttgtaattttttttaagattatttataaatttttaaattttttaaaataatttaccatgttaaaaataaaatttaaacaaatatttatctcaagattaaaaaattaatcacacgtgtaaaaaatatataaattttatttttctgtattgcaaattactcagaattttttaaaaatttacctaaattattacaacatgtatacatgatcataacaaaaaattaaactaatatatactactaatattatatcatgattattattatgaatatatactactactataatagtagtactaaatatatatatattaaacacataacttatcctattatcttttcctttcctttggaagagatctctccaaatcttactaactacaaaaaagagaaagaaagaaagaaagaaagtgtgattgggtttgtaataacatctcccacttcaatatatataatgtatatatgtagacaaattcaaaagctcataacaaagtcttgatcacaactcaaaaacatgacccaccattgtctcctcttttatatattctcatgtatgtgttgatgatatctattaattttcaaaccctaataagatcttagtcaatttttcccatataaagaaaaaaaagttataattattctcatttgatatatataatatcttcttccccatgatctggatccattacctttggagactagtactactataattatgtactaaagcttatattcttttctgaccgttagattccataattttaatttattatctttaattaatcaaattagtcatggcaaccagtggttgattactatttttttttattgattaattaataagtatagtagtttagttatattaagttgtagaagcaggtagatgatgtgatgattttaaattattttattttattttttttcaggtatatatataaataatattatattattatggggtccataatttaaattcccaaacatgaatgattggaggccagatattatataaaaatagatttagggacttagattaggatctctctctatatatataattaattaattaaataaataattaagcctataaatgtgttttgattgtactactaaacctaacctcttttttgcttttatcatatgtacatggatccaaatgttttttgtaatttttatttatttatttattaatgatctttttttgtagatgatggtagagaacaagaaaaacatttaaatttaattaaataattataattatatatatggaccacttttacttcccactatggggctcaaggagttgatccccactcaaaaaattaaataaaaaattatatatattacataataaataaataaataatacttatgagtatatataaaatgcatgaagtgaccttgtaatgtaaacgtgttgccctaaaggttgaagaggttcatatagttgttgggaccagtggtggccaagttaaactttgttctaattcttggcttcatcttattattgaattgtgtactcttttccattatgaacacttttttttttctttttctaattaaaagtcttttcttttgagttttattgttgagtagtataatagatagatgtgtgttttgaactatatgtgctttagatgatagtgagaataatggggttccatctcaaaattaattaataatgagtataggtcatgctcttatatatagttcaatattctatcatttattctatgtaggacaatgtccacaatatatagaactcgaactcataccattatgtaatatatcatacatcctaactaattaattatgaatatttattgtttacaatacatttaattttacttaaaataaaattaaatactcaaaaagtgtaaaccctaagcacagacctaatctccttatgctgaagatcggcctgggtttaaataacatcgataaatacatatataaattgtcattattacttctctagatttatctagtaattaaataagaagacatgaaattatacaaccaaacatataatgtcttgtatgttttgaactactttttcttataaaattttaatgaaaaataaaattaattacaaaattataactagaaaaattaatatataaatatatatatatatatatgtaggccctccacaacctatacattttccttttgttgttaatttcagtcttttgatttatgtgagttgtttgtttgttatattcattcataatgaaattagatatttttttaaagaaaattgttggatcatgtatataaatatatgaacattaatcatacatgttattaatgaaacaaaaatatcataaaatttgaagattagatagtttcatatgtttaataaaaagataaggtattgaggaattattaatggacatatgaactaagattttgtttcttttactaaaaattgaaatgtatatatttatttattaaattaatagtatttaatttatacatttagggcttattatatctatatatatacttaaattttaataattaataataataaccattcgattaatcaatcattaatccgacagttattaaaatcagttcaccaagctttggattagcatgatcccctagtttcaactttgaaaagaaagagagattatatatatagtactactacgtaacaaaagacctatatacatgtacctaaagctatatattatatatagtatagatatatatatatagggcaaaataatgacctgaggagaggagtgagagactatacagctagctagaagagaagcattattattattattattattattattattattatagcaacatgatctccactgatcaagggttaattagaaagatcagaaagacatgttgtgagttgagttgggttttctttgattggaccatatctcactatttgaacaacctttgctttgggttaaagtggcccctacaataaagccactactctttttgttgactgtaatattgttattaagtattagcggtacttaatatttttgtgatgatgatgtggcggcttagtcagttgtcatgttaatgtcatgtcaacactacgtgtataattaattttaaaaaaataatttttttattagttttacgtatttttgttaatcaataattaatttttagtttaatgatttgtttaaatgcataattttatattttaatgttaaattatacacatggcgctaatgtgtcaattggataaacaactatgtcattattttatttgccacatataatcaaaacttaacaaaatgactaatttacataatagttcagggtccatatgtaataggctagaaagtccaagaatacaataatgcacatgtcatagtttaagaggcaaaaattttaaatagccttataattattattaaagtaaaatagatcgacctgatatacaactctaccaataaaaatatgtcacctggtgaagttgcttgacataatagttaccttttagcgtttctcttttgttgaaaaaagtgtaattaaattagctactattatactactaattatattgtgaaatataaaacataccttactgtctttagtgttaaaatatattataaaattattagtataatttaatatcatatttaacatattatttttaataataattataaaaaatagctagatgtcacttcatgtatattgttatgacatacattgatgtggcactgctttattagacaatagatttcatctaaaataaatataattagcttaaagaaattataaccacactatgtataatattttgatacatattttagataaatacctacatatattattactctattaaaatataccactaatattaattaagtatacgtcactattagactattagtactaagtattaggttcttcgtgattcaatataataatttttatagaatatcgatcatcattctcttaagccgtcacttcatacagggccgactctgggctaaagcggacgtgcctagggtccacccagcctaggggctaaaaaaatatttttcatttaaatttatatatatattttttttattaatttttaaaaataccacatattttttaaaatcgggcccaataaattttttttaagacctacccaatctcaagattgacctttgacctcgttggtagctattagcaatgatctcactcttaatactattagcaataattttagttggttcttaataaggttatatctgaaactcaaagtgcgttcattcctaaccaattgattaccgataacattatggttgcttttgagataatgcactacatgaagagaaaaactgcaggaagaaatggagtcatggccctcaaacttgacatgagcaaagcatacgatagagtggaatgggg

SEQ ID NO: 296309 - DNA, 2942 bp, Cannabis indica
aattagtaagtttaaaaaatttaacttacgtaaaaagttaagtgtaaagtagtatttttttttactttaatactctaaattaaaaaatttaaaaaaaagttaaaaaaacaaattttaattagaacatgttttctagaaataattctaatttacttaattaaaaaaccgaaaactagataaaaataaatatcaaaacgacatcctaggacttattaataactcttttaacatttttataggacagggtacattaagcctaacccttttaaaatgcaaatcaatgttattttcactacaaactgattctattttcagacttggctttgatcgcattatatgagtctaagttaggcaattttccagaaaagaataagaaagcttaccctagcaattggcatccttgttctgattgaatcaagcagtgagaaatctatatcggccacagtaattcctgttgacaatcgatctgtagcagcaacaataataaattatcaaactcgatattacataatggagccctgaggctcacaccaaacatcaaatcattttaatcaaggttagacaattagtatgattacagtagttttgaacgatggcttatagcagcatataatttgatagtaactcaatctcaaacaacttaaagtcataaaatgtaagacaaacaaagttaaagtaactttatagcaagccaaaaggaactaagaatctgagtaataccggtctgtctactcaccagtaagtcggccaactactgttccccatggatcaataatcaaagtttcgccatagctttgtcgtttatcattatgctttccagtttgtgctgcagcaatgacctggtacaatcccagaaacagaaaagatggtaactcgtgaatatatgcaattttttgctgctttagagtacttgctacaaaacatggatgtcatacatagcactgagtctcaattgcacgggcacgaagaagaatctcccagtgtgcctgacctgttgcaactgtgaaagccgcaggtaccaataggacctaagaatatgatgtaggaaacaaacaagcataaggtggtaattcatccactacaatattagaaaatgtacttgtttgttttgtacctgtgcttcatgttggaaccttagctgctggtatagctcaggaaatcttagatcataacaaaccgtgagacccaatcgtccaacaggactatctaccgaaacaatgttattccctgaaaacatgagaaacaatttgttaactacagaaagtgaattaatgatcacttaattaagaaaagtacaaaccaatactccttaattttaaaagtcacatgggcaagtaaacctgcttctgtaatgttgctttccttgtatgacctttcaccagcaatatctacatcaaacctagaaattaaaagaatttatcagcttaattaaagtaagtactttgtcaacccaaaactatatgcatcatcaccaaaggataccaaaaccaactgtatggcctgtgaatttcatgaccgattataaagtttgaaacccgaaactgaaacagatttacaaattcatatggacatggagaaaattcagagtaacattaaccacaaatgtattaaagttagaatgtttattaaacatgagctgggcatttctggtcctcactaagttaataataattaacaaaaaaaccttacaatatgtgatcatgtatggattcaattactatttgaaaaaagcaggaaatataatatgtaatcatagtaagaaaccttacaaatgtatcttcttgtaagtgcttttgattttcccattatcatcaattacaacatgagtattaaacaaatgctgctcatcaggacctttctcttgaaaccctccaagtgacaaccaaatacttgattctctacaaccaatcaataaataacattggttaatccaaataagagcaccatatgagttcgtacgctatattgtgttgtatatcatattttcatataatactatgttaaattttgatagtaaatggattctattaagtataatttgagttttttgacctagctagagaacagtattgttgcatcataggtccatctaaaggttgtgctattttgagactttctccatcttgagcaccaatgaatgcgaaactttcaggaaaacagatcatttttgctccggccgaagctgcttccttcacagattaaattattagcaacacagtgattataaataacaaaattgagaatgattattcaaaaagcatgggtcggttagagttcaattaaagaattactttgacgaggcgagagcaggtggcgaaattagaagcgagatcgttaatggaagtcatctgagcagcggcgattctgacagaattgacggccatttccaaatcggcgaggaggagacgaggtgggttgttggtgtgtctgatgtgagagtagtgagtgagtgggggtgtttgtacggtcgaattttttatatattttttttaggctaattagtaatttttttcgcgaactttaacatgcgctcaactttttgttcgttaaaaattctctctgaattattaagattgagggacatgatttaatacatataaatgtttgagaggcatgatttagtagatatcaaagtctgaagagcatgatttagtacctgaaacactaaaattgaatgaattaacaatcttaatagttcagaaaaattttaactgccaaaaaaaattcaggagtcataatttagtacatgttaaagttcgggaaaaaattgctaattagcttataatttattattattattattattattatatataataatagaaattaaattttttaaatattttaatttaatgttaaagaaaatttaatttaatttttttatatattttatataattatattattattaataattttttattttatttaaaaaattatgt

SEQ ID NO: 296310 - DNA, 6830 bp, Cannabis indica
tcctatacctacacagtctcagaatcatcctacttgactttctccaggcgatgtgggattgcacacaccttacccgatatttccccttacggatcacgggactactgactgtcacagaagtacaaggaagattgaattttgtaattttggagagcttagctctttttgggagagatccaaacccctcaaaagtttggagtatcacttgagaattttcttttttcattttcaataagaattcaaatcaaattcagttcttgaaacaacttgataaaaagaaaatcccatcacatgcttttcaagtcaacttctgtatcattccaacacatcaaagattgactttaaattaaaagtgaggctcttgttcaattatgcccatgggcaaccattgcaccaacaaaccagaagatccacactgctatcttcatgtaacctacgtctctttttcaaaaatagaaaaggaaagaaaactattaccctaatctattgtctggtttgagtaaattccaactgcaaaattatgtgaagtttttatcacaatcatttattggacagaatttgggtcaatgccaactgtgtgtaagcaaattaatattagaattataaaattagacttttactgttttttcttttgataaaatgtctaatctattcgatagcaaaccctatgcatgtatttcacaagtcaatcaaggcttttctatcaggcaactggcaagtataaatctatctaacaaacacttcttggaaacttatcaaaaaaaaaaacacttcttggaataatctagaacttggtagggaaacccattattgccaatgaagttagaggctgatttgttatgagataactgacataataccattacaatgtttgggtcatggcaagaaagctataattgtaggtacgccaaaggcctaagtttgctaaggaagctagatcctaaactgagatagaaataatgtaaagaattccaagtccaactcattaaatcacagagcatcaagccccaaaaagctcctgtatgccgattaatatgcgtagtaaatgagagttgaaactccaggacaatgggtggcaaaagacagcaaaccagcactaattatttcctcaaaaaaaaaaaaaagcaattatgcctgttcaaggagaatcaaagccagcccagtcccaaacttcttggtttagagaacaaaaacagaaaccaagaaaactttttgcagactaaccatctggaacattggatgcatatcaaagaacataacaaacaagagagatagcaagtgtaacaagatatatatcgaattttaccatgatccctaagtaaagcaaagcactgaaaagaaaatcaaaataagataagcacacgtatttagcaagtgcataatcacaccttcaccacatcagtggaaataatgtcaccataaaccaaaaaaaaaaacttgaaacagttgacgtgatctctcatcctttccacataaacattgtcatatgtctcagataaataaatttaaggatgaaagattaccaatattctatgctgaaagggaatacatgcagcagaagtaacatgtatggaagataaaagtgattaaagaaaagacttacctaagaatgaaggttgaaaaaattcactaagtggatcaagaagaggaagattcgacggaaaattaaagatttgaacttgttagtacttgtcaacagatcaagaaaaagagacttaaaataaatgagatgcaaaaaagctcgatccttgcacaaacatggtcattgtcttcaataaaacataagtacctacaaggagcatgtttatattaagaaacaatcttcaaagagcatgtttctaataaaacgcatcaacaaggagcaaaacaaaaatgaagcctcaaggccagccgatatatatatgcttcaagttacttcaccaaacctgagaacctaataatgtgtaccaatcaagtaactattacattaaaaggttgtgtatcatctctaaccataaaaatgcttctatgtatacatttaaatacaaattggtttatgcatgtaaaggaaatcaacagatgatatttttaccatcatgacttgtatttttaccaaatcaaccgatgatattgagtttgccatcattacttgtatcactaccaactcaacagacattgaaagaaaggaaaacacacacacacaaaaactagcactatcaattcttaattaagtaaaaaaacaaacaagatacatacatatatacatatatattgctaaaatcaatcaaaacaagatttattttaattgaagaatcaagattaccatacatgttcagttgttcaccacagctcaaaatctacaaagggataattaacaaattgaaagagatacaacattagggctcagtaagcctctgaaatgtagttttgattaaacggcagcaaaatcatgtaccatgcttccaaacgcacataaatcctagtctctccaactttaactatatctatcattggcaaatgcaattgcaaaaaaaaaaaatatataacagacaacttttttttctgcttgtaattcatttcattaaaggagcttcatgtgtcatctggaatatatacaaaactacaagcattcaaatattatatccaagctaagacatagctgatagtaaagatgcatgataacttgaaattatccacaaaatccccacaattaaacgttttccacatggagttagtgcaagggcttgatcccttgtgattattattatatacattcatcgagaatttctacccaacatgatttttattctgggaaagatagaacgtgctcagtaccacaaataaagtatcttgtccaactaaaataaacccatcacatttcatcaaataacacaggtctacagtcccaagtccccaaagaattgcaattttaattaaattaacagaatcgcgaaacaacaactgggcatcattgaatttaaaatttggaatgcatgatcaatttctcttcgtaatgagcaagaataagagcatttaagcatatacagagcagaaaagcaatggcaattaggcataatttatatgctgcaggccagatatgatgcagcctccatagagctgttacacatgcagttacctctgtgcatgaacaatttgaactccctataaatacatatataaggttcatatataacattgaaattgatgggtggctgcagtgcatttgaatctgttatatggtgcaggccatgtttttttgcacaaagggaaaaacaagggagatgtaagctaatgttattgcaccttatgctggaagtgcagtagtgcaaatttagatttttggttaaaactgcaactcaggactgcataacatgataacatgcttatttccaaaaaggttccttttcccctcttcactcccagcttgagtgctatgatgataattgaagtgactctggtgacagaagtgtaacttaagatggagactgggtctgttaacatttgcacgacttatcacataaaacaaccctatctaaagtggctgattttaagttggaaactttagtaaccttgatttttataaacagtatctcaagtatcaaatgttaaggctaaagattgcatgggtaaacatcatgttaacttcttgcttgtaaatgctcaagcaacaatgtgtgctcacttatttgctttgcaatgtggtagatcaagttttatcattaccaaaagattgttgcttcatttttacttaattcatgaacccagcaccttcacagatgcactctatcatgtccactgaacggtttttcatcataaaccccaacccatggtccaatttagtggtaactgatgatcttgaaaggtcatatgcttacttttgtttccttttacccctgttgcttgttttcttacaagatactttgtctgtgttttatttccatcaaaaagattgctttcaattcatcataaattttcatgataaatttcaagtgacaggctaaagagttgtaccaactgttatattatggtggctatttaacagacttaaaataacagttcatatcacttaagttcccattctttttgcttaattactcccctactatcaatcactccaatactccctatattttacaaaacagtaaaatattatcaggctccttattatatatatgaccaacgtattctcaatctctaattttttttttaatatattaggtaatttaagtagagggtacttcggtcacaatcaaaaatagtttgaccaaacaagggtatttaagcaaaatatacattactaaaagtgtataatctcacatagggccatgcaaatacacacacgtcacctatgtaagtttgttgcagttgatgagaaataaatggtcgattatttatcaaaatcttacgattactttcactttaatggataacttgaagagcaaattcaaatgacaaaagaactacacaaaaatatgtcagctaaatgctaaaactgatctacgagataaatgtgccaaaaatgacttcttaatgatcctacacatcaaaacatttcaaaacttcccttcacataactcagccatataaatatggtagtatacttcattttctgtataacaaaggaattccaaatacattgctgcaagaaacacagaacattgcttgatgataatgttcaagaatctaagagtctaagacaccaccaaaaattaggctaattctactatctatccccagatcactacaaaccaaatgcgtggacattacccacctttttttttatgggaacaataacatataagttgcttaggtcttctcagctgtctcttgtacaaaattcaaggcttcccaaatcagttttaatcacttgtataaataggatacgacaacctttaaatttcagaattttaacttcaacttcgatattatcaatgtttcagttttcagggaagttcatctcacctcttcttagtgagattatgtaagagatagtgaaaaaggatatgcattttattgttgctaacttcttattatcactacttacacatttagggtctgtttggtacattgtattgtatagtattatataaaaatatgatacaaaacacaactcaatataatactatacatcacaatacagtgtaccaaacggatcttaaactgctacatatggaccaccaggaaccagaactgaacccaagtggttaagaaaatgtatggatggataatttaccatgtaaacaataaggcttgtgacatttgttggaaatgaagcaatgatttgaaaaatgagtatatgcctcttttctgttcatcatactattatgaaagaaacattctcctacatcaatatttttggaaagtcataaagtaaccaaaccttgcatgcacaatgttaacagaccatttgtcatcagttgggattaagagattagattctattacttattatgccatctgagacactgatcaggtcactattgaagtatgggaccaattaattgtacacttgctgagttgttcatgctcctgctatagatttggtaatgctttacacagtcctaagatttaattttcattaatgggttcagattctgatagtgctggcttcattatgatactctaaacccaaaagtttaattttatggagttgcacttgttttgatttatagactaaagatttttcttttacttttttagatggagttcattgcttacttagataaacaacataagtgggataaccaatgaatcaagcaactgtagagccctctgatgattcacctcaaaaaatggataaaagttataaagaaagatatacaaacacacacataaagtagataatataatagtacaggtataaagagagatatagaagcgaaaggaaagtaaattaagcaagaccaaactaaccgccttagcaaactcaatcctaagtgggttgcccgcaagaggaaagccttgaagagcttcaatggcgtcgattgcgtcttcatccctaacaaagttaaggaaggcatagctacgacctggttgaaaagccacactttcgaggtcaccaaaccgtaagaaatggtgggtcaactcatcctccattaaaccatgagcaaggttcccaacccagaggtgtctcgatggcggggcattgctcttgttgaagaaacctccgcctctgccactaccaccacccccataacgcccaccagacccagaagaatgacctatgttcctctcctccattcggggctgatactccctccggaaccggtctcgcccacctcctcctcctcctcgtcccatctacgaaaaacaccaaccaatccaacaaatattcagtgaatgaaaagaaaaaagtataactgagaagtacatatatgtacatatatagataacgttacacagtgaaattcgaaattaccattgtatcagccactcggagaagctcttcagaccaactataatgaagatcaagagttgttattcgaaaattacaagttgaaaatggggtttagagcttttccgagagtaaacagtatcagatggtcagatcggatggagagaaatacagagtcaagcttgcttttgcttttgctttttagggtttttaataatgtctgtcacacccttgcatttaaaagggatgagaatgcttcttcataaattatcatcaattaatatcttttatttaaataataataataataataatataggttttgctcgaagtgtagggatggtaattatacccgagagttcgggtacctgcccctaatgggcgggtacgcgggttgactttcaggggcgggggcgggtatgagtttaaagattcatacccgagtcgaaaacggggc

SEQ ID NO: 296311 - DNA, 1574 bp, Cannabis indica
tttttacaaaaaaaaaaaacttcactatcaccccctcgatgatcataatcactcgctgctggaatatgcaacaagagacagaaaaggaacatgaactaaatcagcatcagcatcaagaatttgctccccctggatatcagccgttgaggagcccttctgaacattaggaagattctactccccctgcacaacagcaagaatgttctcctcctagacacttgcaaaaacttgctttcctcaaaaatttgtaggaacttgctcccgctgaacatcagcacaagtagaacggccttaattaatagccacagaaaccgactaaacattgaatgcaagatagatggtccatggacttcagtaacacatggatctgcattcatattagatggagacatttctggggaatgcacatagaagggaccatcatcatctaaagaacttgaaaaatcaccactagtgggaacaaaaagaccatcctctaaagattttaaaaccttagtcatagcagacaatacatcaattacaaccttctcaaatcgatgtttcctgagctgatcgagtgcataagagttagcaaaattattgaccagggaaaacatctgactttgctaagatgcaggactgaacccttctagaggtacagaaagagctgtcgatgatggtgggacatcagaggctaaagcttcaccagtagcaaaaacatccataatggataagggcaaaggcttgccacacacaagagagaaggttttaccaagagtagaaacaagtaaaatcttttcttgttcaaatacaataggaaacccccatttcaccataggattaatcaaactagaatagggcaaagtgtgttgaactcctttggtagaagtagagttacaatccaatcatacatgagggagggaagatcaatactgacaccactacctaatacaaatagaaattttcctatgatatagttgatagtagagatgtgtgaactagcccaccaatttgatagtgcaatcttgtaaagaactctatagaacttagtgagcattatgacaggtaactctttttagttccagacaaactcagagttgctagtgatctcagatcctatttctttaaaggaaggcttatactcctcattgaaaaaaggattggcaatagttttgatcttcaagacacaactaatagtggaagggacaaaatgaaatcgatttccccaaatataagcaaggtatagaaacttgtttttcttgttcagaatcctatcatcaaggttagcatagaatttcctaaccatgttctcatttggctattgtagatgagtgttagataataaccaccctttttttcaatcaactcacaaattcttggcaagtacttaagtttgacttttttgacctcgcttttagccaacgatagttagtctaatttagtaagcgacaagtagtttataacgattgaaatatgataaagcaatgtaaagacacaggaattttatagaggttcagccctgagcagttcggtaatagcctaatcctcgttatttgtattgactcaagaacaagaagaaaggttccttttcttat

SEQ ID NO: 296312 - DNA, 6379 bp, Cannabis indica
aaaaacaaaaattattgaagagttgcatatacaaacaaaaaatcacttgataaaaatttagttataatagggcacgtgtcaactcaataataagccctataaaacatgtttcaacacattaatagccacgtttcaaaacagtccttatgttcacaaacttcaccccacacaattattatgcaaaagtatatggttaatatgacatgagatcaaaatgttaggtagatagcatttaatttttttaacatcagtaaaaagtgcatgtcattttacttaaggtaaaatatgaatgtatataattaatgaacatgctatttttttttctatcaaagtaataaagttttctctcaaagtgccctaagttcttagtatcaaaaaaacatggacagtagtagcttgctctaccgagctgcccgggaaggaaaggtcgccgctttacgggaacttcttcaacaagatactttaattctcgatagaccttttatcatcaacaataatagtttttcagagacacctcttcatgtggcggctatgctcggccatgtagattttgtcaaagagatcatcagtcacaagcctgagctcgctaaagaacttgacatgtggcactctacaccactccacttggcagtggcgaacgaccaccctgaaacagtcaaactattactttcaattgttgaccatgaactcttgtgcgttgcttgggatgaagaggggagaaaccctcttcatcttgctgccatgagagggcgacttgatgtgttgagagagctactcaaagtagctcccgaagctgctcaagtcaatttgaagggtcgaagtagtgggaccattttgcatatttgtgtgaggcataatcagtttgaagctatgaagcttttggtggatgttattgatgattaccagtttgtgaatgccaaagataattatggtatgactgttttgcatttggccgtagctaataaacaaattgaggtatgtaatgtactacaaccattttaatttaatgagcataagtgtttagggtttagttaatgaacgttgtttaattatatatattttaatgtaatgaaattttttttatgcatataacttgttttattaatatttttatatgcatatttccattttcatttctctttcttattttccttccttattaaaatttgaatttttaactagtttttctttttcttctattactcagacggtaaagtatttgcttacaaatactaaaatagaagtcaacgcggtcaattcaaacatgttcactgcattagacattttagcgcagagtcaaagaagcgagaaagactttgacattgtagagtctcttcgctcttatggagcttcacgaaccataaatcaacccgtacctatgaaaatgcctattattcaagctgccaaagctagcctcaagattcctcatgatcatgttcatcaaatacgaaaaaatcaagaggacaatagtaagggaacatcgaatccagaatactactggctagctaaaaagagagaatcgttaatgattgttgcttcccttattgccactatggcttttcaggccggaataagtcctccaggcggtctttgggaagataatggttccgaaaatattccccactctgcaggggagtcaataataagttattacggaaacatatatccttatcatgcttacttggttactaacacaattggttttgctggatcattgagtataatcttacttcttgtcacaggcttgcccttttgtcgcaaattcttgatgtggatcttaacaataattttgtgggtgactgtaacagcgatgactataacataccttattgctattgctgttgctgctccaagacatgattttcatagtactccatgtcatgttatcacaattttattaataagctggggtatagtcatgcatgtgattgtgctactccaagccattcatatttttataaagctgtttaaatggttacgaaacctaattatcaagagaatgagtagaagaaaacaaaacaatgctaaagatgtggaaactacttcaatgtgatatgttggtgtagaattgtgttagtaataagaaagatagttacactaatgttggtgtataaatataagtacatatattatgtatatagctagattgaacaatttatgcatgtttgtgtatttttctttttttttggtataccttttaagcgggtgcacccttaaaaggatgtacatatcaatgtactctattatatttggtatttggatagttataatttgaatttattattatcccaacatatatatagttttggttaagatatcatgtaaattttttagtatgtagtttctttttattgtatacattatcaattggttaaaattaacaattttttttttaaatatataaataaaataaaaatagaagttagatctttcggtcattacaaaagataggactcgatatcgaaaatagctctaccataccgattacactgttggcaaaagcccacttgaccacattatgagccgcgaaattacaaattctagaaataaaagaaaaaatacaacttaacataaaattagagagatgtttacagttacacacataattatcaataccccaacagttgccggtaccccttattagaaccttgatatcagaatcactctccattaacacaaaatgatgatgatgtgaaacaaccgtctccatggcaagcaaacaagccgcagcttctccaatgcgggaattagagaaattgagcattcttgtagccacccacaaaataactttcttatgatccctcgctatgtggccacaacgcacatggtatcgcaaccaactttgacataacagttgattttgacccaatccattggtggcggcgaccatgtagactcaacaaactttagggaggtaagtaaataagatccataatctgcgtaacaaaaataaaaaaagtcaatagcatgtttaatattacacaagacgttcttgtgtaccttgtcattacgcgctctccaaatcatatccgccataatcgaagcataaatgaacaatttttcagtatccaccccattagaattcaaattccaaagaaatttaacccagtcccaaatacgagctcctgaatttaacactggcataactccccaaggggaagaccgccacggatgataggcgaagttgtaatagagaaagagatgttccatcgtctcatcttcctccccgcaaattaaaaggggcaagagacctcttcaatatgcattctcttagcgagagaggcacgaataggcagagcattagagagaatgctccaccagaggactttgtgatgttctaaaatttttgaattccataatttgttccaaagtgtcggggcaacattgcacgaaagagcacgcttaagagcttaaataaggtaggcagacttagtgaaaaacaacctatctgattctttagtccaaacccatctatcgctcccttgaccaataggcttgccacctttgattatgttgttgataattttcaggtcaaaaagactaatgagttttgaggtgtcccaatccccattaggtaagagtaaatccaccaccctcatgtccttcggcagacaagtaataggcttatggtagaaatcccatccatggataacccacgggtcatcccaaatgttcgtctccttcccatccctaataagcttgtaggctcctttcttaagaagttctttagatcgtacaacgttcttccagaaccacgaatcataactcttagaggtacactccaagaacttgttacctctaagatatttggcccttaacactctacaacacaacgattgctcctcgttaagaagagcccaaccccacttagccaataacgcttgattcatttctaaggacttacgaaaaccaagaccaccacgggacttggaaagacacaagtggtcccaggccttcaagtagataccatgattgccctattcacaaccccaccaaaagtctctaaccataccatcaaccttctcgtcaagatttttaaagagcttcgttgtctgcatagtataaactggtagagcaaaccccacagatttgatcaatgtggctcgtcccgccttggacaacgtcttcaatttccagccatgaagcttagagactaggtaatctaagatgaagttgaaatcagcgtccttttgttgagttctaaataatgggagcccgaaataattgatgttacctatggtattgctgagatctagtttttgcatgatgtctcttttcataccctcactagtattgttactgaagaatattgaggttttgagtttattaacactctatcccgaccaattacaaaatatttctaaacattgccaaaagtccctagcttccgctaaatttactatgcccacaaaaatcatgtcatcagcaaagaacagatgagagagcctaggaccatctctacacaacttcaatcctctaatagttccattatctagcgcattttcaagaatatgtaagaggatttctactgcccagataaataggggagagagggtccccttgtcggaggtcgcactccgggacacaactactcatcttgctaccattgaggtgaaggttaaatgaagtcgttgagatacactatcggacccaattataaaacttaatcagggccttgaagctacaaagtacgcgatcaatgaattgccaacttaatttatcgtaagctttaaccatgtcaatcttaatggaaaaaaacccttctttccctcttttgagtttaaacgagtggatgatctcttggataagaacattgttatcctgaatatttcgacctgggacgaaagccacttgtgtaggacagatctgacgagggagaatcggtataattctgttagcaatcaacttgaagataaccttgtagataacattgcacagagaaataggtctgaattgggagtacttttttcaggctggaaataaatcaagtgtactaatagtaaatataacatttgacttgtatcaataatatcgtatgaattggaaaataaatagttggaggtaaaatataacatctgaatttcaatgggcaaaacatttggtaaattgttctaacttgatctctttataatttatactttcaacttgaaattaggcttaattcactatagaaaataaagctacctttgataataattttttagttataatataattttttttatgatttttagttacaacaaaaagttacttgtgactaaaatatagtatttagttaaaaattgtcactaatttagtttagtcacaacaaatattacgactgaaaatacatttagtcataacaaattataatttttgtgactaatacctttaaccataaaacttttagtcactatgataatttataattagtcacaacttttttacttttagtcataaattttgttgtgactaaaagtaagatattctgtagtacactaaatgaaatattttcacgacaaaattggaaaagatattatagtttcgttgattaattataggtaaaattcattaaagttttgaccacctaataataccatttataaaacttcttttgaatttttgaattctcaagcaatatatagaaacaataaatcacatctcaagattctccaagcacaaaatttgttcccctttgttttatgcacctaaataaaaaaatctcgtcaagtttcgagaggtgtgaggaactacaaaattttttatttttagtcataataaaatttgtgactaaaaatgaaaaagttttgactaattataaatcatcattcttatgttgtgactaaaaggtccgtagttaaaggtattagtcacaaaaattacaatttattgtgactaaatgtatttttaatcacaatagttgttgtgactaaaactaaattagtgataacttgtatctaaatactatgttttagtcacaagtaacattttgttgtgactaaaaatcaaatttagtcacaaaaatattatgatgtgactaaaaaattatcactaaaagtaacaattttttgtagtgaggatgatacgagcaatgatcaatatacttgaatatgactgaaactctcgtaagttagtccatgaaatttgcaaaaaaatcaatttttaaaaaattcttcgttcctacactaaaagaagcattttcacgtaagaaatcattgggaaggatttattatagttttgttgattaattccacatattattagttaaaattttgaccacctcattgtactatttttattaaacttctttcgaattttttttaattcaagcaatatttagactgacatggtataatcagcgatatgtatttttataccttggaaaagtgttatgtccttt

SEQ ID NO: 296313 - DNA, 3230 bp, Cannabis indica
acttctgtttctttattgatgttgaatataatggattacattgaattggagttttatttagggcataaaacccaatagaaacatacatttttagcaacttcttccatgaaagttattggaaaattcatcattcctagacactgtgaaagcgactgtaccagtgcacacatttccccttcttttacttcctttaggtatctcttttgtgcattttgggttcttccagtgagatggggtccgcttgatatagttgcaacatgtctgtccattggtggcggagccattctaggaggatatggggttcttggtcctggagccaacaaagccacgctagccggagctggtagagtaggaagagcaggcaaagaaattcttggagcttgagggtgtgtaacccccatgtgtccttgaactaccccctattcgggataaatgatagggatactgacccattgccccaaatgcccagctcagaccaacattttgatctcgtctttcaagtattcacactcatttgtagtgtggcctttttccctgtgatattcgcaatgcttgatttgatcccgtatgttcctcacactattggacatgcaggggggctttcggtaatggaccatgttgcatgtcgctttatagatattctctcgagtgtctatcaaacttgtatactcgatgtactttggattgtaatctttccttggtttcttcactgaatcatttcgactatggttctttcctcccatctttaacttgtatactcgatgtactttgcatctctccccacaacaaagaacccatggccaatcctgattagagagccaacaacttcaaatcgtcgctgaccttggtcttcgcggccgcctccatcgtcctttgaatgaaagctttttagctcttgttcggttgctatttgacattggtcaaggaaccaacttccatgtctttctcgcacgtggcaatgaattgcttgaggaacgtggactgtaaatctttccaactattgatttatcaaggagctagtcgcttccactagtattccgcggacttagttaaagttaaggaaaactgtaggcacttagcttcatcactgacttgagcaacttgcatcatcttgttgtacttggctaagtgcattcacagatcaattcttccctcgtacaactcaatgtgtggcatcttaaagtttttcaggaagtgggatctccgtaatccttttgatgcatggctttaggtcctcatcttcaggatccaataatgctccgctttgcttttttttaccaatttcgtcaaggcaggaatctgcttttccagcctcttggtgttgctttttgggaggtcacaccccctgaatttatcgcgcagatggtttctcagatcaccttcatgtggccttgccctctcactcttatgcttctcgtacttcatgtctaacaaccatcacagatccaccgtggactaactttcctcaaaatgactaacaatagtccacgtggccttgccctctcttggtgttgctttttgggaggtcacgtcccctgaatttatcgcgcagatggtttctcagatcacctccacgtggcctttccctctcactcttatgcttctcgtacttcatgtctaacaaccatcaaagatccaccgtggactaactttccccaaaatgactaacattactccttccatccaaattgacaaaattggtaaggggatccattcgtctcctaggtcttgggacctctgctgttggtcctttcaatgcaacccttttttgagggtcagaagggcatctaggcccgaaggcgctgatggctttttgcgtcttcgagggttgcctaattggcggctcatctttctaacaaggtttaggagtagttctgcgtaagggttttcctactttacctttacccttgtctgtgggggggttttgggcctcatcgttattttgcatctaggctcgcgcttcagctacctattctatagacagctccccgtctatttcagtcgaaccattaaacttgttttgtaattgctacatggtccttttcatcttagtagtgagcctttgttcctttatgagggcctcctggcgtgctgccaactcttcagctacacacaccaaattagggtcgtgctcgtcatacataaccatccttatagtaccattctttatagtagtcgttatcatcatccttgtcctaagtctcagtatactggccatcttcgtgaccttctcaatgttttcatcgttcgtctctagattccgagcaagggcattcttctctgggttcttggtagcagcaacaccttctctatcattttccatctttgtgacagctcacgagaagtgctttcctccataaccgtatctaatggtgttcttttactagatttttgtcgagttttcaccatcatagggggatgataaacaccactaagcttcctttagctctcaatgaaagcaccaaaatgtttactgagtttttcaaaaactaaatattttgagagaataaaggagataacaagtaataaacgatatgaatagtagatttttacgtgctttaggcgttaatgatccttagtccacgagtctatattattagcctctttaggcagatcccttcgacattattattgaccatcttctgcgaattgagccaaaaagtacccaggagcaccaccactaagcatagtaatccacccccagttgtcgaagccattggattcaaacgagcactgaccaagttctcagttgggcgctaaattttaaggccagtcatcgtcgcactccatcacctccttcttcaagtaagtttttccttactttttcaaattgtataatttttctgatttctagatatgcatgctcaaatttttaggaagaacaatttgcatgtgaatgtggagtttgaatgtatagtttttgggcttataggggttgtaatgttgtcatcatacggatgtagataaaatctagggtttttagctcatacttcttttttggtcaattgaatttgcattgcatgtgtgaaaaatcggtcttaaacccctttgtccaaagttattaggacttcgaatgaaatttttggacttttgtcatttatccttgagttcccaatctagtcatccagaagtatggccttacaaaggcatgacttctggatgacgagtccggtgaggacctctccaagcagttttgggggaggactctcccgtactcttgctaatctttt

SEQ ID NO: 296314 - DNA, 7192 bp, Cannabis indica
tttttgggtcttagatttcagacagttataaagatggccaagttcaattgcttctctgtgattggttggaagaagaagagtagtaaggtaagaatatatattatcaagttgattgtttgtcaatttcctatttcaacttcttccataaaatacatgtaatttattttttatggtgatcttctttatagctacaataacaaatgtgtgatggtgtaactataatgaataccgtcataaaatgaatatttcggtgtggttgagaaagagtttgtaataggaggggtaattagcattcttttatggggtttgtatttgattttggtagtttgtgtattgaacttctgttacttcctatctttgattttaggacaatgatgaatctgccaaagttgatgagtttaaccaagctccaagcaccctgcaagtcagggtacaacaacctttgaaatcatccacttttggtgtcacaattccgttgggaattgataagaattctgagtgtaatatcaaggtgattagccatgagagtcctcctgttgggtatgaggctgcagaggtagcctatgaaggggaagatgagcatgaagagaactcgtcgattaagcgaaacctttctgattttgatcttaaagtccatgaaaaaaccaactctgctgaagacttaaagagtggattttccaaatcctttgatggtgatgttgagggggatgttgatcttatgcaaagtgggcatgttagtgatccggggattaagatgacagagttctgggcctccccgaatcttaagcgttcgtgttcgaatttggagactagtgatgtgcttagaaagatagctgatcagttgcctccaccatcaaagtctcaatcttttgaacaattgcatgaattagccgaaagaatgaaaagagatattagctttggatcacctaagtctgttatgagccatggtagtgctgatagagttatgcttaagaagcactcttcaagccaagttcttccttctagaagcagaaggctatggtggaaattgttcttatggagccacaggaacactcacaagccatggacaccgagacaaaaggcgatatctgctgtcttgaaccaacaaggagggtactcttcagatactcttgaaccaaacagaggtgtagagtttagtaagatggagtcaccgggttcattcaccggagaatctttgtttcgagggaaacaatccatgaagataagcagagttgggatggttttcataccggggtttctggtttatggccacaaaatcaatggcttgctttcccaactgaatcatcatcatcatcatctccatatgctagagtggaagagtgggtcaaacatcttgagccacaccaaatcaatgaaggcgaaaacaacatcaacaatgaggaagaggagggcattgtcttcccaccccgagactccatcgcaagcaaggttcccgaaaccactcaacctaggcgatctgatattaatctttctgaagagattttacatgccaatagtgtcattcaatctcttaattcatcttcaactgtggctcacattgctggaattggattaaaagccattcccaccatttcatgcttttctagtctcagatcagtgaatctctcaaacaacttcataggtaataataatgctagcatcaaaaaattggttagtcaatattgtttattccactagtactgattcttgtctctgttgcagttcacataacgccaggatcacttccaaaaagtcttcattcactcaacttgtcaagaaacaagatcagcaccattgaaggtctccgagagctgactcggttgagagttcttgatctcagctacaaccgaatatctagaattggacatggtaaaacactatgccttttctcattttatcgtcattttgagttcagggtactattatgttctattttgaaagatacagggtccaaatttgatttgattattcttgtttcaggcttatcgaactgtcaattaatcaaagagctttatctagctgggaacaaaattagtgatgtcgaagggctacataggctgctaaagctcacagttttggacctgagtttcaacaagataacaacagctaaggcgctcggccagcttgtggcaaactacaactctctgcaggctatgaacttgctcgggaatcctatccagaacaacatcagtgaagatcagctgcgcaaagcggtttgtgggctgctcccgaagcttgtttatcttaacaagcagccgatgaaaccccaaagggctagggaggtactcactgacagtgtggccaaagctgccctcggtaatggaggatacaactctcgtagaaaggctgcgaagaagatcagccaaggcgggtcgtctggggctggacacaggaccaggcaccggtctaagaaccgagctttgcagccaacacctttgatgaaggcatcacctgctgttgcttcatcgtcacgttaagtgtttttaatattttgaaactgtcaaaaaggcagatgttttctttttgagggttgcatgaacatgtttttgttcagtactatgtgaacatctttgaaagtttgtaatttgtttggaatattgagtttgggagagtttatgtttggattttacattattggcaatgcttttttctttctacaaaacccgtttacattttccctttggaaaattctgtgtgttttttggtacattatcattagttataatttaactatattttaacaaatttcaaaaaattctaatgcaaaatagatattacattctatacttttttttttttgaagagtaaactttcattgaaaataataagagggttaataaattatatagaaaagaagaaaaaattttctatctaaactagttcatctactcgaaatacaccaactcttaattcatgtttacataaacatgaattaaagatgctttaggaatttagaaaaattggatagcaaactagtaataaaatttagggaagattctacttcaaaataaaaagagaatttcttaaaaaatacagtaataaaagataatcaatcagactgaaaagattttataggtagcacaatgtaagaaatcaatccagtacaaacactaaagctacataagtttagcttatacaaatatgtcaaatatgtgaactttcctataaggaagaaaactagcaagaacatatattatactaataaaaataaaaaatgtaaaagataaatttatctctaacttaaatatttgaagagagattttgttcgaacttattaaatttttatcaactcaaaaaaaataaattaatatagaacaatatcactgtacaaaattacacaatatcatataaaaaaactaccaatgttacaaataaaataacttataaaatcaacactaaaaagaaacttgaataaaatttggccatgtaaatgaaaattgtaaaagaagttattaatattgaataatactttataaattattcaatctttttctaaaattatcatataacgaacgacaaatcgtttgatgtaaaagaaaaagtaaaaatgagaaggcactgtcgttgttagagcaattaattaaacgaccaccaattccatcaaacgacaatggaataaatgacgaccaatttcatcaaacgacaatgaaataccatttttctttttctcagaagaaaagagaagaagttgatctgatcgcttttctttcattcatttcatatcagagagccaccgccggccgccatatcgtcaccgtctgcgtctttcgccgttcatatcctaccgttgatcgcatttcttatagtcaaggtacaatcaaaccctaaaaacttgttcaattcaaacactctagggttcaattttaattctaatttggtttggaattgattgcgtattggatttcaaaaatttgagttcgaatcatgttcaaactctgtatgtaatctctctgttgttttgaactcaggtactgtaatggaggttgtgaacagagtagtgaacgctgcaacgagagccgccaacagcaacacggtgctaaatgtgtgtttggtagggtcgttcgtggtgcttagcgtaaggtcgatgaaccagcagaaggatattgaagccctagaggctcagaaagattctctaatcaactctaataagctcctcaagaaatctatttgggaatggaagcaaaagctctatgctgaggctgagtctgattccccttcggtacctctttctcgccttaaagccatctatggtgaagctcccgtaccccaaaatggtaatctctctttagctttctttttcttaaattgttaatgagctatgtcattccattttgtgctttaaaaacctaattttgatggcattttgattgagaggagtgagttcgattttgagtttgtatgtgaaagagtttatcactagcaaattggtgtcattttgtgttgctttgagcggtcattttgcaaaagctctctttttgttgttgctattttgtcttgaattgatgagagcatggtcatgatccttatgttatgaatgaaacttgaaagttgcagtggcagaaaaaagtttaacttgagaatcctagctagtttaaagatgtaattaaagataattttacccaaaatttatagagctaaagggttgttttgagttgagtgctcaatgcacatgatatttaggagacttcatgttttttctggttactgcacttgtttgaaatggtacttgagtgtacctgtagtaatatagtctgtgtagagaagttatctattgaaatagaatatccagcttaggcttactagcttgtgtagagaactcaacttctaaaataatgatctcataacttgtaaatggtgaacttagtatatggatgaggtagcaaacaacaggttgatgacatgcataaacactctctcgatgaaaaatatgatgagtaggaatcgtagtactatgagatgtgattgatcaaaatgatttgattcagttatctgcatgccattacttgaataaaataaacgataagacattgtcttgctctaaagtatgattaggtagtttaacaggcaataatgcaaggtagatttttgttttcaattcatgtctatgctcaatggtgtgaatgtctcttctctctaattttgtctacttttgtaattatagcaggtaatgcatcaaaggaagaagctaattctactgcttcaaagtttgtaatataatcttattcttgccattcttcaacagaagaactgttgatatttagatttagtggaagattttgtgttgcctttagaagtctcatacgcattacatggaggttggtattgctgcttacttaggtcttgcatagtgcttattaactctttcatctgaaaagcttaaaccttgttttgggtttcgaaaagatatcaaaaccatcattgtgaaaaaggtatgctggctgtttacatgagagactttgtttgctatataatttgatcatagtgaaaactgaaaaggatttttattttctacattagcacagtttcatttttattagtcttacccttatatttctttgatagttttcttcctaaattcatgatgaacaaactttttggtgttcttatcttcacatggccaactatttaaacattaccctcatttatttaataagggaaaagggaagataagtgtgtgcatattaattagcatattgtctcattcaatgtggtcataaatttatatttagcatttggctgtttacatgtttgtgaacattttttcataaaaaatcatctattgtatattagtaattaatttttttttacaataaaatgctatttcaatgtaatttttccaacacaaaattacattgtatttctattttttatttttaatttttatctttattttattactctttaatttaactcagttttacaggtcatatcctcattgtgtgcattaggaactctaattttgataaattatgtaaggttatttttgatactttgattataaaatatgatatttataaattaaaaatattttagagttatatttagttaatgtatgataaaaaatagtagttttcaacttattctttcccaatacctaggcgacctatatcacattttagtctaggcctctattactcttatgtagggatagaaatttaactgagtattgctactggactggtgttcaacactttttataggtggcgtctcactattgtttaatgatattttataaaaattattttcttaagttatatgagactctatacttaattatactaatagcaatatgacaccgaaaatagtgctagatactaatggtgtcttttgacaattcttaaatttaactgtaagtatgaaccccataagtattcacatctaatgggacgaggattcctcgcctaaatgggaaacgagataaggatgaaggcaattttttatcgtcaaatgttaaacaggacagatattgggatatcacttcctgactcctactttgatgaggatctgtttaattttttattatttaaaatattatttttaattattacccatatatctttatgtacattttttttagtttattagtaaatttttattttagtttaaattgcattttatattttaaaatattaacatctatataatcctttaatttttataaaattaatcttttttatttataattttttttatttgggttccattttttgctctgagcactctccacatttaggggtgggcattcgatctaattcaacatttttctcctcatctgatttaatctaattagtaattggatttagaaaatcatcattcgatccaattcaattaaaccttaaaatccaatcaaattcaattcaattactaatttaattggatcggttttcaattaattcgaatatagatatctaattacacacttaaattttaatattaatacaaaattatgaaaaaatacttaaaaattaattatcactttttatataagtttaatactctatacaactaaaagttttaaataattaaaacaacaatatttttaagtaataaaataaaacaaaacattattaaaataaatacacaaaataatcaagtgttacaaattcaatacaaaaatattcactaaaatataattaataaaattatatttttaatatttttattatataaataaatataaatgtaattggat

SEQ ID NO: 296315 - DNA, 1864 bp, Cannabis indica
ttttgggtacaatacatataaaaagaagtatgtttcaaataaatataaaattagaagtaaatttgattaattgattaataaaaggggtatttttcaacttaccctatactttttcctgttaataaaccaaaagtagcacacaaacttatttttttaacaaatttaataaggtaattgcacaaattatcattagagatgttatctcaaattctgtacagggtgattgtgatgtggcatccaataaagtaatatgtggagaatattttaaagtctggacaagagattttccctcaacattcaaccagagaattctatactcaaaattgataagttcatgctttcagcaggaatcatctggacaaaagttgtacatgattgtctgcacaaatcctcattattcaatgatgttgaatcctcagagcaggataatgcggatgaacaagatctttaagaatttttttcataaatatattctcaatcaaatccctactttgtgaaattaaaaggaaccgaaaaatattataggaaactagcttagttttccaatctatttttgattgttttggaaaacttaggtgttgtttggttttttaatcatttttctgtttttaaaattcgaaaagtgaaaatatttttcaaaaacatgttctttaaaactatttttacttttcaatattttaattgaaaatcaaaattttaaaaacaaaaaagtcacttttattatttttttaaacaatttttttaatcaatgttttagactacgactcagacccaaactcggccctagccctggtgccgaacctagcacccgatccgaacccggacccgactccggacctagatccgacttaaataaaatcaaaaaataaaataaaaataaactttacagaacacacttttgttttctgtttttaaaattaaaaacaaaagtggttatagaacgcatttttgtttttcaaaaacaaaattttgaaaacaaaaattctacttcatttttgtgattaaaaattagaaaacataattgttaccaaacggcaccttaattaatgtattttttttcaataaatagtagagtcgttacatagtgtagggacccaaaattatatgctcttgaaagctcttatgctatcaaataattgtaagctttttcttaagggttattaagaaactcacttggtcagctccttataatgttaataattctttgaagtaatacgagtaaaaaaggagtaggctattaccataattacagggtcgaacctctatacattttggtactcttatttgcttaattttgtttgataattatttacgatcttgtcattttatttgattcagtattgttggctaaaagcgaagtcaacaagagattatttctaaaatacccaaacaaaaagtttatgtttttacaggatattttttttttttctgtttacttttttacgaactttatttttctaacataatattgtttttaggttgttctagaaaagaagtttacacaatgcgaaaatatagtataatattgcgataatataaaaacaatgttgctttttctttaaaaaatactagttcacaaaagaaaaaaattcgtaaaaacgtataaaaaaagtacaatttaggtagtttgtgtagtcttgtcttcagcactactatcagttcataacgtatttcatgtttctatgctacggaaatacgtctcgaatcctactcatgtgttgagttatgaaaacctagaattctaaccagatttatcatatgaagagcaactagtgcagatcattgataaaaaggataaagtccttctaaacaataccataactttggtcaaggtactctgaaaaaacagtaaggtggaggaagc

SEQ ID NO: 296316 - DNA, 1144 bp, Cannabis indica
tttttccttttttttttttgtgttaatcttttttgcagtactattttgagggaaattatgatctggttaaatttgtcaagctggttcatcaagcgggcctatatgtaaatcttagaattggtccatatgtttgtgctgaatggaattttgggtaatgatgaagtcataacatttctataaaaagaaagatttttttggaagttgctgaaatgtgaagctaaccttataaaatttttattctcacagaggttttcctgtctggttgaaatacattccgggtattcgatttagaacagataatggacctttcaaggtatggaatctttactagttctccttgatttttcacttactttttttttattattattattatatatattaataatgtgctgtattttgatttttgaatttcaacaatgaagtatcaaatggaaaaattcacaagaaagattgtcaatatgatgaaagctgaaaggctgtatgcaactcaaggtggtcctataatattatcgcaggtagtctaagtgtactattttctggtcctagacttctcaaatagttaagttgtaaatttgatggattaaatagtagacttatggaaagatctttttgatatatgtgacagattgaaaacgaatatggtcccatggaatatgaacttggggctcctggtaaggcatactctaactgggctgctcatatggctgtgggactaggcaccggtgtaccttggatcatgtgtaagcaagatgatgcccctgatcctgttgtaagtatcttcaaccttttattaatctttttacctgctgtttttttcatgatattatgtaacacaaagttgatgtttcttcttttgttatggtccctcactcttagtggggttgttatttagtgatgttttgttcccatgttgcttaggaaaggaaatgaatgattagtcctcattgcacatggcagtattttctcatctctctctctctccactgtttgctgcactttgttatttttttaattccttttggcatctgtgagcttttgcactaataacatattgaccattttttatttgatttatttgactttccttttcaacttaaatttgatggcatgcattaataaattcaaaagctaaaaaataacc

SEQ ID NO: 296317 - DNA, 3567 bp, Cannabis indica
aaaattgattagcaacataaaacccaaaattaagttcacttggcaaaacaaaaggttcaacgggggcctgatccgagagagaattgacagagtaatagtggatacgggctagctaaatgtttgtccaaatggcggagtaagaaattttccaattgtggcgtctgatcatgggccgattatattggacactctcatgaaaaaaggaaagggctctagaatttttcgcttctacgaagcttggctcagggagcaatcgtgttctgaggtgattaaagagacttgggaaaagaatttgaacaggggaggggctgataatctcacgctacttctcaaaaacacaaaacacgccctgcaagggtggaggaaacaaggattcagagatgtggatgccaaactaaggattttagaggatcggctaatgtggattcaatctcaaaaggatttcgagccatggaaaaatgaagaacttttggttcgccaaaagattacagaggaatggaaaaggagcaaactcatatggaaacaacaatcttgggagttatggttaatgcatggcgatcgtaatagcaagttctttcacgcatccactatggtgagatgaaaatgaaatcatatatgggctttacatgacaaggatggaagaagaaaggaacatgagagggaaaaggggtacattcttttggatttcttctctaatttctttaattcctccaatccggaagtccctgaggctttagaggggttgataaccccaaccataagcattgaagaaaacatgtccctgtgtgctattccgtcgggtgagaaataagaaagcaggttttccaaatgcatcctttgaaagctccaggaccggatggaatgtctggaattttctttcgaagttcttgggatacagtgggggataaggtgatcatctacgttcaacaattttttcgaaggggggcattggacccggatctgaacttcaattacattttccttattcctaaagttttgaatgttgagaaagtggaattgttcaggccaatcagcttgtgcaattttgtcctaaagatcatcaccagaattatgtcgcaaaggctgagaacgattatggataaagtgatatctctgtttcaatccgctttcattcctggaagatggattgttgatgctactcttttgggccaagaagtggtgagtattgttagaaaaaacaagagtaaaggggggctcatggccatcaaaatggacatgcataaagcgtatgatcggatcgaatggcgttttctcaagacagttctccatgctcatggtttctcgggtgaggtaatcaaaaggatcatgctgtgtgttactagcacgtcttatgcggtgttgcttaatggtaaaccgcttaagagatgcaaaccgtcaaggggtttgaggcagggagatctgatctctcctttcttattcctgctatgccatgatgtcttctctagattattagtgagggcggaaaacaatggggagattaaaggtatatctattgcccgtggtgctactccaatttctcatcttatgttcgcggatgacactatgatctttgcccgtgcaagcaagaaagcggctgagtgcatcagtaaatgcattcaaaagtatgagcaatggtctggccaactaagcaacaaggaaaaatcaagtatactctttttcaggggctattctgttggaagaaagaaagaaattgaagaaacgctccatatacgagggtctgagagtggaggtctctacttgggaaaccccttgattctctctagaaacaagagtaatgatttctcttttcttatcgagagacttaaatccaaacttgaagggtggagggcgaagactttgtcctatgctggaagattagtagacgtgaaggcagtggcattggctcttcctgtctactctctatctaccttcactctccctgggaagatttgccattggatggactgcatggtgagaagattctggtggactggtggtcaagaaaagagcagattttatgcgccaaaaagttgggaaactctctgtcaaccgaagcaaaatggaggtctaggatttaggagatttggagacacaaacaaagctcttgtggctaagttagcttgggaaatggcgtgtaatgaggagaaactgtgggtgaaaatctttaaacaaaaattctgctgttgggaatcattttgggaggttaggactatcattgctaatggaacggatatcaacatatggtggcaaccatggatcccatggatgagttatgatgagtttcgaaacacaatggaggaagtcagattgaaggctccacagttgagactagtggccgatcttttaaaccatttgcaaacaagatggaatgagaggtatgttattcacttatttggaaggaatttgggcgagttgattataggaattgacatagttaatgggctggaccaggatacgctggtttggaaaagggtggcatcgggaaaattcactatcaaagaggcgtactggctggacaatgaaggtcgttttgggcctgtgctcccgggatggaggttaatatggtcaaacaagatccatccgaggatttgcctatggttgtggagaatgtgcaatggagtgcttcccactcgtgacaaaattcgaagaggtaatgaaattgagtgcgttatctgcaattgtatgcccagactcctaagcaccttttctttgagtgccaatttgcaagaggtgcatggtttgcagtcctttagcagtgagaagtgatgagattcaagggaatacgatccttgataaagtggtgaacttgtgtaaagacagtgaaggggggagtttggagaaaatccttacttgttgttatgttgtctgtgatgggatttggaggtatagaaactccctggtacatggtggaaagcagatggagctaggccggtttttggaaggagcgaatgcaaagtttgaagagttcgtttctgtgcaacatgatcttgtcaacgctccttcagccctggcaaaaggattggtgcaagtggctcccttcaattcaaatttcattgtcacggatggggccttcaaggatgggtggtgtggaatggcaatgatggggaatgactcttgacaagagaagtggtacacaatggcggggagtggagaaggtaaatctaccttggatgctgagttaaaggcaatcggcttggccttggattgggctattgagatgaattggaggaatttgacagttttctcggattgcaaaatggttgttgatgctttacagcaaagaaaagtgtcggattggagagtggccatttcgttctataatgatatggaaaagttgaaaatgtttgagttttgtaatcttaagtttgttaagaggaactgtattgcttttgttaatgacctggctgttcaagcgagggtcctaagattggttgattatcattgtaacggggagggattgcccctgtcaatcctactttattttaatcctaatgatctgaggttctctttcaaaaaaaaattacattttatttagagttttattctaaatttaaaatttaataaata

SEQ ID NO: 296318 - DNA, 1846 bp, Cannabis indica
actgcatgggagtaaaacccattttgagtcttttcggtacttacatggatgtaaatgaggaaggcctttccgcaagtctcttccaagtcttgaaggaatacctttccttccgcacccaggaggaagaagtggtatgtacaaccaagcctccacgtgcccttcccttgtgaaggatgaaccttttggggaagccccttatagaagccagggttgaaggctctaattagctaaggattaactcgaatttcttcagtgtattccacatgtaaattttacaaaaatcctgagaacatttaccccctaagtttctaggacgcttcatggtctaggagcttccagtgttcccttattttctcatgaatgattcttgacacatggcactggttgagatcactttgtgtcacacaaattgacgtcaaccaacgcatcactaattgtataattagcacagtcaattggcatgctctaaatgtagtttctgataatgcgtgcgtgcagggtgcatttctcagaagaagttaaaatgacggtagagtgattaagttgacacttcatttatcaagcactcttcatgagacatgccataatgaaagttaaatgttgaggctgatacagtcttctcgactccccatttgtcaaataaaaaaaaggctattttggcgaatgatttgggttgtttgctttgcgtggaatactccaataagcctgtattaaatgcccacagcttcctcatcctttctcaaacttcaaaattttcatcccttgcaccagaggtcttccattttgattcaacttactcatcgtcgaacaaaagcattgttagtcaggccagtctcgatcgcgcacgtgactggacacatcacagccaagtcatcttcacacaacatccttatccactgctcgttactactcagtaatcaccctatttctcttgttagttgtttacaacttcatgttcaaggtagaaatactgagtttgagcttggtttagtgtgtattatatgtttgatcggcaatgttgttcgtagaagtatattgttaatgttgacccatgcgccagtcattgcactttgtaagcattgatcttatgagaacggattgagcacgattgctttttcttcttttttttcaaagcatttgtgcacggtgatacagctttgagcttcgagttgagtttggtcgagtgaaacctcgaccagtcatcgggctagttcaacattcctactattgttaaaagaaaaatgcaatggtttgactgggtgatggtggatcgagggccgctcatccgtgtggagaggctgacccatcccctcttacactatcaagagtcgatcgttgcatgcttgatagattatttttattgacttcattattctgagttgactcatttaagcctgcactaacttttcttgcaggtacttcttagtgtaaaatgcacggcttagggaaggaagtaggttcctcaaaagttggtagtggaggtagtctcagagggaggaggaagagacaagacaatactttcctcactgggtcttccaatgcatcatcatctgccccactatcccacagacaatacccccagcaacacaatcgactgccactacagagtcagccctaccagcaccaaccatgttcttctctcccgaaaattccttccctgggtttctcataggggtgggcatcatccaatccaatctaattgaacagaaccgatccaatccaatccaattacaaaaagttgaatatccaattacaattggattggattggatgctaaaagttggattctaattggattggatcggtcattggatgccaatctcaaaatccaattaaaaaccgatcc

SEQ ID NO: 296319 - DNA, 2905 bp, Cannabis indica
tttgagaccaaagacttgctatctgtagtgctgaggccaagcagaaagccgatgatcatctcagacccaatactcatccatgaaccatccacctcctcctccttcattaccaaattcaatttcaattaccactttcaaaattttccatttccttatttttatttttattgtagatgggcactcttataagccctctatgccacgaaaatttagtatgagagtttaactaacaattagaaagaaacaaaaaataacctttggagtcttcattagctagaatatctgtacatttttaaagttggtcttagtaaattattaattattaaaactatggtaactttaggctgccggaatttttaataataaaatgaaatatacttttatttgattgttttctgtttgttgtcgtgttaaaaaaaatgagaaactttcttgtgcatacaatgcttagatatctaaatggaaaatgggactagtctacaacagggaagaagaaaaactaaagttaaaagaatttgttgatgttgattatgccaagaataccaaaatttctaccccactgcataaaagtttatgacaaacaacaattgtataggctggaaagttcagtagaagagtttatggttaaacacaacttggcactaaggctttgactgcgaataagttttacacagattgtttaaacttactcaacctaagtcactcgttctaccaaacgaaactcaagcttgaatacaagtgtttagaattatgaggttccatgttttttatatatagctcaatactctaccatttattctatgtgagacaatatcacaataagaaagaacaaggattatcctagttttaatttgaagaaataaggtagaatttgttggattgatttgtctgaaatacctcatttgtttcatatgtccttgacagttaaggtgggttatgttgtaaacaaacaatacaataaaagttttctaaattctattacagaaacaaccaggttttatggttcaaccaaattgtattggcctaattcctcctaacaacaaagatccatctaagaaaacaaggtgaatagcacctaaatgagaactcatataactatattacattaacaatgtgaacaataattcaagtctcacaactctcatctcacatcccatatgaatatgattcactctaacttagtgtttctcaaacttttctcccaatactaccaagattgccctttccactagtaacataaactaaagaatcaagaaccaactgaactgagtactcaattatgcactatatcatgcatcatgaattctatggtgtcatctttataatattcaaaatcttgaagaaaatgagttcacactgtcaaattcatggtagtggttttttcttcactttgaaatgcttttcagcaatttgtccaaaaaaaataataattataagtaacaatgggttgatttgcaatttattgatcacctccatttcagctaattattgcattttaagatttttcagaagaagacaaaaaaacagtaggttgagcagggccggctttaaaattgaatggtcaataggaataaaaatatttttaacctttatttaaaaaattgtggtatttttcaaatgcataaaaaaatgtataattttaaaaggggacaaatttttttggaccctgggctaggtgggccctaggtacaggcctagtccgcctatgcctaaagatgggcctgggttgaggacacacaccagaccaccatacacacgcacctctgacgtctgatcgtgctgagctagcgggtcgtgtggtgtcactttatttttttacaaaaaatttatttaataaaagagagtaaatataagatttgtgacacttaactacataaactgattttttagtagtaaaaatctcaattctattagttatttaccccttacgtttaaacgacctgttaagtgccataatagacatgctacagtatacatggcaaattttaatggttttaactatttaaaattattttaaattttaaaaatcatttaaaaataaaagtaaattacatcaaaaaaattaaaatatatctattttacttttttgttctgaatccctaatcctcttcaccttaaaacaatctttcttctctttcttattcttcaccattatcaccaccacaatcaccatagtgagaaacaccaaaatcaccgccacaccacaatcaatattaccattatccccataaccaccatcctaccaccaccatcacaccccaagcgagactagaaaataccaataattagatctgaaaaaatcctctcccattttcaaaactaattacaaaatcaaagattcacatttattagcataaccaccacaatatttagaaaatagagaatcaattaaaaataaaacttgattttacaagagaactgaacttgatttcgggggaagctgaaatcgggttccttttagctcattaataatcaaagagaggcaactcgaagctggaaactttaggtcgagtgagagtgaaatcgagaggcagcgagcacgagagggacaagggtgttgggatttggaattttgggggtccctgaacacggtggaatgttatattatttgatataatataatatagattaaaatatttaaatgtgacaaattatacattaataggagattaatatatattatgtgttggaggttatattatatcatatatagtataataatacacataaaattgtaacatatgaggagttgcaaatctgaaaatagattgtaacttaaggatcacatttgataatatgtgagttattacatatggaagttatggaattaatgggataagtttctagctgttaaaaactgttacaatactcaattatatcatttaaatgggtattgggacgttgg

SEQ ID NO: 296320 - DNA, 3269 bp, Cannabis indica
cttcaatccaatatttatttcaattatattcatgagctgaggtggtttgtttcatcgccataaggtaacaaataaattccttaaatattattattattattacccaatttgattatatattgaaagaagattgaaactttgtgtgttttgaatcgaaaaaagaagttgggtattgagaaaggttgaatttttagctgatgatgcagcataataaatttacaacaatgcgaagtttgaagatcatggatgggtgtaaaggaacccaggtttatgcacttaatccttctgggcctaccagcaccaccggaaatggggttggcgccggtaccggaagcggtggtggtggtggtggtggtggtgggggtggaggtggtgttggtgataagcttttacatcatcttcaagatcatcttagggtcaattccattagatccaaatcgaatcgaacttttcaagcttctgtaccaccaataccgaatacatctttatcagagaatcttcttccttatggattaccttccactgatctccttgaacctctcatcgagccttgtcttaaatacgttgatttcgttgaaacccttgctgatttgtatcgaaggatcgagaattgtccacagtttgataaatggaagatgtttgttgagcaatgttctgtgtttaagggactctcggatcccaaatttttccggcggagtctccggtcagcaaggcagcatgctgttgatgttcacaccaaaattgttctggctgcttggttaagatttgagagaagggaagatgagcttttgggtacttcggctatggattgttgtaaacgaaatctggaatgtcctaaggctgctttggtttctgggtataatccagaatcagtgtatgagtcttgtttgtgttgtagaaacagtttagaggaatttgaagaagatggggttttgattatggaggaagatgagtgttcaacatctgaggaagatggtgatatctcattttgtattggggatgaggagattaggtgtgtaaggtacaatatagcttctttgtctagaccttttagagcaatgttgtattgtggctttacagagtcaagaagggagatgattaacttctcaaagaacgggatctcggccgagggtatgagggcggccgagatttttagcagaactaaaagattagattcatttgatgcaagaattgttttggagttactgtctttggctaacaagttttgttgcgacgagatgaagtcggcctgtgatgctcatttggcttctttgatttgtgatatggaaggtgccatgttgttgatggagtatgggttggaggagactgcttatcttcttgtgtcagcttgtttacaggtgtttttgagagaactcccgggttcaatgcacaatccgaatatgatgaggtttttttgtagttcagaggctaggaaaagattggaaattgttggtcatgcttcttttgtgttgtatttgtttttgagccagattgccatggaggaagacatgaagtcaaacacaacagtgatgcttttggagaggctaggtgagtgtgcaactgagagttggcaacagcagctagcgtttcatcagttaggcgttgttatgcttgagcgcaaggaatacaaagacgcccagcgctatttcgaggctgcagctgaggctggtcatatttattcaatggtaggtgttgcaagagctaagttcaagcgtggacacaagtattctgcttataaacagatgaactctctcatttcggattacacaccagttggttggatgtatcaagagcgagctttgtattgtattggaaaggagaagatgatggatttgaacacagcaactgaattggatcctactctgtcctatccatacaagtatcgagctgtgtctttgttagaggaaaacatggctggagcagccatttctgagatcaataagattattggtttcaaagtttctcctgattgtcttgaacttcgggcttggttattgatagttcttgaggattatgaaggagctttgagagatgttcgagcactgttgacacttgatccaagttacatgttatttcatggaagaatgcatggtgaccatatggtagagctccttcggcctatcgtttcgcagttgagccaggctgattgctggatgcagctctatgatcgatggtcctctgttgatgacattggttctcttgctgttgttcatcagatgttggcaaatgatccgggaaaaagccttctacgctttaggcagtctctcctattattaaggtaagtttacaaaaattgtcgatcgtgtttggtaatatttttaatttttttttatgattaaacataataataataataatgaaagtagaatttttgtttaaaaaataaaaatgtgttctgcttttgtaaattttaaaaactaaaaacaaaactatgttatgttatgttttgtaaaaatttttgttttccaattgtgaaaaacaaaatatatgaattttgattttttttaaactaggcaatataattgcttttcgtgtgattttaaatattagatacattaattttttatttcatatttgtttaattatatattaatgaataaaatattatatcttaaaaaataaatgaatgaaatattgtgaaaattaaaataaataaatgaaagcataaatttgaaaaacatatttacttcgcaatacatactttctaaaatatttatctaaatgcctttcaataatttaatactgccaatatggaaacttttttaacaaaattggtatgtgtatacctagataaaatgtccgtcattctttttgaaaaaattattttttactacacaaataattgttttggtttaaagagttatattattgcaatcaattttttaagataattattttaatatgtgaaaaatatattatttttttgccgtcactaaagaagattatcgaaatcaaatttaacattttagtttcgtttatattttcttaagtaattaatctttaaacttaaacaaaattaatgtaccaaacaacttgataggttactaaaaagtattttcttattttatctttagatgtcacaagattaaattataaatagacttattttcataaaactattttgatagatttataaaataacttgtaaataaaccaaatagtaaaaaaagctaaacattaagcttaaacaaaattaaatatacttactgttaacccaaaaattttcccaatgacatagacatcaatatttttatatttagacattacaa

SEQ ID NO: 296321 - DNA, 11350 bp, Cannabis indica
ttaagtttacgtagtcgtttttttttttttttcgcgtattcgttcttattggtaatatttgactggaattaagaactatagttttattgattcagtatccaacaaaggcattgtctccactcatgttggaggattatcgaaaagtaatggttgagaggagaggtgaggaggaacaatttacctctgatcatatagcggaatgtatgaagaaaggtacagaatgttccttgtacttttatttagttaaattgtcatttttttagatcagctcagataaaggctttttaagattatatatatttaataaatgtgattatcccattgtggtttcttttttccttgctttattatcttcccactctggattactaactttggggatggagattcacatctttgctttgtttggtgaacaattacaatcatctgtgtttgctgtttaatgtgccaacaggctttgtgatcttagtactacttggttatttcttggctgttttgaaaaatgtatgttattagagtcaagtctcattgagataggtttgtgattactcataattccatcgtctccttcacttctttatcatattatttcctccattagtgtttttgtatctgcttctgtctctatctgttggaattacaagagtagttgcataacttgcatttatcagacacaaatttgaaaggtaaaagttacatagttagaacatttgttttagcatgataattgtttagttactgaatatgtgtcttggaaagacattggatggtaatctcttatttgggacacgaaatgctctgccatatggagcattttttataatcatctcccttgttttgctcctttgcagttatagctgttgatctaaagcagacaattcaggttgataaagatcttcaaatacgtgcatattacgcaggacatgtacgctctcttaacttatgactgctcacaaatattcattgtgatactgggactttctcacttttagtaaaccctcaactagaaatttctcataaattatataaataacttaatgagtttggtgaaaatcctgaaagttttatctaaaaaaacatgcttcatgcctgaaattggcaccattgcatatttggaaaatttctgtatcaagtacagagatattaaagtaggaagttcatctctggccattcatgattttacttagaccattctcttacagttggtgtgtctatccacataaccatattccatgataagaggaaatttgattctgtattattagtttataacaaactcgtaatcagcagttctgtttatgctctaaaaaacagctattaatttgttattgtagggaaatttcataactgaagttccttgagtcttaattgtttaatatctgaaggttcttggagctgcaatgttctatgcaaaggtaggagatagtgctatactgtacacaggagactataatatgacaccagatagacatcttggagccgctcaaattgatcgacttcatttggaccttgttatatcagagtatggaatgtatacatgtgattttgtacgcatgcttactgtttttcagctagcatatttggaaactgtatggcctaagatttataaatgcatatctgtttgtgtatgtatatcttgtctacctttctgttttgattgacttgtatgttgcttgagcttcttgtattttgttgtggtgatggcaatataagatttatatgcttttgttctcaatttattttcttattagcttagagaaccaacttataataatggctattaagaataaaaaatttcaaccgtgcatgtgcttactctcttgtggcttggtgatgatttattatggctttgtcctttgtgtcttatggttttggcatatatcaatttattaatttttattaacttaattgttttggctcaatcacttggatcctaagtgtagacatataaaataacacaccttcttacattatttaagctgatcaaatatccttttgaaattagttggcttgaggccaccttcactttcactttttgttatatccttactttcataaattaatctagcacaaggacttatgtgcttttatctcaaatgcttttatcatggacataaattaatgtgtttggcaatttgggtttctctttcttctactaaagtatccttttgcaggtctacatatgcaacaactatacgtgactcaaaatacagtcgagagagggaatttcttaaagcggtatgtaaataacaaacactcgatttgatattctcacatatttgcttaattcacacataaatgattgtgaccatgaccgttaaattatgttttaaccatgcaacttctgtacttcataatatgtaagcgttaatgtatgatttacataacctgcgagttctatcttctgcaactggtggcaccactggcaagaaaatgtatataggtgtttagatatatcattttattattgaggcagtagctggtttgttttaggagtttcattgtcttctgttggaatttattctgttaaactcacattagaattctagattgaagggtataattgagtacccatcacatccaactgctttaggttgcatggtctatggtgtgcatgtatctttcgaagtcggactatataatccctctatttcattggttcatttttgttttagtagatttttcctatgacccagtggatggaccctttacagttttgaaaatgtttgcttgatctgcctgtgtttgctattgtttaggggtttgctaagtcattattgattttaatattttctcgaaataaagcttgtctagtgttttaagcttttctttattttttgaaatgttgctgtattaactactcagtcaaatttattaggttcacgagtgtatctctgggggaggaaaagtgcttatacccacatttgctctaggaagagctcaggtatcctacgcggagattgtcattttgttacataaagacttgttttttttcttcttttgaatgaaaagagaaaatgaaaaactttgagccttgatcaatcgctcaacattgttgagaagttttaaggagctatgcagtttgtagtctgcagtctgcaaatttattgatctgactttgggagctcaagttttgtttaaggttcttgttcagatttgtttcttcctagataccgatagtatccttgatatatttcatttcaaatctctttaagcatcttagttttctaactatcaaacagacaaacaaagtatttttaatatgcatatttgttgggagatgaaagcaaagtttggactcattggatattctattcagtgccttattttcttctgaaattctagcagatataatttgtgttacatatcagtagatcataaatcttctgacttactaaagatcaaacagcagttcagttggaactaacctcagcccacttcagttctcagctccctaatctattctaatgattctctacatatattgctagcattggttatctcctcaagggtctagtgaccatttcgtaactgttgcatttgcttgttttctgtaaccattttgcgaaattacatcaatttgttcaccattttcttcgtataagctctcggctgttttagaaagtcttaaattcacttaaccaagcagtgcatgcatggcaatttggaatccatgtagcattttctttattctgcattacttgttattttattaaaatttgaatgtcgtattttctgttactggaagatctttgtcatgtgtttgacagtgctatcatcaagcaggaactttgtatcctgttagaagattactgggagcgaatgaatctaaaggttcctatttacttctcggcaggtgtgttccagttcttctgtactactgttaactgttcgatcaatatacgtagcgtacttaatgtgctttcaaactgatatttctccagtccctgataccttttaccaggttctaaaaaaccatatttggtatataccttctgacctcgcctttgggcttttttgtctttcttttttttttttgatgcatggtgcgatttgaactttgaagtatattgtggcaccctgtcgatgatcataactctttgcaaattcaataacttaaaaagtacttatattcttatgcacatattgtgaatcgcacacacacagctcaattattgaggcaaactccatgaaaatatgcatattttgctcatcatatacacttaaatgcaccattttccaatgataaaagtataataaggaggcaaaaactttacaaaccaaattgcagaatgaccactgctgacacagaaactcatttaatttatgctttgcattttcctaaggagtacttgtattataaaatcattttatcttggaaatttttggaatgactgtttcaaatggtttatcaattcctaattttttcaatgtgtattggtgtttcaaatttctgtggaactaggatttttacatatgccttttcaggtttaactattcaagccaatatgtactataaaatgcttatcagttggaccagccagaggatcaaggagacatattcaacccacaatgcatttgatttcaaacatggtttgtcattccttttctcttatacttactggaaatacagtatgcttttggtgatataaatgagtttaattagtacttttcagatatggtaatgagagcaaagtgacataaaagagtatttttgcccaatgcctaatcttttgagaacctcattcatcactgatctgtcatttggttttgatgatgcagttaaagattttgaacggtcaatgatagatgcgcctggaccctgtgttctctttgccacaccaggaatgataagtggtggtttttcactcgaggtctttaaacattgggctccttcaagaaaagaatctaattacactgcctgggtagctaacttttttgtcttcttacaataaacctcaaattgttaaccaaaagagttccaatctatgttactgtaattttctgctcatgttttaccatatcaactatttttattatgttgtatgcatctacaaacaaataaacatacttaaatttcgttgcatgttatgattttccttgcataactaatcctattgatgtgtatctttgtaggtattgtgttgctggaaccataggacataaattgatgtcaggtaaaccttccaaaattgatctggacaaggacacttctgtcgatgtgcgatgccaggtttattcccatctcttttacctgctacatatattttactacaagttgtgtttcttttcactgaatgaaagttatgatagaaaaatgtgaacgattgtaacatatttttatgtttggtgaatagggatgaaagaaaactaattttatgaaaaatttatatttattttgaagtatggtatacaagatttatttagtaaaagacatgacacgtatgaagaaaatatgtttttgttatatatatgaaaatgtaaatggacctaaaagaaagtgatcctccctccaaacattttgtgtctcagtttcagaaaacttggcaactgtccctattcaatggtttgtttcactccctttgtaaggagccaaagaatcattagctttctaatatccaaagatattatttaattgtcttttgtttaatactgtctcaataatttttcttcttcttcttctttatgttgctagattcatcaattgtctttcagtcctcacacagatgccaaaggtatcatggatcttatcaaatttctgtcccctaagcatgtaatacttgttcatggtgagaagcctaagatggctactttaaaaggaagaattcaatctgaactaggcattcattgttatgaccctgcaaataacgagacagtatcgattccatcaacgcagtatgtgaaagcagtagcctctgatgcatttgctcggagttgcttgaatccaaatttcaagtttttgaaaagcagctcaggcaatggtttgcaagtaactgacgaaagggtatccgacgggatattggttttggagaaaagccaaaaaccgaaggtcatgcaacaagacgagcttttgctcatgttgggagaaaatgagcacaaagttgaacattcttgttgttttcctgtccatatcggcaacatagagagctcagagcggtctagcacaggcttttggcttcgtttgttttctgcaagactgtctgatgagatttctgctgggattattgtccaagatttcgaagggcatattcaagtagagtcatttcatctgtccatttgtttgaaagatagctgctctcacaggataacagatgattctcaaaataaatccgaatcggtattttgttgctgtacttggtcagtggaagatgaaaagattgcatggaagatcatttcaaccatgaaaaatttcaacttgaatccggggcaacaagatgcatctaataattgaggaactctttgttctgtctttatgagcaagcttatgaacaaagataaattattttaatctagcaactggcaacaatcaatagtgatcaatttaatccccatatcttttttgcatatatggtgtaagttaaatttgtatgatttttgatcattaaattattaagaccattgatttacaactacatacaactacaaaggataaaaaaaaagaaaatagattaaaaaaattgatcaaatttatagtagaaattcttgtgtgattcgggaggcctagtgcatggagtgatttactccaatctcttttcacatctttttgttgactatgttctagcacaccaaattaatccttgctctaacatacatctttaatttctaaccgatcatattcgtaattgtttatatgaagattgtgtgttgaatttgacaattaagcaagttatattatttacagggtagatttgttagctttacttacaatgaaggatggagaattatagtaattctctgatgaataataatatgctgcagtcaaaatattacactaataatatggtatacgtttaaaatgagaaatggtaagaggcattttaagatattatattgttaatagtaagttttacactttttgttttaataaatattttgtttatatagtgttagcaccttaatgtgtttaatatcaatactctctttaaaatagtgagtgacaatttacagtacacaaatgtgatacattaaaaaaataattacatatgtaatgtttcaatatatattttgagttaatgaatataataaaatgtaaccatacaatggtttagtctttctcttatattattgtgtaaaaagtgtacaaaaaaatagcatgtttagtaacaaaaaaataatttttaaagttttcaaaacataaacagtttagtttagttattgtattctgaaaacaatattgactgaattattttttgaaatagaacgaaacattttgttgttttcaaaattcttactttttataactttattttttaaaaaattattttaaaaaaataaggccaaataaacctaattgtttcaatgaaacaattttctgttttaaaaataaaaaacaattttttgttaatcatgatcaaattttgaagagcctactgtaaccaaatgaatcaaatttcctaaagttgattggagaggagagaaagatgatacgatcggtaatggtgataaacacccaaggcaagcctcgccttgctaaattctacgatgttcaggttctctctctctcttctctgatattccgttactaccatttcatttggcttctcagtaaccgcatttcctgttttctgacttcagccaccggagaaacagcaggacctcattcgcaacatctatgcaggttatcactcttcattatgatctctcttctaattcattttcattttcatattctgttttgcttcatttttctttctccattgctacagtactttccagtagggctgagaatgtaagcaatttcatggatgccgagccctttttcggtcctgtaagttactctgatctttgaatttctgattgttctttgaatttgagcattttattcatgtttttgattatggtgcgatctgttatttcaggatactcgtcttgtgtacaaacactttgcaactttgtactttgtgtttgtatttgatagttctgaaaatgagcttgccatgcttgatttgatacaaggtttgtccctaagcttcaaacctaaattcttatgtactcttagcaatgaaagagattgtgtatcttccgccattgatgcaggccaatcccaactaaaatttagtggttatgaaagaatgatcaataccctaaagtttacaacttttaatcaaaatttctgttataattaattatcaaataacacaataaatgtcaacaatttttagaattttatgtcaattaaaataaggtataaaattctagcagttagcacataaataaatttcaaggatcaaattcgtttgcagaaagtcacatgctatgtaaataaattctattctcttcttttaatttcttgctttgataattacttacccttactttcataactttcagtatttgtggaaacattggacaaatgcttcagagatgtttgtgagcttgacatagtgttcaaccacagcaaggtacttgtaactctcctatttgtcttctgtattttttaaggaaaataatttagtttaatcattgtccttcctttctaagtgaaactagtattagctatgactcattttgtgcctgcctaataccctatgaattatacactcacactaccttatgactctaacttgctagattttccaaataaacaccaagttccacattgtgaacattgtttgttaaattactgattcatacagattggatagaaacaatttttgaatgaggtattcaatttcaggaatgaatcgaaaaagaaatatttattggttattatatgtgatgtgatcttattagagaaagggtttaaattcaatgtagtacttctctaaatgtctgtatcaattaatgcagagatctcttttcaactaaagactgagataaattgttgttactttttcagatgcataccatattagatgagattgtatttggaggtctagtgttggaaacaagctctacagaagtaatgaaggtcgttgaagagatatccaagtactctcgctctctctcactttgtcgatacttttgttctgatttctttctggggtgctgccaagtttgtgaactttattactgttttatctcaattgctacatacataatggcaggttagaaacagcctcgaattccatttctctcgtcccgaaatctgtttctagttggcggagttagcgtaagcttttcgatgatatgcagcagatattttcccggttttcagtcgcaggtgctcccttaaccaatccaatcctcaaagtttttagacttggtgcaaatagttcatatatttgtgtacatctataagtttgtgttgtgactttatagctcaatgttgaccttttatgtgaatagtttatgagctcagctgatttatttggaaatttactagagaaaggaaggtaattaaaagcttttaatcatggctattacatttttctctctaggaatgagattatctaagttacaaaataaaactcatagtttttagattggatagaaacaatttttgaatgaggtattctattgcaccaaatatagtagacgacagccgccataaaccgaagcagtcacaaaattgatcagaccaggcttcaaagttttcattctagctttctactccacaagattacaagaccaatcaattgaccccatccaactagtgacttcaatgatcactttctttgaaaagatacagtcaaaaaacaaatgggattgggattccggggctgcttcacacacacaggagatctcttattaacagatgatcattcaaagccatccacaaaatgtacctgtgtttctataacaagcttggtttgtgtaagaaacaagctttaaactccatattcaataaagtagttaatagactcatcaataatcttcaaagcaaactgagtgttcaaatcattaacaacctttaagatttgggtcttgttattccacgtagatatttgcatttgcaaggccattttcagtttgttaaactaggcacgagaagcttgtttcaaagttcaaacctatagagttgtgacaaacatgattaggatgattagcatcacacaaatccacttggctgcttcatctacacaagttttttcaaatcactatttactaaaacattgcttacatttttttttgaatggagaaaattttatttaacaagaacgttcattcattacaatgataataaatcagaaggagcattaagctcactaaagatacaacctgacaaaaaataagactttctcgcaacgcagtgcgcgcttttatttgcaaatcgcttaacaaaagaaattaacacattattcagaaaagagaccatcatacgacaatcttgtactatcattcaaaatgggaagaaaattggaacctctctattaatagcttgcaccactaccaatgaatcagtttcaatttcaacatcagaaaaactatgagtcttaatccaacttagagcctctttgaccccaataacttcaatttctttactagttgacacagcttcaactagatgaccgtctaatccctaatgactattcccacaagaatagaacaagaactaaaatgtcttaagtattttcaaaaagggcgagcacgtaataatattgccaatgatcaataaatttataatacggacactacgaataatttaataatgtaaaaaatatatatgatcttttaaataattgagaaataagagtttggtagtgcactactaaccttctaagttttctaactatttaaaacaaaggagatcaataattcaataaaattatataattaaataatatatatttatagagttacaaaaggattcaacaattacaaaaacacacttttattttaattaaattttatacaaatattaagtccatcaactataaattactaacactataaactaaaaggataaaaaaaatattaatcaatttatattttaataaaataattaaaagcttaaataaaaatataagatatagtaatgtatttatagccataattattataagtaccacactattattaccttagaacgaaacatttggataaggatcgagtaaagagaaagaaaaaggaaataaaataatatattttaacatctaatgtttaaggttttttcttaagaaaaagctggcctcattaaattctcaaactcagtgaaaaaaaaaacaaaaaaaatagtactcattaaaag

SEQ ID NO: 296322 - DNA, 2040 bp, Cannabis indica
gggcataaaacccaacagctacatcttgtgatgttttacaatttaaagtgtctatttctcttaatggagcctctcaatgatatgtgtggatcccgatatttaataatagctaacaacaacttcaaaaatataattttgattaacaataccatattcaatatctatcaagatgaagaagaagaagaaaaagtttaagtctcactctaaataataaaccacaaattgaaattagtaaatttgtagtcactttgtaattcaactgaaacaaaaccactttatgattatgcaatgctccgaactcattccatttctctcttttcttttttctacttggggcgccactctttgtaaataaaaaataaggttatttagaatttttacctcctgaactatgatctatgtattattgtgtcctctgaactttcagctcgttataaatggtcactaaactattcacaatattgtaaattagtcagtcaagttttgtcacacgttgcaaaaaaaataatgacatgagtgcttagccaattgtcacatcagcaccacaagtataatttaacattaaaaataaaaaatatgcatttttaaaaaattagtaaactaaatatcaattaatgattagaaaaattacgtaaaaaataaatgaaaaaattttaattattttttcaaattaattacacacgtggtgttgacatggcattgacgtgacaattagctaagcaaccatgtaattattttatttgtcacgtgtgataaaacttgacagaagaatcaacttacaacactgtgaatagttcagagaccatttttaacgggctgaaaagttcaaggggtacaataatacataggtcataattcggggggagcaaaaatcccaaacagtcaaaaaaaaacctacttttcaaattgggcttaatgcctattaggctaggaggagcatgaaaggttgagaaataaatataaatataatttgtgatagaaatgtatttaaaataatgagatatttggaatggcaagatattgctatttacacacagatttttggattccgtcagtgccaccctttgtcttgaccccctctctgcattcgatgtctcaagtaaggtctctttacttagggatgcatcatatgggacaaagacttgatttgctcaagcttcttgactagtgaagctgaggctattctttttatttcgtgggcttctcatgatgtttcacataagataatttggaacttcaaaaagtcaagatggtattctatgtgtggttattggcttgctcttcgcaacttggaaatatcttgggcttttccttcagggggtttgttaggttggtggaaaaagatttggtccctgaatctccctccaaaggtgagactttttgcttggcaagcttcccataatttgattccaacaaagatcaatttggatcatcacgatcttttatctgatggtttgtgtcctttatgtgggttgggagaagaaactacacgccatgctttttggggttgcaactcgctcactcaatgtagaaaattatgagcgtttgtgttgggagatcctcttattcattgtggggattttctcgactttattcatagatattttaatcccctattgaaagagatgatggagttggttttggtgatcttgtggagattctagtacaaacgtaataaaatggtcttgttaaccgaggttttcggcaaccaatataataataataatttagagagctatatggaattaagagagagatttttacgtggttgggggtgttaatgagccttagtccacgagtctgtgtatttatgatagtatttattacagagaatgttcttggtggatttttactcttctagttcttttaaaacccagaattctcgacccctctttaatgagctttggggggtatttatagtgtttttgtggggtgatccctagaattaaggtacatgcatttctgtaactatcagtaaagccacacattcccaatgaatatatcataggtaatgcatggtctaattgttggaaattattt

SEQ ID NO: 296323 - DNA, 3682 bp, Cannabis indica
ccaagcatggggcaattgagttttacaagtactaaaaagggaaagaagaaagagaagactcaagttattgatatagctaagcttcataggatgaaacaagagaaggtttcagcttggactatgaaggttttgattgatgctgtttcgagtttggggattttgatgatctttaatccgtttgatgagatggaaaatatgggtgcagaacaacacaattttgagattacaagtgagatggaggctactgctgctgcttatcacattttcagaaatgttgctaaacctggctccatgtgaggaggacataataatctagtcttttactattaacctatttgctttgtgttttgtgtttaacttggtttttgaaaatggcatataggtacattgatgaggatgatctcatgagattcatgattagggaagaagtgaatcttgttcttcctctgattgggacagagaatggtcgaattgaccgaaaagctctcactgattgggtggtaagtttttgcaactcattattgtcctcctcctcctctgaggtttgagtacttcataagagtatagactaatgatagagcccactctgaattttagtgggattttaagaaaaaaatttgtttggacccttatttaaaatagcgcggtacttttaaaattagtaaaaaaaaatgtatatttttttaaaaaaaaatctttttttttttggcaactaggcataggcctagtttgccttaagctagggccgacactaactaaggataagaaaatatgagttcatttgagttagacattcaaaactcaagaaggatatagcttaaatgattagccatgtgagattcgagtctcttatgagtagggatgctcattttcgctatggaaatgggccctgcccctgttagggtggagacaagaattattttttgtcgccgaatgttaaatgggatagtggtgggaatgaccctttctgtcttgacagggatccgttttatttataatttttttattaatattttataatatgtatttatatttttttaatatatgagtgtctttttataagtttttaagttgtatttttgtataataaatagtatattaaataataaataatatgtaatattttaatttttatataaattaataattttataaatttaaaattttaaaataaattttattttttacattgagggattctccatcccgtcccgtccccgtaaattcttaacaaggatggagacagaggagcactcttcacaaatttcccactatgtgtgcatcctaactcatgagtacttacatagcaagtttttataggatgttttctcaagtatagagctattaaatctgaacttgtattgggaagaaaactaggttcatcttttatggtgttcgatgttattgcaggtgaaggcctacaatggtagaaaagcactaatgcattctctaagtgacactaaaacagtagttactcaattggacaaattggtgactgttattctcgttgtagtgactatagtaatatggcttttgctcataaaaattgataccacaaaagtactagtctttttctcatctcagattatagtggcagcttttgtgtttggtaaagacattgtttttgtgttcataaagcatcctttcgacgtcggagatcgttgtgtcattgatggcgttccggtaattttcattttagcttaaaatttttgttttaatgctaattaaagtttttgtctcttgaattttgagggttgtcataagtttcccaaaactaatgaaattgttcgattcaagaatttctgtccaattttattaatgaacgcttgatatggataaaaattcagggaatacagttgggtacatcaaagtttggggggacaatttggtagatagacaatcgtcacgttagtaaaaataaacggagttagacacaagtttttgaatattaaaattcgaggaacaaaaaatcttaattagcttaaatttaatcacaccaaacacaatatttattcaattatcaaaatcctaatatgacttttatgtttagtttagagtaataaaaacagagaaatctactcttctttctttcggaatgtttgtttcaatgctttgaattcttattgagctcctttttttttactttgacagttggtagttgaagagatgaacatcttaacaactgttttcttgaaactcaacaatgaaaaagtgtactatccaaactcaattttatccacaaaacccatcagcaactactacagaagtccagatatgggtgattctatcgagttttcgattgatttcaaaacatctctcgaaacaataggacagctcaaacaaaaaatcaagaagtgagtttacttactaacactaatataatgtcaatttttttgttcatcaatttacacattttggttttgttttgttatttttactaggtacatagaaaagaacccatttcattggcatcctgctcacaatgtggttgtgcttgagattgagaatgtgaacaagttaaaaatggctcttaatgttactcacaccataaattttcaagaattcggggagaagaatcgacgtcgaacagagctggttatggaagttaaaaggatttttgaagagttgaatataaaatgttgtcttcaacctgaaacaattcatgtcaatcccattggattggattcggactcgaatttggttcaaatttgattcttttttagggtttatataaaaatattgtgttttaacttataccatttgaattttatatttttaaaattgagaatttgaatctttatcctcttaaattcattaataatgcatttgtttataagtaattggaatgacttagaatacattgattaagaaatcgaattcaccatcaattggattgatgaatcgtgtttgcttgacttattggaatggaaatccaactaagtaatatttttttgtgtttattttacttaaaaatcggaataaattatctgaaattacaaaaatactctttattaaaattttatttgagtttttataaaattttcttcaattaaaagggtgagaatacaacggtaggagcaagaatttattcaagaataacattcgctattaataagttttgaatacaagtaggatttcttggccaccaaaccatgcttttaacattaaacagctcaagtttagcccaagtatagacaactccattacaagacctattacattgcataaaattaaccacatggactctattgccaagtcaacttctttataattctttgcaactcaatatttgtacaaaactctttgatacccttgaaatttcatttaaaaccaataatattattacataaaatgttataaattgttattttcgatgatcacttattttataaataatttttctttatgaaagaagtggtttttttttttggaagaaatgctttcctattataaatttatgataaatcatttgcaataataaaatatattgtaaattctcgaaacaagcttcacttaatttagagcatatcgagccaaactataagcagctatattggccaattatttgacatgaacaataacaactataggaaaaaaaaaaagaagtagttatttcgaccaattattctaatattaaaagataagctaattatgatttttactccctgaactttaacatgta

SEQ ID NO: 296324 - DNA, 5855 bp, Cannabis indica
ctgaactatgaatgctttgaactatgaatcataatataactaagcatgaatagatgatagcttttcaaattaagtgattggtttgtcatatgtgattttctagttttgactgtattttctcccactcaaaacacacacacaaaaatgacagcagagatttgggtgtgatattagcaagtactttataacataattatgttttttaaaaaaaaaaaaaatcttgaacaatgtgatgaatttttctacttaatattggcctgaatgtatcatcattacagtccctggctctatataatgcagtaactgtacaatatatttttcttcagtccaatggatacttgtaactagtaaaatgacagaaaagttgataaacatgcattgtgagctctcagtaagagaactagcagaatcccattaaaacaaaagaacgaaaattggattgacaaaagattcatacatggaaaaattgcatggattatctcttcatacttgtgaaactaaaatcagaacttaccagtgatgcagattaagactatacatacaccattttgtttacgagaatatactgctgaagaatcccctgaaaaaaaaagaaagaaaagaaaaaaggttggatcaacaaccctagactaattagtctaagcatatataatatttaatatcacatcagaaaaaaattcttaccaaattccagcctctttcttgttttgatctctgcatttgttaaagttgaaacaaaatagctcagttaaatagatcaaatgttttatattgatgcaagctgttctttatcagataagtagagtagtggaatatgatccaaacattttcatttttgatgaaataagaaaggtgatccttaaatgtatgttacctggttattcctaggaatgcatcattaatttcatcagaacttggtctctgagggaatgttgacaagataacatacttctccttcccagaaggttcatccaccctcttgtacagttcgtatcgataaggataagccatcctgaaacgtgaggtttgaaatgagagtatttatggctttttggttagaattttacaaatgacagaaccaaaatcaacagtagtggcataacaaactggctttaaggtatttgagcaaacctgagagcacccataattgggtattgggttcctgcataatagagaagccgaaagacatagcaaatctcaaatgaggcagcatactccaatctcttgtcacggcccattgtcttgagaagcaagtaaaataagtagaaactcagatatcgaaaaaatttgtgtttattgtaacaaacttgttcaaactcattggctccacacttacttgcattattccacttgaaccaggtaaatcctgaatatcaaaaaattcattaatgatttaactgacaagattcactttaaagaaaaaaaaaaggtgttgcgaaatatgaaggtattctgtagcttgggcttgaactaaactgattttggtattctgaagattacactaagttatacttgagatggattgaataaaatatttagtaaaaacacatttgtaaggtaggtttctaatccattagaaatgtattaatacgaattctccaatagcagctcctcctgttttctacttctgttatttttctggcttcttctggaatttttcctttaaggtggcatcagacccttctcaaaggatctctacatgacatggtcatgaatttctcttctgtactctttacattttaaaatttacgaggtcaaaatagcatattgaaatgacaatagatgtatgactctttacagctaataagtttcactaagttgtgtacacatgaattttgatgcatgcaatgctaaaatactcggtcaaatgacaaaatcacacaatgttgcttggtcattagcttatgtacgcaataagatatagaaagacaggtacaaaaccttgagccgaggatttatcagaacaactggccggtccccagcagcagtagtcattgcttgtagatcctgcatgaacaaacacaaaactgttggagacagaggtcgagctacaagagtcaagtacattatccccttgaatagcatcgaaaactttgccattctaacctacttacctcaattatacagtttcctacagcattttgaggagccaccagaataaatatgtcatcttgctcatccacttccttagcacctggacactttcaaatatagaaaactaaggatattcacgaaaatacgaagattcgcaacaagttgagcatacttacaaaccaattttgttggttggtgtatggttattctatattgtgtgtttcaatgacacaacacccagatttatgaaggtagtgaacaaaatttgataattcattattccctcaaatgaatttataaaataaatccatgactcgtttaccgaaagatatttgactataatcaatatgaaagtaaatttaacacatgaaaactgtttgtatatacctatggatccaatattgataaatgttcccattgcaccatattcaccccagtccatgaactctaagatctttctagtaccagcaagctgcaatggcattcctgcaagggcaccttcccccatagacccttggacacaaaccttcaagagaaaattgcatgattgacatactgttttaaagccactaatcaatgatagaagcagcatctagtcagttaccttaacgcgttttccatcatctgcaaaagaaagagcaatgacccgaacaagttccattaaggtacctattcgataaacatcctgtgcaccagcatatcataagatgtgattagttatttacaaattctgaagaagttaaaaaaatttaaaataaaataaaatctcaccatttctgggtttagttctggaatattaatctccacctgtcaaaagatgaaccaagatcttattacaactacagtattcttagtgagtaatacatttaacaagtaaacttatacttagtgagctttctacgtttgtcgtaaggacgttgccacttaataacaaacctttattcgagttcttccatcatttatagctctctgtgtggcttgtaacacatcatcatagaaatattttcttatttctctggaatgaggaatgttattcaatctagtaggaatgcccctccagttatcctgcaaaaagctacataacaataagaaataatataactgaaaatatttatcacaattttccacaagagaaaattaagtaaacaatgaacaaataaaccagaattaactaaacattgtataaccataaacctgacttgtagatggctccttcaagtggttaccacttccaagtgatggtttctctggtgaagacaggaagtaacaagaaaattagaaaaggtagaatatccaccataaaaaaaattatctcctcaaaccaccagaagtccaatacttacttctagtaaaggcaaagatagtatttaaaacaatggttgaaagattctattaaagaaaaaaaggtctatacatgctttcgaagcaattctataacgttgtgctaagaattattctgttaattggttaatgcagcaaaatagaagaacactagctgatattgaatacgagggatttcaagagtcgtgttctctcccacttgggttaatgtggtaacaattgataataacagagaaaatagaagaacactagctgatattgaattcttcacattagctaataacactagaagaacatttgggttacaacctttttaccaaattcttcacaccccaaaaatgaactatttattcaactcttatggtgtactctatatcccagccacactctaacatcacccctttaacaaactctctgccgctaagagaaagtctatcactttgattattgactaaagtttgaaaagctgaagtgaactgatctagaccaaaaattaatagataagctttttgatacattaaaagaaggtttataaaacatctttaaggatttcaaactgatatgttgggggcaaacttgcattataaactttagaaggtaaaatatcttacctaactttgttgtcttttctttatccttctgcactagtgatagcaaagcatctatctctgcaaaaacttcttcttttgaacggtttccattaatctgtttatcagatataatttaaacataaaagttgtttgtgcacatttaaaaatataagataagaaaaaagaagcacataactatatttcagcacctacctacctttttcattatgtctgaataagtcgatgaaattgcttctgcattttgtttgtatatttcaagccgcgactttacctggatagaagttagaaaaccgaatcagaaaagctaaataccaaagaatttatcaagcaaaattacttttatttccatgagatttaagtagactccatcaaagcattatatgtatggtgaattaactatcatttaatgcagcacttaatttgatttatcattctctactcaaccagatatctttgccttaagtaatagtaagttaaaagtttgacacattggaatgcaagtcataacagtacatgttgctcatttgaaagaccctattcaagtatggcctttgtgatgtgaaaccataccttttcctcagtatcatctggacgggtaacaagtctcgcactaatttcctcactctccggagggaaactcttgagatggtaaattttctttgtcactgggtccagccttcttccaatgcatctgtcgattagagtttcatcaggaacctgaatattaaaaagttacatcttgtaaaattgaacatattggacccttagtttaacatgactatatgagatagtggaaaatatgaaaaaacaagtaaaacccactttcatttatgtatcaaaactttgtcaaaattttaatgctacatatacatatcatacaatattttggcctggtagattccacaaataaaaaccaccctttacaaggaattgcagacaagtgaatttagtttaaaatcatcgcattccataattaggaatcaaacaatagaacacatgtgcacacggataacatacatctaaaacgatataaacatctggcctaatcttcattttctccaaactctgtgcttggttgaaacttcttggatatccatcaagaagccacccttttgttttagtatcttcacgagataatctcgatgttaccatctacatgacaaagaaattcggttgactttatgttgaagaaaaaaaataatacagtaaataatctatgtgatttcaaatgttgatattatacagctgtgacaatctcatcaggaaccagacgaccagaattcatgtactcttttgctttgttcccaatttctgtctcagatgacacttcagctcttagaagatctcctgttgatatgtgtaccaatccaaactgaataacaaagaaacaagtacggaataaccaagaatccaaacatataaaaaatccaaatacttacaatatgtttggtagaggggagaggaggagggagggagagggatagaggaatggatgaattccttgtttggcaaaaaatgaattcccaaatattccattttctcatgtttgattgaatcaataaattaggaactgttttttccagaaaactcaaatttaatataattgtataatattctaagcataaacaaaagaggtgctctgatcaaatttttgaaaaacattttccttcaatttttcctcataaatttttcaatgctaaaaagggttcaaacaagagcttgaaaataacagaattgggttctcgattatatataatttaattggtgacggcctaaaagtctatatccaaaaaaccaaaaaaaaaaaaa

SEQ ID NO: 296325 - DNA, 1604 bp, Cannabis indica
gaactcaagaacaacatattagactttatcctaatagtccatactattccttgtagtaggtagtttttttttttttttttttttgaaaacaccagaggtatttattctaaacttactatttattattttgatttaatgtagacacatctagagatccattaaaatatggtacaataataattagataatacgaaattctttcgctgtgtacttgacttagtaccataaaactaacacttgcatcctacagttcaaaaattgtatgcccaagaaaagtaattaatgaagctcttagtgatcatcaacccacataaccaataagctctctggttggaagatctatcgagcgagaacaggtaagaaacaatactgttgggctatacaaagagcaaatatatggccaaaaatctcatgtgagttgaggaacgaatctgggccaatataagggtaattaattcaaatttcatttattttcaagagttcaaattctcgagccttgtctatgtaacttatatgcatggctcagttactcacgcacatgacccacacataaccttccaacaagttcctttaccacacacacagacatgcatagtctattaaggtacactgagccccaaatcaagccctaagtaactctaagtaccttaagttaacattaacattctatcatcattatatatcatcatcacttattattcctaactcaaaaccctagaccatcaataacaataaagtaatgaaatggaagcttgtttaccttttgatgcgaacccttagactactaattaaaaatagttttctaacaagaataaccatggtcaaaaacctttgatgatcctccctaaaccaagtctctaatgataatttccttgagtactcctcactactagaaaagtcacatttagtttcagttccaaccaacatatatacctttagcattaattggtataactggcctatatgtactgtagaggcaaatgtaagagttttaacgccaattcctatccgttgggtctgaaagcttgtgttagtgcaaaattgatgcaaatagtgtaaaagctaatttttgacaccatttgtgtcggttttgcaccaatgcacctaaaaaaagccaaatccgaccataccttccattttgtttgatctaacctagatttattccaaaacaaatatcacaaatatcaaatctcagagtatatgcaacatttcatgtttatatatagaaataaatatataaaagaaaatctaagagtgaaataaatcaagcaccattggagtgagatctcgaaacaccaaaaacaaaataaaataaatatctgatttaagaagtgtgtaattgaagagtgagatatatatatagagagagactcaccacaagttcgattgaaagcagtcgaggaagatgggagtcgaagcctttaaccgaagccccgtacagctaaagacgataggaaatttaagtagagagatatagaatttaagtaggaggcaattgggaaatttggaaggaataattacataaggcacaattttttgtaaaatatttacatttttacgttcaaaaaatatttttttacatttttacggttttccaaaaaata

SEQ ID NO: 296326 - DNA, 2565 bp, Cannabis indica
tctcacagcacaactacaactatgtcaaactggcattatatctatttgagcaacgtttttaggcataaagcctctacttctacttcttacatcaactttgattgtctttacgatagagtttattgtataaatttttaattttcaaaatatatcattcctccttctttatatataattcgcaagtcaatattattacgacgaggcttgaaaaatcttcagatttacaggagtgtttgaaccctaaaatttttcttagcaattgaggaatgagattacaaccctttgcatgggttgatgttcttatatttataatgctaggattcttatttgcttttcactttgccccttgatggggtaaatcgtaaatacaaataataacatattgatttgggctcatatggtagagttcgacccataaagtaccgacgtatcctgatgtggatatcacatcatattaatatttgtccaatttgtgtcctataattgtggataataaagacacatttaatgcttgatacataattactatctttccatattggggaagatacaatccgcgaaatagatcttgagagtgaaatcctaatatcgtctgataattaatgagcatgatacagagctagttttttagacgtctggtgactacttctcaggacactccaaataaactcttccagattctcattgtgttggagaattatctcgcctggacgagttgtctatccgtcatccagaaaatctaacttcgctattagacgagttgtaatttccaaagccattcacattttgagggatctctaaatttttatataaaccccttcttttatggatcgatctttcattaggtttgtccattccatggttggttttgttattctcttttattctactctgaataatttgggtgtcgttacttaatttttattgaaagatctttggttgatagtcatcgatatatgtgtaatttgttacgtgttcattcgagatgagaatctaacattcttcactctttttatgattcattatgaatcatttagttgaagatattgttaaattttttttcctaattattataaatggcttagttaatctatttttattgattctacttaattaacaatatttgcatgtattaataaattatatatgatttacttattatttggacatttctatttacctttaccaaagaaaaatgtcccctgattactttaatttttttagtagagttagtgatggaggactattgctgaaaaaataataaaaaaagggactatttcatttcaaaagtgttgtaattgtaatgaaaggtgattacaatcaaatagtaaatggacaatgattattacatgaattacaaatacataacaaaattaaacctaaagagtgagtactattaccctttcccccctctctctctatttctgaatatattataaatataaaattttaaataaaagtagaatagtcactataaaaattattatttttagtgacaattatttttagtgacaattatttagtttcaataatttacttgtgactaaatatattatttagacacaaattgtcattaatttaattttagccacaacaagtattgttcctaaaaacacatttaatcacaacatattgtgatttttatgactaatacttttagccacggactttttagtcacaacgtaggaataataatttataattaatcacaactttttcactttgtgagttttagtataaatattccattctcatactatagtaaacaaaataattctttcttataatgtttatttcaataaaccaaacaccaatattcacataattcattacctactattcttattacttataccaaatactaccttagagttaaaataagagtaaatactatttcataatttttattttttaaaaaattattttgtcaaatgataatttaaatttttttatatttttaaaatggtacaaaataatactttaaaagatcatttggtacgttgtattagatcgtattatattgtattatattaaatttaattatatattatatttttatataatactatattaaatcttaatttatactaaattattatatatatatttttttagggaaaattattatatatttaagtactcattttacataaaagtattacatgaaatataatttaatataatactatacaatacaataatacgatgtagtacgacgtactaaacaaatcttaattaagctcaattttaattaaaataaaatagtaagaggaccttggcttgaaattggttagatttgtattattttgacaaaatagaaagtctaaaatataatttagcaaaacaaaaagtaaaattagtaaggagacaaataatagattgcagggaagttaattgggtaaatactattttggaccctgtgttttgcaaaagttactgactggaccctgtgttttgttaaatgacaaaatagaccatgtattttccaaaatagtaaaaataaggccctgcgcttaatttttgacaacttttttttttaatataatcaacttgaaaacaattcct

SEQ ID NO: 296327 - DNA, 4709 bp, Cannabis indica
aaaaaaaatggcaaaattgcaagtggtgggcccacattctatggtcggccacttgtgctggattttacaatttatttatcaattttttagtgccaaataattcaaacctaaacctaaaaagattactataaatagatagtgattgactcaaaactgacagcctaagttacactagccttcagtcaaatttttgagtcttttatctctctccaattttgaatccttctctctctctctttctcttcaaaaattcaaatccttatagtgatagattacatgcccacacatagcaagttggtactcaatcatagtatgtaagactgtgaagaaaccaatcgactgaaggagaatcgggctcaaatcttggtgagactctgctacaaaaaggatacaagggttagagatctgagtggaaggagtaatttaattccaccacaaccaatgtaaggtttcttgaactttatatatgtttaaattccattgttatagaaatttatattgagaatgttaaacaacatacatggtattaaatctagatcttggtaaaataatccccaacatgcaatgggtgagaacgttaggggtatttataaaaaggagaaatagaggtcgatttcggaggtttatagagagaataatgtaggtcctggtgccttacttgaaacaaagattaaacatgagatggttagtgagatgatttctaatagtttccctaactaggatcgctattctagtagtgtcattactagtcgtattatcttgacttggcagtctaaagttgttcatgtttcagtgttatttgaagatagccaattaatccatagcggggttaaagtggtggggattgtggatgaaatggaagtaataatgctactaaaagaaaatctcttttgagaagcttgttgatttaggctaatcaataagccttggcttattcttggagatttcaacgctatgtttggtttccaaaataggaatggtggtaagcaagtcttagctaaagacaatcaaagatgcttagaattggctttccttaggccaagttgaggaattcaaatgtttaggggcccattttacttgtgttatctcaatttttgcccacttgatgtggcatgtctacatggccaatatcagcgccacatggcaatatagctcgtcaacaagaagccaagtcatctactcttaacactcaaaaaaggaagacgaatgacgaaccaaccacctcgaggaggctggccggccacccctgaccggtcctatggctagcataggttggccaggttctagacaatacaaggccagccagcctgcatcctacaaatgcatggccggccagacattggcatgggcatgactttggtgtacaacttcatccatggtcagcaagctagactacaaattgggccttaacaacccatgaaattagagggaaaatatttatttttaagggacattttagtcattagtattttactaatttcatatgtaaatatctacttattttatcaaattaaaggatttaagctctcctatataaagagccttaactaaaccctaaaaccctaagtgaagctaagctgagttctaagtctaaaatcataagtggcgaaccctaagctctaagtctcttactcacacgcccaccattacttctctcttaagttgagatttgccatctctcattcctacattgtaaccttaagagagccacttcagatcccacctatagcgatctgaatagtattacgatatcaatacaactaaaaggggagtaggtcattacccattaactaagggggtgaacatctataaaatctcgtgttcttttactttcttgttcttattgtgtaacacgtggtaagaattagcattgaatatgactccgctatggattggccaaatatgaggtcaacagtttggtctaacaagcatgatatggggactataattcatttgaagttggatagagttcttttgaatgaaaaccggctagatttttacccaaatactgaaccgtgtttcaaatgggattgcatctcagaccatagctattgtgatgtcaaaagtaacaagattggtaatgttggttttaaaccttttagatattgtaaccattggtcctttcacattggtttcaaggatcggggtttgagctactggaacaggcctttgaattctatcagtattaatgatatagtgaagaatctgatgagagtcaaacatgttttgaagagatttaacaaggaggatattggtgatgctatgttgaaattcaagcagagtaaagaagcctttattacagctcaagagaacctggcttgtgatcctaataatttcacattgtagtagaatgagaaactaaagaatctggaatatgtttgtgcattgaagagttattcttgtttcttaaacaacaaagcaaagtaacatggttgcaatgtggtgaggacaataccagatattttcattctttcatgaagaaaagaaagttggaaaatataatcacaagttttgtgttgaataatgtaattgctaatgattattctaaagtggtggagcattttaaccctttcagaagctttatggggaagaaaagcacaactactcagagaattgatgttcattgtcttaaacaagggaagtgtcttaatcttgagcaacaagttaggctcattagaccttttactaggaaagatgttaagaaggctatgtttgggataaactctttgaaaaatccgagtttggatggttttggtttcgaattctttaaatgcctttggaaggaaattggggacgatgtttctatggctattcttactttcattgaggagggatccatgctagtttccttgaaaaattcggttatcactcttattctaaaggttcaagatcctaaggatgctagtgattttcatccaatttcttgttgcaatactttgtataagtgtatttctaagatgatctgtaatagattggtagaagtccttcctaagcttgtgagtaacaatcaaggggcttttgttaaaaacaggctcttagcccacaatattctaatttttcaagatcttcttaaaggctatacaaggaagaatatgtctgctcgttgtataataacaatagacctgagcaaggcctatgatattgtagacatgcagtttgtggaagacctccttaacagtctttgctttccctcaagattattcaatggatcttgtctgcttgagaggtacaaaatattttttgttacttagtggtagattacaaggctcttttaaagggaaaaaatgtctttacctaggtgaccctctatctcctcttttgtttgtttttataatggaatatctttctaaattgttggctcaatattagaacaaaaaaagatttggattgcatctctttgtaagaatttgagattaacaagtctttgctttgtcaatgatctcataattttttgcaaggggaatgtgaactttgcaaaattaatttttgaaacttttcaagggtttataatgcaggtcttgctgccaataaaaagaaatctcatatcttttttgggtggttaaagaggagagtacgagtaagatcttggagattgcccaaatggacgaggggtctttttctctcaggtatttgggagtttatctaagacccacttaatgcaaggccttggactgtggtataattctagataagctcaatttcaaacttagtggatgggctagtagaaacctttcttttgctagtcgtttccaattaatccactcagttttacttagtattcaattttggatgagccttttcattttacctcaaaagattattgctaccataataagagatgtagagatttcttatggggatattgaatggtaatatgagcaaacttcatctacctttctaggaaaaagttatcttgctaaacagtttggaggcattgggtttcgagagggtaaaatatgaaatattactatgataactaaacatttgtgggttgtttcaaacaaataagataacctttaggtgaaatggatcaactccatttacctaaaggagcaagatgtgtggtccttccccatgaaattagatatgagttggtattttaagaaattgttgaagatcaaatatttgacaaatgagaacatgttgaaccagactattaaaaaggtaaatttaaagtaaacaggttctacaatgctatgattggggctgttaaagcttcttactctgctacaatttggcacaaactaactatctctaagcatatattcatttattggcaaatctacaatgatcaccttcttactcaagatcatttgagtagaattttttctatcccttcgatcttatatgtggtttgtgagagtgctctagagtctcatatagattgcatctttactaagaagctggttgagattttaaaaagttgggtggggtgtttaaactggccaagaaacctctgcgagcttcagcaaaggcatctgtcccctaaggctgatctgtctcttacaatcttgaatgtgattaccttagttgctctttatttgatttggaaaaacaggaatggttgtatctttgatgttgtttgtaactctgcctttattcttagtaatgagattaaaactatagtgaaggctagagtgttagggattcacaaggctaatttcaaaaaaacgagataattatgttttaagagttgtcaatagttagtt

SEQ ID NO: 296328 - DNA, 2489 bp, Cannabis indica
ttaaaacctaaaataattaaaaaaatattctcttaaagtaattaatagtattctatatatacacaacataaatagtaaaattttaaaaaatattttataagaaatttagagcatttaatatatatatagtgtttttaattaattttgttttccaaatattttaaagaatttttattttacatcacaataattaataacacacaccaataatagagattttcctatttggagagagatattttgttggtttttatagtacacatccataatatatttatttctttttgttctgtccacatatattatcaaccctataattgaaagcataatttgattgttttctttatcacgtcacgtgataatcattttaaaaaatgaaaagagataatattattgaaacatataacataccaggaagaaagatttaatgttctcttgggttaatttgacatctgagccctcatcatcggaaattttaagtaaaatatcaaggaaatcccttggaacatgattatgatgatgatcacctcggctagtcttattatgtgctcgatgctctttgatgattttctccaccatgttgtcaaacttgtcatggatgaccttacttctttttcgaagtccctgcaagtctaaattcttacagaaccaaataaaatcagaaacgttaaaagttccaacaatctcagctgagtcatttaccacctcattgatctcatcagcttcgttatcatcatcagcacacctcttgctcataattattctcgatataacattgttggtaagctttttgagctcgtttccaatatcaactgactcatttgactcagccctttcgaggagtgatactaagaatctcctcctctcatcattcctaataggaagaagaagattaagagtttggctgcccagaagctgagacatgcaaactttcttcaagaacttccagtaaggaccgtacggggcaaaggttaagtcatctgagggataagaaatgtgtttgaggatactcggcggggggcgactcgagaaggaggcctcatgagttctgaggaattctttggccatttctggcgaggaagcaacaacggtagggattgagccaagatagatatgcattaagggtccataacggtttgaaagcttatagagagattggtgtggtaatggaccaaggtggtgaaggtgtccaatgattgggagtgaagaagggcttggtgggaatctactattcttggttcgacgtttggagaatatgtttcgaaccaatatggtggacactaaccaaagcaggaacaacatgatgtagtttttgagatcttccatggctgattttcttggggagtaacaagatggtgcaaaagatggtacttgtgtaaaacaagagaaactaattacttcacactatatattttcttgcacacttatattttgtatattatttgaagttcccacctcctcaatatatagacggccagtaggtatggaggtagcatgaccaatactattctatcttttgaaaaagagaattgctaaaatactattgaatcttttagaaaagagaattgctaaaaagtaccactccgagtaatataaaactattagagcatttttaggtatgtcaaaaaaaatttatttagtcgaatcagattggagctccaatccaacaaattatttctgatgcaaaacattagcaatgatagtattctttaaagaagttaaaaattttcacattattcaaaaatataatattttattttatctctcttccaatcatttttgtggcactcttactttacaaaacactttaatagtcactacaaaaaatcatacttttagtcacaacaaaacttgtgactaaaagtaaaatagttgtgactgattataaattatcattcctttgttgtgactaaaatgtctgtggctaaaactattagtcacaaaaactaaaatttattgtgactaaaactaaattagtgacaacttttatttattaaatactatgttttaatcacaactaattttttgttgtgactaaaagtcacattcagtcagtcttttagtaaattcttagtgagtttataaaaaaatataagaaaaattaaatttccaactgtcaattaataaaactattgtatatattcattttaaaaaaaaaatattgtatatataaacttttttattattattattaaatcactatatatatattctaatttttaacaatagtaattttttagctttaatttttattaaaaaaatagataacatcaattttactatatagtatccatgcaaatttttataatgacatccatcactaatacataaaagggtgttcacgacgtcttaaaactgttttttagaattgtcgttaaaaatataaagcgagtgtttaaaactgttgaccgaggttttcggcaactaataaaatattataaaattactgagctgtaagaaagtgagagaatgatttttacgtggttggg

SEQ ID NO: 296329 - DNA, 7070 bp, Cannabis indica
atatatatatatatatataatgttcttgggaaaatttgtcggattttataatgcgtataagattaagatagcgatgaaagcatagattcagtcactgaaatggttctcaatgaaaatgaaaaaaataactttagcaatcaatcgaaagtgtaaaaaataccttttcacagtttcaaattgattatataattgagttagtaatattaaaaccccgaattacagaaagtattaccataatttatttgaaccttaatgtctttttcagatcaaatggatgttagacgataagaaattagatttctcgaattcccttttccagacgggctctgggaaaatggttaatatatctccagcaggtatagcaagagcaaagacgttgttgggattggttgaagacaatgatcctggcagttttcaaggctttcaagagacaagaaagttatctagtaccgattccacttctgggtgtcaaaatgtttctcaattggtagttagagagggtgtcaacaactataaaagtacggatgatgctttggttccgagatcttcattgttttgtaagattgattcaggtgaagataaactcagtgaagcaaaaccatatttgactccatcaaggatgtataattcagcaaccaaaacaccaccggtaaagtttcaaacagcaggtggaaaatctatatctgtttccagtgatgcactgaagcgcgcaaggagtcttctgggtgatccagagttaggaaatttcttggagattggggatgcagatgagacagaactttcattttcaaaaaataaaatgatggttgattctggattaaggaaggataatgaccccccaactagtgtaaatcatcagggaacgggaaagaacaactctatgcctaagagctttatatctccactacgatcatcttccaaactaatgccatcgttggtcaattcggaaactaaaaatttaggggctaacttgatcagacgatttgattcagttagccatgataatgtttgtaagttaaatagaaaccttacttgccaacaagagcctttgggtacagtggcagacaactcctcggaaagtactattggtttaagaaagaatcaggatgttaaatcaacaggaaggcaattggctgatatatcaaacaccattggtacagtttctgcaaaagataaacagggaatcaatgaaaagaggaaaattcttagagtttctaaatcttcattcaagaggccccgtagttccaagttctccacccctatgaaaagcaatgcttcttttgctcctaatggtaaaattcattgatgcatttaaagaaattagttttcaattaatgataaaattttatcatccttatttagctataacttctttcaggtttatctacattttactctgaacattcttgttcaaaaggaagggtttttagtcgatacccttttcagaaatcaagaatgtatgtcagggaatattttggagggcctccatcccaacacatggtaattggttaatgctactttgattgctgttattaagagatcatctctgctcttacttagtactgaagttggtttatgcattcaatgtatatatgcagttgaaatctgtgccggaccaatttagaaggattagagcagataatgcagagaatttcacattccctgatgcctccggtgtaaattgcatcggagcagaagctttcttccacatgttgatccagtctggagcttctgagcaatatgtttcgaaggagtaatttttttcttaccatatttctttcttatagtactttagatttaaattacgtaatctatatccaaaggtgcaaaatttgctgacaaaattagctcatgcttagttaaacaattaggttggctgctatttatgccttgtggatcagtggatgtatgtattagggtatggttgggcctcatagcccttgtactctttgcatgttagagctctatattgtaattttagcagtatatttttcaaatgctctgtccttgtttatatagttttgtattttaccttttaacgttgcatcttaggtgggtcaaaaatcattacaagtggatcatctggaagctgggatgctacgaaagatgctatccaactaaatcttctggaagaattctcacagtgggcaatgtgattgaggaattgaagtataggtataatcttagtaactcaattgtgtattcctctttggtttagatgaacatcccatatatatatttatattatatatatatatttgtgcaggtatgaaagggaagtgaaccatggccaccgctctgcgattaaaagaattcttgaaggggatgctttgcctacttcaatgatggttctatgtgtttctgcaattaattcaaattccgaccctaatattgaggctaactcttcggtacaaggcgatgctgaaaatcatactgctgctgcagcaaaaattgaacttactgatggttggtaagaaaatgctcattacatacaaaccaacattttcaactcacttctgaattcttttatcataaaatgtaagaatgttttgttgtacaggtattcaatggatgctctgttggatgtaatgctgttaaagcagcttgcttcaggaaagttgttcattggccagaaaattcgggtaacatgttcatctgtggtttccaagcttcattccttggttagttgcttgggcattaaattgaaactccatttgcttacagtataattctcatatgtagatttggggagcaggaatatgcggctgggctgggcctgtttcaccacttgaggtcctcactagtttaataatgtttcttgtattgaagtcaaatttgaaatatgcagtatttgtgttagttaagggatttctcaggtttttggtacattttaggtgccaagaacagctaatcttgttttgcacataaatggcacatatagagctcagtgggctgataaacttggattctgtaagcaccattttaattacttacttttctttatttatactttttcaatgagtcttgagcatttgaaatttgatcttcttgctctcttattcttactctgaaattcatttttataggtaagggtgttggtcttcctttagcatttaaatgcataaaaagtaatgggggtccagtcccgctgactttgtttggcatcacacgagtataccctgttctctacaaggaaaggtaatttgaaaaatgatttcttcttactttagtttgaataacataccttacttcttttgtgataataattgtcaatgttgcattcatctatctaggttgggcaatggaagttcagttgtgagatcagagaggatggagaataaagtattgcaatcatacaaccagaggtgattgtagtactgcataggctcataaccacacattttaaagtttcttaacccaaatgatctttatttgttctgttttgttaagtcaattcactgacactatgtgacttacctttaatgttgatttgatattgatcttgcaagtgaactcttcaactcatggttgattatttgcttggtacagacgctctgctattgtcgagagcattgtttctgactttcagaggggcataaaacattcacatacctataatgatagtgaaagtgaagaaggggaaaaaatcttgaagatacttgagacagcctcagaacctgaagttctattggcagagatgagtccagaacaattaagttcctttgcaaaatatcaagcaaaaatggaggttggttttacatgctttgcttgattgaaaatgttatgtgttagcagattattaatcattgcaggtctgatacttaggcaatcaagcagtctgacatggagaagtcaatcgagaaagctttggaaaatgccggcttaggtaagagagaagtcatcccatttatgagggtaagggtgattggtctaacgagtaaaacatatcaaggaaaggatattcccaaagaaggcttgatcactatttggaatccaacagaaaagcaggtacactagccttgtgttatgttggtctatactatagttatggtgatctttttattctctttatatcccagctcattcttttcctgatgattatgaataatgccaaaattctttcttactaatatgacagcaaactgagctggttgaggggaaggcatataaagttgcagggcttcaaccaacaaatgctgatgctaatattctttatttgcaagcaagaggatctacttcctggcagtctttatccctgcatgcattggaaaaatttcaagtaattttttcacattgtatttctgtttagaaaagagaaggaaatggcttatattcaataattcacgtcgttattattatcctccacagaccattcttcacacctcgcaaatcagtattactgtcaaatttgggaggagttcctctttccaggtgcatcttcaaacttcatgcgtatactgatgcttctgattgtttgttcttaaacaatgttatcatacttaatgtcctatttttttttgcttcaaatttgtagcgaatttgatattgctgcgtttgtcgtctttgttggggaggtttacaaaggtgggcagcagatgaaacaatgggtgtttgtgactgatagttccatctctgagttacagtcggaagaattttccaattgtttgcttgccatctgcttctgctccccaaatattgatgataattcttctgtacctttcaactgtaaccttgtaggatcaacggttagttaccatcttttgattgtcaaataattaggtttaaaatagagaggttgtcatttaggtgtcccaccataaaatagttatttgactcattttgtagccagataaaataattcccaccgatagggacatctatttttctatcatttcaagaaattataattcaattttttttttagatatttcatctgttttgaaaaccaaaaaatttagttgcacttgtatttatttctttttagacatgtgcaactgaatatttaaatacttaattaaacactataaatagttctaaatttttagaaaacaattagtcatataaaaaatatttagtagtaatttctctaaggactgagattagagacgttacaatcgatagggtacaatacctacaacaaaattttccaatatatatcttgggtctgttttgttatagaactatgcggtttcatgaaaaatggtgagtaaccatttccctttgtttagttaagccttttcattgaattgtccaagatttctttgcaggttggcttctgtaatctcgtgaagagaccaaatgaccaagtgaatcatctctgggtagctgaagcttcagaaaattcgacctatttcttgagttttgactctccacattattctcacctaaaaaatgcggctatctctgctgaaaaatggggaagaaactctgagcaggtctgaattgtaaaactttgttcttaaaccatatatgcatagctctaaatatatttttgtggggtaattttgcagaccacttgtaagcttagagagaaggttttatatgttgttggtgatcgtacaagctaagctaggtgtgaaaattgcccacctcagctgacagtagtaagtctctctctctctctcagtgaaattgctatcttttttgtgcatttttatcagattattaagtactttctcttgatttatatacagaatttgcatgcactgaccaaaatgagatatcatgcaaatcaatggagatgaaaagagttttaacatcagtaacgacaaaaggagctttgaatcttcattaacatgaagctggtgaattgtgtcataatatccctttcaaaggaaactaaaaaacactaatggaaaatcattttgtggaagcaaaaaaagatggttttgtaaattacaggaaggaaaggaccaaggaagtgctctctaagtccggctacattcatcaattttgcaaagtaagctgttagtgaaggaacaattgttcatatttttatttaaacaaatacatatatgttaatgtaaattcaatagtgaaagagtagtactctattatatagttcattcatagtcataccactgaatattatgttgttgtctgaaaataatgtgtgaaattaaaatgatgatgtgaggggattgattgtctgcatctgctacttactgtacacctttgaacttgaattaagtaacaaaaaccacacagtttcaattctcgacaccttactactcgaatctttgacttttcttttcaattctcttgacaccttactacttactgagagtggtaattaattaaagtcagatgaggtaactcttactctatcgattggattgggtgtattaaattaatctactgctacatatccacattcatggagctacaaataataccataaaactctttgttgtgcttgttcatactaaacacaagaattataggcattcattggagctaactaatttcatttataataggtggctctggtagtggtacaccagaattcgctttaggaaatatacactggtttatcaatagatagatttttccaatcatatatataatattttgttgggttgtatataaaacagtaatatatttggtattagtttatatatgctcataagttgtgtaaacttatactattttaagcataaaacagtaaatttatgattataatagttaatgtaatataaaaatatatccaaatgtaatattttattgatacaatacaaaccaaatacgacatgccaaatgaattcccaaagaaattacaattcaaattttattctatgagtgtacatatattataattatagtaggcatctcacttgttttagcaaaatttagaataatgaaatgtgttaaaaatatgattcacatttcattgcacaccttttctttttaatgtgtgtaattgactattttgaacattgttttcagaacggtaattttttttttttttttaatgtggtataatgggaatatagattatgatatttatcggaccatatctaatatttttaggcaaattcaaatccgatctaattatatattgggaaatttac

SEQ ID NO: 296330 - DNA, 3439 bp, Cannabis indica
ttataaactttttacatttattttttattgcttttataataaaattattattttttatatttttaataataacattaactaagcattaaattttacatcaaattttgcagtgtatttaaattacaatactaaaatttgatacaaatatattacaaaatcactttttatgtgaaatataatacaaattttacattcttagttgttagtgaaactcctaactcaaaacacaataattatattatataattttagcaagcattgtatatattagtttagaatttatgttgagagtgagtgaggtaattggattctctctggtagattattacttttgagaacttaataattacgaataaaattatttttagttgttactaaaagtaagatttttttttgtaatgatgtatgtaataatactaacgctacatgtaggattctacattaccaaaagaacttgcagccatggataacgcaagccctgaaaacatggataaattggagcagtacgccaaagacatgttgaagaagccagttacgcgcctcagtctacctacctctcagcgtattattgtcgatcaaaatcaaacttaccaactagcactcgataagtaattcgttaaattttttatttctgcatgtttaatttttaattaatttagcaaacaaagttaaataaatgcaaagtgagtagaaaatattatgctattggggtcgttcttagttgaacgaaaattgattattatgaaaacgataaactacacaaaagttgtattacgagtataagatgcttttacaatgcactctactaaaataggtacactggtataacttctaactgtttcagcatctagaaaaaaaatttcgttcatttttttttatagtcatgtatgtcatagttatttaagacatcctgcaaaattttgagaaatttagaataatttacaatatagaattaaatgttcaaactatttatttgacatgcatataaaataaaaaagtcacacacgtaacagattttttgaatcctattttcagcgtgttaaaattttatcgaatttcttaaaattttacaagatatcttaaataattacaacgtatacgatcataaaaaataattcaaaccaaaatttttttctagataccgatacaaataagagtgtatcagtgcaccctttcaagggatatattgtagaattttcacaaactacttgggttcattaaaatgataatatacattaattatatatttcatgataattaataatatgcacattataatggttgtattgcagatttgcagaaaagcttattgccataaagaaaagtcgagccaaattagccgactcgcaagactaagcaatggtgttgtcttaatagttttaataaagctatgatattttagtatacatgtgatttgtcaaaaataacatactttgaagtgttgtgtatttatttatactcaaatccaacttaaatttttaagcaaatttacggttgtgtaccaataccaactaaatcaaaattaagatcttgactaagttgaagtttggtgtagtatatagagaggagtgtgtcaagaaagatattaatcaagaaacttaagtatgaacaatgaaagagaatattttcaccatttaccaaaaaaaaaaatagttatgatcaccaagccattttgattgacatataattaagtggaagtataagtaaggctttgatacaattgtaaattgttgtcctgtacaagattttatttctaatctaaaaaaactcctataaaatcagggttggaagtcggccccaagagttggtaatagcctattgcctttatattttactagtcttgttgtaggtcaagaacaagcttttaaatgaaagaaataaaaatggcagagtttatgctctttggatagtgattttggatccccttcgaggtcatgtatgtccccttacataggggaagtgttggtgagtctctcttcaagagacgtatctttgttgtgaagatatctcaaccgtccctttgatttttggagatggttgaggtccgactcttacaggaatattctgctatttttatgggtttgtaaccacctttgagctttatacaaaatttgaacaatgttgggagagtattgaatgtgtaggtcacgatgagggtactccttaggatatagcatgactgttcgacctacctggtcatggtgatggtactcacctcaggatggtacccctggggactctctcttttgctcctcatgtaatgtgtaatgcttagcactaggtagtcttcatagagagaagacgtattgcactaaccatatcgtgtttagatggaatgtgatacttggagatgagactgtaggggtgaggggtatacccctagactaatttataacctttgagtagatgactcacctttaggggagaggtgattgtttaacctacaatggggtatttgtccattcctctccacgaggtagttactttacccacgctagaagagtgactgctagacttacccattggagtttgctggtaaaattactccatgggggtagtttctttatctcccacacgcatagaatatactcatggcatgttattactcactttcatctcatatactcaaaatttcatgttggtgaatattgattttacatattcacattaattcagtcttgacattcttgtgccacgtgtgtgatcatacttgtcacgtcatccttatcaaaattttggtaaacaactacattaatttagagtcttatgaaaatagtgtaaaatacatgtaaaagtttatatcgaattcctatttatcaaaatttttacttttggttctcacgagttgataatcattaacaaataagagtataaatatttctgtgaaaataatcccatttatgttaaaactacttttgatttgtaaaattatttggaaagcttaaaattcataattttaatatttcatctttttatggcacatttactacataggatttagaatcagaataaattaatagagaaatataataaaataaatgaagaataaccgaaatcaatatttgtaataagttgtttactaaaattatttggaaataaaataataataatttatcttgtttactttatgagaaaatataatgaaacgcttaaattgactaaattatccttttgagttaaactatagtaggcggtagttattttgtaagacatattttaaaggacaaaattgtcattatatatttaatattaaaaaataaaataaaaatcattacctttaaatgtcattccttaaaaaaaattggtgggggaaaatattccctttcttttatgccttatttaatcaagttttccatctcttaattttataaagtaaacaaatgtgaaggaatgactaccttactattaattaaaatttgtgttttttaataagttgggg

SEQ ID NO: 296331 - DNA, 2754 bp, Cannabis indica
gacgagggaaaaaagcagttacaaagttaatataaatacaaatgaaagagaaagaatagcaaggggtaaattatctgtcttcaatgagagaattatttgacttgggacgagaaaaactttccaacatactttcaattacttagtttgaataggaacgatcatttgtagaaactcttctcttcccttataggtaataattagagaagaaaaacagggttgaaaagaagcttaactaaactaagtaaattgcacgaaatcctatgaactcagtcatggctaataagccaggatcaaggagacaaatcattttgttgaaagttaaaaagcaaaactgaagaaagcatttatggacatatactttatcttgacattctctgagaacaatgaagccaataatgttcagacataaaacaatcagataaaaacttgcatgtcatactattaaactcaaaagaatcaggtaaaggactaaaggcagatttcaatacatacgttccagattgagaataaatcttttctgataaattgtatctaattcgggatatttttcgaattttattcatttttccaaattagcatcatggtatttaaacttgatattttttatttttaataaaaacttaaaatgttttgtttagcccaaatagcactctcttcgaatttcaaatatatttaattgaatttcccaaaggttttgtgtgtttaattctaggaaaatatactacaagaaagatttacagttatttttaaaaaaaaaactttctgcaagagcaagtagaattaattcacaagctagtttctatcttatgtacggctaccttttctcatatcatcatctcaataaaagaaactagattagaactcttcaatttgttgcaggtattaaaagaaaaatttatgttgactattcaaaataccatttatgcaacagcaaaacatatcagtaaacataagaaactagaagctaagaaaataagtcatatatggttcatacctgacttggaatttctcgtccataaaagggagatgtactagaaacattgagcttaaaaccaggaacagcatgaacataaattgagaaaagtttctcatgcccctgaaaaaatttctcccacaatggcagcaatggcaatggccctcttgtcaaaaacataaatgccactttaggaactctattgtagggaaactcttctttggttggcaccattgaagctctccaaaatagctcatcatcggacatataatgtgttatgttcttcggtctaacaaacgaattcatgctcaaacaatcctcaaccttgttacaatccttcacaacagtacagttaccattcttaacagcctcaggagcatcagcagagaaatgattgataaaagaataaatctctgcctttgaaacaacatgctgactgaaatgcgaggtagttactaatccgaaaaccacaccagctacgaaaacaaccaaaaatgagagaatttgcacgagtttaagtaaacccatgtgcttctcactgtcatccttgtctctacttctcggcattcctttcatcctaatgtttctaataccttctttcactatttttctataccaaatatcacaatacttcagtcccttaatcataaaatttaaactcgttcaactgagacaaaagcaaatacatgaatatttattatctaatcaaaagcttcacaatttcaggaaaatattaaataaatgaatgaaatttaaacaaacccaaataataaatcctgaaactcaagatatcatccattaaagcaacccaaaataacaacaataaatatattatatggaatttttacctcaaatgacgcggctgaacattcaaatggtcccttttcggctttttaaatattatttccgaattcaatgggcagaaagataaatgaattggctatcggggatgaaattaaatacaaaatttgaaagcaaaaaacgaatggatcacgatgtattctctccctgggtgtaggttggaggtaggtgtaggaaagagatggagagagaaaaaaacgtgcccagaaaacaaaaataatatataaataaataaataagttgtttcgtgcgaatgaaataattaatcagattgaggggtgcgaaggtcggatcaggaggtggggttctccattccaaaccaaaactctgtttagagagaaagagaagatgaatgaaagaaacatagagttgacatagaaaattggaaggaatgtaatgtgagtttaattaaaaagggtcaaatagaattgaggattggccgttttgaagtggaaacggaaacggttatggtttagaataagtagtttcccaatcaaacccccaaaacactcgtacaatttgccaaactttgcttttttatttatattttattttattttacttctgattttttagatttaaaatttgaaatatcaatttataaaagtaaataaaaaaacttgtattttgtacttacgtggcggtcgaggatctgttttcgcacattaagtaattcatttcttgaataaaatggatgcagtcaagtcaacctccaccttgctatctttttcattcatacaaataaaaatacaaaaataaagaatacaatttgagtttgaataactcgagcactacccgacttatatttttaaatggctcagtagaagtgttcgcagtgcgggtggtacggtttttaatcattttttcaaaccaacccgcacatgcggcttttctaattttccaaaccgcacccgcactgc

SEQ ID NO: 296332 - DNA, 1765 bp, Cannabis indica
tttttttttttattgttgaatagtttgtgtgggtgagtttagtatttaaagatcttgataaagtttggtattttggctacaacttctcaccattttattatcccctttgagcgcaagggtttggttacagtaatgaaagtatgaaactgtgaacctgtttacatggtcttatgggatttgtttcttactttttttactggtcataaataatcatggatgacactgacatttgaattgtatgccttgccacttttgaatgcaggaaatgaatactctttataggttttggtgttatttccttagagataattttgccccttcaatgtataacgagttccagaaatatgcgagagaagatgctgctgcaagctataattatggaatagaatgccttttcaggttctataggtatgtgcaatgcactaaagatcttctagtcttattctttattctcataatcttagtttctagattttcgcttggtttatattcaatagagaagtttaatgtgcttgggcagggtgagtacttcaaattatgaattatggagattggagattaattgaaatttttgttattgtagttatggtttggaaaaggaatttaaggaggacttatataaggacttcgaacagcttgcacttgagttttaccaaaaaggcaatctttacggccttgaaaaatattggtaactattttcttgtacattttataattattattgttatcatttagctcgattgtttttttttgcttgatttaactgtagctcagaaaaatagtggtataagaatagagttgaaaatataagggagaaaacgtacatgaggggatgagttaaattaggagaaaattagttgggtgcaaagttatgattttatttttctttgtattgaagtacaagaagatgaaaattggataggataattattcagtttttaagtgagcttaagttattctgtcctaggggattatttaggttggtggattaatttttttaataacaaaattgcatgataaacttcatctaattctatccgatcatactctctcatgacctatgaggagtgtcttactcctcaaacaagctcacacgttcaataacttgagcaattatcaagtttgctattatatgaatatttctgacattgaaatatgtctgaatttgagaagttgataagttgactactggttaattccagacaataaattgataagggtgactgtttttaagagtcacttattgtatggcagggcgtttcatcattatcgcgaacaacgtgaccataaagagcctctagagaagcatccagaattggatagactgcttcgggaagagtaccgttgcttgggggattttcgcgccaaggagcgagctgctgctaccttaaaagggaacaatcattaagctagttataatgcctacctgagtggcattagaaatggtgaaatgataatcaattttgaatgacagattcagccagcttattaaagatttttggagttgcacggccaatttttgatttggaggcaaagaaagagaaaagaagagttgggttttcatttgtataatattttgttgctgggattattttacacacctctgtgagagggctgctgactgctgagtttttgttgttgaaggttttcctttgctcgtcggtatgtcttttgtacggagtttgtctgagcttggagaggaggtgcctgtcattttactctctcacatttgatccttctttggattgtaacatgtatatatcaa

SEQ ID NO: 296333 - DNA, 2084 bp, Cannabis indica
caggatgctgcccaccatttgctacccgagccatcaataactccctgcccttggaatatgactccctcaagtttggtgaaatcaagccattgccgtgcaaactttggattccagttctttggctcatctggtgccacaattgttccatcaatctgcagagtagtataacaagtcattgtcaccatcacaactgtgagaataagacacaggagaacggttgcaaagatttcgtatcatagtctgttgagatcattacaggtggttttacctggataactaacttttctgcacatggcccttgaaatttcgttgcattgacaagataacggcgatcttgaggtactaaaagaaccgctctcgatgttgaacaggcggtatcccaagccttttggaaagcctaattcaatcacccaatatagaagaataaatataaatgattctttataatgaataatgatacttttgacatcatccagtatcttctcaccagtctacttagactacttagcagttaagtgcatttggttatataaaacaaaatatgaaaagtacagttagttatacaatgtgttgttgttcagcatcacctgtgtatcatcagcaatgccgtctccaactgcgccaaagctatctacattcacaagaatcttgctaccacgaacgcttgtccacgaagggatatcaaagaaatcaaaatcgttttcttcctcaattatgtccaggctttctagctcatcatcaaacatgggaatgttgtcattatacagcagcatgttcccagcagcaaccgcaaccgttatcattaacaaagaaagaaaagaaagcttaaataaattatccatgatgctttgttggtagattagttttgattattgatttgtataaaattccaatcatgaaacaacaatgtgctataatttatatacatatgatgcatattaatcacttttggaaatgaagtgaattaaagacaatactatatggctcttggcttgaaagtaaacaaaaatattgttacatttttaacatgtccatacttaaagtacaagatttttttcttcttttctttgagctgattgctttactcctcaactagctagtgaaaccaaacaaaaatgctcagcaatagttttaatggcatgggctgtatttgtactatttcactttcccccaagagaaacaatgcaagttgctttggttctcaatgggttgggtttaaatgtcctatcttcattataagagaagtgacagcaacgtagacttggtaactttcaaagtaaagcactggctttgcttgaattttatttttgagattacccatttgaagataattgtttctagagggaagtctacagtctttgtactaaaaatggcctttgttttttacttttttttgaggtttttgttggaatggtttagtgtccatgtacaagttttgggtagagaatagccaaaacttgaccatgcatttgtggaactgctggagttcatttttttttttagtttgttctggttttatgaatatccatttcttagctggtagattggtacatattgtatcacttttacttcagacacttctgtttgtgatatcatatgttgatctctccttgacttgaataattatgaaaaataagggtttctttctatggatttatcagatagtaggaaagcttggctagtagaaattttttgaatctcaatctttatcctaatttttttttaagaacccctcatagcaatacaatatatggtttttttttttggtcaagtgaaactttattgaaaacaaactaagcaaacttagtgaccacaaagggggccactttccttaaacaacgagaggaacaaagtttcttcattctagcccaacgagcgagggcatcagccacaagattcacagatcttggaatagccacaacactcatagacccaaactccttgaaacaattaacacaatctcgaaacaaaggatatgatccccactcaaacggaacatagcctaccttaaagtctctcgccaccagagcagagaaatacaaaatttacatgttacaaattatttataagatctattgacaatt

SEQ ID NO: 296334 - DNA, 3297 bp, Cannabis indica
gtaacgatcacctagtatatatatatatatatttgtgattgtgtaatgatttttgttttaattttaaaaattttgatttagttatttccaattccaccattttacataaacacatcgacaataatcgtaataaaatacataaatagctatctaattaacaaatttttttaaaaaaaacaaatactagaatacaatattattttttatattttatgatataaaatttatttagcaaaaatcctctcatacgttttgcacctgaggctacctaaataaaatattaaattgtattttatatatataaatattttttattaatttagtcattttggtcaaaatatctgacaacttttactttatttttattgatataatatgttggatcaaaatcttacaagaaaaaaacttaaaaaattcgtaattatagttggtgttgcttttcatgtggcaatatgattctctagtcgcgcgtgtctttcacactgctggctggttctatttttgtccaattttgtatcttaaaagtattttttgtaaataataaactttaaaattagtatttttgtaaatattaaatagtataaatgtttatttttagtataaatatttatttaaagtaatattaacccaaaatagaaaaaacccctatatattccgtgatgtaccctgaccgttacatggagaagttatgtgatctgaggattgggattcatataggggtatttaaaaaaaaaaataggtaactggtttactttttgtaataaaaaattataaaacttaaaaaagtaaaactgacatgatcattcatcaatcatcacactcaactgtccttctctcttcttctaccttcttttttctaaaaaaaaaaataaaaaaatcattcatcacattaataactgcaaccattcaagattacatcactaaaatcagaagaaatatcgttacttctgataacacgatcaacaacaaaataagatactctagccaagtaatgagcagcactattcgcaaatcgtctaataaaaaaacagaaacatcattcaacccctctaacaaggttttacatttaccaatatcagtcccaaagtaagataacatggaaagagggctatggattgcctgcataacaatgagactatatgtttcaacaataaacccctgccaagattttctctttatccagctcaaagtttctctaacccccatagcctcagccatttcaggagttatttggcatggacgacaataagaaattgcctccaccaaagccccatctacattccgtgcaacacaaacgaagctataagtagctgatactgaaaacaaggttgcatcgatgtttatcttcaaagcacctactgctggtttcagccatcagtcaaaaatgttgcacgagggacttggtttctatcttgtgcccgggcctaatggtccaaataatattgagccaaaatagacaccccagaaaccattggctcttttttcatccagaccaattcgtaccttgtcttccaaatagcccaacaggtcattgcaatgaccttcttctgctccacatctaacacttgcagcaagttatcaagccaacccaagaacgtagccacattcacattaaccacatccattttcgtttgctcccaacatgctttagcaaaagaacaattaactaagcagtgatagattgtttctctccctatcggacacagtggacaatgatcaacaatttcaacatgtttagaacgcaactgtgaagtagcttgcaggcaatttgctgctgcacgccacaaaaggtctttaactttcggaggcattcaaattttccatagtttgctccaaaaaccaacactaacaagctgcaattcatcttctttgttctcttgcaagtatctataagtgcttttaacagagtgatggtctgaagtttccaaccgccaataccaaacatcactatatcgacttgaatttagcggaatgcttacaactaactcaacatcccgatcattaagcaaatcacaaaccaagtctatatctcaagccatctgtctaggcaacatcaatgttgtgacttgctgcttaacaagggcaggatgtgtagatgtaatctttggattttcctcatttggcaaccaagggtctagcaaaatactgattgtggaaccatccttgattctacaccgagctccttttcgaactacatcttgagccttaagtatactacaccacacaaaacttggttgcaacccaattttgcagtcaaaaagtcacctttaggatagtgtagtgtgccttaaaaattctttccaccaaagagtcaagttgacacaggagccgccagccttctttgcttagcaaactgatattataatctctaagacttctaaaccccatacctcccttcaatttatgtattttcaagcgatctcatcttttccaatgtatgcctttactgttcttagaagatgattgccaccaaaaattacacatcaattgctctatctcattacatatctcctcagttaacaagaaaacattcatttcatagctagggagtgattgagctactgttttgattaacaatttcttgcctgctttagagagcaatttaccttcccaactctgaaccttcttcctcaatttctcctttgaaaaaccaagcaaagttatcttgtttctacccataatattcggcagccccaagtaggtactattatccctagctttactaatccccatatttgagcagattctagcacgctctgcagtacttgtatttgtgctgaaaaaaatgggtgacttgtgcacattaatttgctgatccgaagccagctgaaaccacttcagcaaatccatgacattgctagcagaatcttcattagccttacaaaatacatatgtatcatctgcaaagaacatgtgtgaaacgattggtgcaccccgagcaaccttacatccacgaattttccccaatcgctcatagcctttaatcaattccgagaggccttctgcacacagaatgaaaagataaggtgataatggatcgccttgtcacaatcctctagctgggataatcgacccaatctcttgaccacctgtgataattttatacaagaccgaagtaacacacttcatcaccaacatatttcaatgctcactaaaacccatattccttaacatggcttgtaacaatccccattcgatgcgatcatacgccttgctcatatctatttttattgccataaaactatccttcccgaaacctttatctttaggtaatgcataattgttggaaattatttt

SEQ ID NO: 296335 - DNA, 2096 bp, Cannabis indica
cggtccccgagctcctcactcattctgttcataacagcaaattccatctaaagagagttgagagagcgagaaagcccgattacccacatcaatcggtttcttttgcagatcaagcttatatgggactaaagctcaaagatttaatggctagaggtatttcgatcctatattcatatagtgtatatgtttatttattccgcatgttatatacacatacatatatttgatattatacatatatatgtctaacataaacctcattaaaaggcataagaagggtatgaaaggtttcttgggactcaaagctaatatggctaaggtctatgatagaattgagtggaatttgtatgtggaatgatgagaaggttgggctttccagaattatgggtttcgttggtgtaccattatatttcctcagtttgatattctattaatgttagtggtaatattgtggggaatattttgccatcctgaggccttcgtcagggtaatctgctgtctccattcttgttcctgatttgtgcagaagatctttcatctatcgttaagaatgagtgttgtgttggaagtattcagggttttccttgtgggagaagagggcatgttatttctcacctattgtttgttaatgatagtttctttttttctttttttggagcctctcatgacagttgtgctcagttttgagaaattttagggtggtacgagtgagcttcaggtcaattggttaacttatctaagtcttctgagtgtttctctcctggtatctctagagggatggaggatgtgttggctaaagttctgggagttcctagagtttcttatcgtgagaagtatctgggtcttccatgatttgttggtcatagtaaatctagtttgttccaatcaattaaagatcaggtttggaacaaattatttagttggaaggctaaatctttctctcttgggggtcaggaagttctccttaaatatgttaattcaagctatcccaacttataccatgaatctcttcacactccggttgaattgattgaagaacttcataagtggtgtgctcaattttagtggggcgaggatgatgataataggaagatgtattgatgcacctaggtcgcactgtgaacattctgtctcgagttaggattccaaaaccttcaacttccctatcttactctttttgaggccatcttaatgtgtctttggttagtgacctcaagcttgagaatggtgagtggaatagagatcttattgatgagattttttaaattgatgaggcccaacagattatggttatcccccagtctcaaaaacgtttggatagattaatctggcactacaattcttcaagtggttacactatcaagagtaggtattggaatgctgtttgattattaagaagatactaagttgattcatcctcaggtccttcttcttggtggaactatttatgtagcatctctatccctcctaaggtaaatatcttaatttggagagcttgccttgattggttccatacatctcataatttgaaattgcataaggtccctacaaattcactttgttctatgtgtggtgttgagattaagacttttttccatgcactttggggttactttagtctctatctattgtgacgctagttgattttgtgattccttcatcttctttgccaagaactaacctttattccttctttaggtagcatgaggttatcctttcaaaggaataaatggaaaaacttttggttctattgatgcgcatacggtatcgttgtaatcattgggtccataattaaaagtaacttaatacgaaaggggttcttggtgttgcagaaaagggcaaaaggaaagctaaagatattgaggatgatgcctccgaaaatgctgcttcttcgagttcaattttgagagctagaatcgaaattgaaccggcaattgagacaattaaagaacaactgagcagacatattcttctatgttctcactgtggagagaagggacatttgaaagaaagatgtcccagacttctgaaccattagaacgaaggtaacgcttttgtttttgaatcatgtgttttagagaatgacaaatccattt

SEQ ID NO: 296336 - DNA, 6038 bp, Cannabis indica
ctaattcttttacacctaatatacagctaatactctaacaggtttgaagctaacaaagcaccgaagataggtttccaagcaccgatcgaccacctccatttgcccatcggtttgagggtgataagttgcgctatgcttcaaggtagtaccttgcaaacggaaaaattccttccaaaacaaactcaaaaaaatcttgtcccggtccgacaaaatggagcaagggaacccgtgaagcttcaccacttctttcacaaatgctactgccacagtaatagccaagaaaggatggcagagaggaataaagtgaccatattaggtgagacagtccacaaccacaaaaattgaatcaaacccattgaagagaggcaagccttctatgaaatccatagaaatgtcattcccatacttgctccaaaatggggagaggttgtagcagccctgccagaaattgagccaagtatttggtttgctgagacactgaaccttcggcaacaaatttctggacattcttgtgcattccgagccaacaaaactcagttgctaacctttggaaagttttaaagacatttgaatggccccccactttgctgctgtgatattcatttaataacatggaaatggagggtaaacaggctggtagcaccaaacaacctcagaatctgaggcagccatgagtcggagagaaatctccaccatcttgacctctagagggctccgtgataatcttagccaaggcagggtcagcggcaacttgagcttgtaaatcgggaatggacagcacattaggaacagaaatagcaaccatggagacttaagctgaaacctacgagagagcgtcggcaaatctattttcggaccctggtttgtactaaatatcgaaatcataacccaaaagcttagtgagccactccgggtgttccatagagaccatctatttgctccaccaaatacttcaaactacgttgatcggttcgaactaaaaactttctgccaagtagatatgggcgccatttttcgattgcaaggacaatggccatcaactccctctcatacactgatttcgatcgagcccgaggagacaaggtgcggctaaaataggcaaggggtctttcatgtcgcataagaaccgcacccaatcccatgccaaaagcatccgcttctaggacaaagagagctaagaagtctggcaaggctaagacaggaactgtgcacattgcttgcttcaactagtcaaagccactttgagcttctagggaccatacgaaggcatctttcttgagctagtcagtcataggacaagctatgcttccatacccttgaaaaaactttcgatagtagtcggtgggacccaaaaaatcccctcaattctttgatggtggatggaactggccactgaagcattgcttatattttacgtgggtcaactggcaccccattagccgagatcacatggcccaaatattcaacttggggctgagcgaaaatacacttcttccggttagcatacaattgatgttgttggagtcattcgagtaccattctgaggtgagtaatatgggttgttaagatcgggctctacacaagaatatcgtcaaaaaaggctaatacacaagaaccacgaaaatcacaaaatacctcattcatgagagctaggaaagtggttggggcgttgaggccaaacggcataatcaaaaattcataatgcccatgtgtttggaaaatcatattttcgatatcatttagagccattcaaatctagtgataactcgacttcaaatctagctttgagaaaatagtggcaccatgtagctcattgagcaactcatcaatgactagaatgagaaatttatcgttattttttaccaataaaatgggcctggggaaagggcatgtactcagttgtgctatccccactcgaagcattccgcagaccatcttttcaatctcagctttctaaatttgagcatatcaataagggcggactgagatgggttcggtacttggtttcaatgagatggtgtggccacgggaccgctgcggaggaagtcatagcggcaactcaaacacatcttggtatcggtctaaaagttgattgataggggcgagaattggtggttgttcacagccctctttgaaggtcaacgagccaaactaaacccaataagccttagcccccttctccatcattagcatcatagccttcaaggatatcagagacatacacaagctggggtctccttataaagttacccacaaacccgccacctcaaattccataaacatcgttttccaaatgacgtgcatattgcccaacatctcaagccatttaatacccaatataacatctgctccgcccagttcaagtggaaagaaatcagttattacccgaatggcacctaatcaagcatcacgttagcacaaattccttccgttcggacctctccacctgttccgagaaatatgccatagaaagtggttgccggtatcggaatgcccacagtcgtgatgacctccattgaaacaaagttatgggtggctccactatctatcagcatcgttattggttgattctcaatatgtcctgctaatttcatcgttttcgtcgttgagattctgatgagagagtttagtgatagcgtagcaagcgtcactttcgtggccactatttcataggactcaggtgatgtgagtgagtcttcttctagtgaattggactcttcttcgtcagtagtgagttttttggagtaatttctgcttacattccctgcttggatgaaactttttgtcacacttgaagcaaaggcctcgagacctcttttcgtgatactcagcctctaagagtcgtttgtaaggggccattgtcatcgtacaactactaccagtcttggaagttgtagagaccatggatcctgatgaagaagtgaaggatcgttgttgttggcctatttgggtgtttctcgaaatgaagaagtttgagtagaactcggttggagataatggaccgaaattgggtttagggttgtgttgtttcaccattggcctgtgtgcgtcatgtgatggccctcttccactcgttgggtcgtttccatcagttgggccaaacccttaggctgaagaatatgcagggcaattttaatgtcatcctggagccccttaacaaagttcccttcaaggatatggttgggtacatcaggtacccgcgatgctagcatttcccaattaacctaatactcccgaattgaatcagcttgaaacactgacaaaatctcttcttatagagaccctgccgacagtgctcgacattggaggatcatttgcctaagcatcgcccaggaatcggacgacgttgattctcccaatggaatcacgacaaggcatcaccgtcaagtccaatgatagttgtgtccaacatcattgatttcgtcattttcgagagaaggaaataccactcgacacgataaatcaactcgtctggactttcgccattgaacaacagaatctccattcgaggtggccgaaagtcgtggccattctaaaaggagtcgagctgaatcggaggcgcggtcaaaatctagagtggcggtatcgccatgtttgttgggaacttgggagtttgctgagctccaacgccgctgggttcgccaatcaaagacccgcttccctcgacggaatgtcgttgttgatctgcattagccgcggttgcatcaagtgtgggattccccggtggtagaatgagttgtgagatctgattcaccaccgattccatctgcttggcaacaatttgctcaatgttgctctgaatctcgccttgaagcttctccaacccctggttcactttttggacatcatggcaaaactctgaaacttccgcttctaccctctctttaataatttcagccatagcatctttctttggttccatggagacgatgctctgataccaattgattggtttcaacctatcgattcaacagtaacagagaataaaagaagaaagaagaagatgatgaagaaaaaaaatgctagtatcagacaatttcccaagtatttgagagcctaggctctccttacaattcaacaaaaccttgtctaaaccccccacaaacactttcacacagtattcatattccttacccctagggtaataccgtgaggctaagtcacacccatacacaactcacataaaaacttacacaaccaactaattttgtgtggcagccccttccttaagtttcctacacctttttctagcataaacataaatttttggtggcttatcaaagtttttggggttcttttgcagttttttaaaatctaaaacattgaaattgaatagaattcaatgtttagctcaactgattcttaaaaattatgattttcattaacgaaaagaaaataatttgtctcgatgaaactcgataggaattcattgggactcctcttgcagcattttccatgtttcttttgccattattgtgcccataatttgtggaaaaaaaaaattgtctaccatagcttgctgcaagttatacaatgcgcgagaatctttttgttgattatcctctacggccttcttttgattttctaagagagacaaagtgtcttctagaatagtgactccctcttcaacaattttccattctacagattttgtgatctaaaataggttcttattttagtggaccaaaaattatagatttttccatgaaaaatttgaagaggtaaagaagtgcggttggattcgaaacttatggtgattgatagcaaagattacgtccagtgatgatcgaattgagttctgatacctctaatgatttatgaattggaatagagtaaaatagttataaattgtatttagtttatggtgtgagttagtatatagtgtatggggtgtaattgttatagtgtagttatgtggatgatgagttgatagtatagtagatgatgggtagtagaataggtatggtgtggtgtgtgtatatatttatagataaaatgatgttgatgtgttagataatataggggtgtgtttgatgggacacaaagtagaggtttaatttgaagttataatacgagagaggagtagaagataataagaatttcttttttattgatttattttggctagttttttggttacaaattggtatatataggagttaaggccggtggaatataaccgactataactctttgacatatatataagttgtctctacattgttctagcttatttacaaatctctgttagtaagctcttaaatgtttctagatttatctagtctactttcttaagtaaataatatagctagaaaaatttagaaagttctagaaatgtgtatcagttctaataggttggaatgaaggagactacaaaatcatatttggtgttggtggaacactaaatttagtgtataaaagcacaatcaggaaagctactagcttgtgaagagatacaataaccaaataagttttaatcatactaaccgacattcctctctgcatcaattgttgtttcttgctattcatcttgaaaaacctacaccagagaaaatttaatcttactaaatgcacagttgagtaaaaagaagataaaagtattcttccaacctggatcttaagcctttgagtaaatcttcagctttagaatgctcgttagaataaggcagtgcccatagtatcaacacatcaaagtgccactccataaaccagtttcgctgaacattgagccacacatacaaatagcttaagaaaataaaaactaattaataaagtaactatgtggacaaacattcagcaactcacctgatctgtaaggcaacttgctaaaatctttaaatggtccttaaaaacatcaatttcaccacgaacatacactcgcaataaaaaacccactgcattcaagtaaacctaccacagaagagattaaaaaacactaccttgttgtttcatatatactagtaaaaagctacgtgcggggcacagatactaaattttatgctaatttttttctatattattttaaagtgatacaatta

SEQ ID NO: 296337 - DNA, 2656 bp, Cannabis indica
cacgatgggttaataacacgtgtaaaacaacagttacatgcatgagatcaaactcatattattctctcctatctcatccaccgtcaaaatcaaatatatatacatatacaaactttcaagttcatatatataactgtaactgttaaattatatacgtatatatttacattactacaaagatcgaaacttaaaaagaaaaagaaagaaaatggccgatttacttgacgaacacggcaacccaatcctcctcaccgacgaacaaggcaaccctgttcgtttaacagacgagcacggcaatcctgttcacctcaccggcgttgcaacatcacgcgccgccgccaccgaagttggtactggaaaaggcacgccctcaactggtccgtggaatccacgcgccaccacaggttaccaggccacgaaaaccgatacttcgtggccacacgccaccgccgggacagaacacctggctaacgacccgtggagcggaacgggtggaacgggtaccggcactactgggacgacaacgacgacgggacacctcggaacggagccgtggccccacaccgctaccggtgggaccggacaccatatggaacaccacaaaggaggaatgggactgcatgatggcggtactggaatggaacaacacgcgccccttggtagagtgggaatgcaatgttcagaacaccacgcaccttttaaaagtagtgatgcgtgggttcacgacggagccaatcccgcgggagctactgacactcgcgggattggctttcagccctcgaaagttgattcggagcggccaaagggcgaaactaccaccggcataggccgctccggcagctcaagttctagctcggtaagattgctaataattcatccttaattaaccttttactattttatacaacatatacatatataataatttttctttaatacaacataatattaatattaatgtacaattaattaagattttcatttcgtattataatttgtgtttggtgtaactgctacaaaaaaattgtcacggaactttaattttttgttcatataacaaaattgctatcaacatataatataaaaaattataatttgaatcactaaattttttatttacattttttaatattttagtattaaaaaattaaaataataatataatataattatatatattaaaaatgaatgattaatatatataataattataaaatgggtggatgcagtcagaggatgatggagctggagggagaaggaagaagaaaggtttaggaacaaaaataaaagagaaacttactggaaaacacaaggacgaaccaactgctactactcatgatcctactcctcttcacgagaagaaaactgttatggaaaagatcaaggaaaagctacctggccaccattctcatccccagcaaaattaattaattaatagtttattactatctatatatatgatcattaagttaaatgtatttgctttttattttataataattattagtcttaagcttatagtactatatgatgtgaaaaatgtcatcattgttttatgttttgtttattttgtcggttcggattttttgttttttttttttggtgttattttgtagtatgaactaataattaatatatatgttatataataaaaatgtattagtttgtttttgaaattagttattgattttttatacgagcattattaagatttaacaaaaactacatatacaattaagagcgtttcttatttgtataagcatagatatatatatatgttatattttgaactgataatgagatacaagtgatgatggaattttttatttttgttgtgattaataattccttaatgaaattttttcaactgatatttaatttatttaccgaagaaatatagcataaacttaacaagaaaataaaaataagggaggagtgataactaaccacttgtgcaagtaaagattaagtgactagctagatcacttcacaataatttcacaccattctccaattttgaacaagtctagacagtgtatgtaacactatttgattgtggtaatttactatacaaagtcttgtgagttaaaaatcctagctctcttgtaagtccttggagcaatattgcttcctttatgtcctctgtggcagccactgtttcatacatctaccttgagttgtaaacacatatatattcttgtgtcaacttcacactcatttttgcttcaagatttgcaaacaagtcccaatttaaagagcatattttacataccttataatgtctttgtcaaaagctattatgatacatgtttgtatcttaaaggagatgacatcacatacctctcctattgtatgtggatgacatgttactgataagcaagagaaggcaaagtttgaaaactaagagaatctatatattgaagatagctgcaactgaaattcttggaacgaacatcaaaagaaacagagaaaagggggaactcatactgcatgagacagattacattgaaaaaattcattgataaattctctatgaaagcctaccaagcaaccaatcaccagtcaacacaggcaggaccggtcctgaaaatttatgggcctaaggcaaatttaatgtaaagcccgcttagttaatttggaaattagcagttgttta

SEQ ID NO: 296338 - DNA, 1746 bp, Cannabis indica
atacatcaagcttgcgacatataataagagagagtctagtggactagtaacaatctgaaatgattgttgaaactacgtacaaaaaccttgtgttattttttattttctgtactgtttattttttggtttcttctggaattacaaaagttattttttgtaattacggaaaactgttttcagtaataattttattatttcgcgtttaattaaataataatactgataatattaaaatacggaatttcataattgaagggtagaggggagctagagcaaatacatgagttgatcacaccaatgacgtatggcggctacttgctttgactgtcactcagatgtgaggcggcggctacacataaatgttaattagggcaatatggacaaaactaatttatttatttaattaatatttcaaacctgttatccataaaataaggccgcgtaggtaactaccattcgaaagcatttcttattaagtcgtctaccttgttgcgctagcctttacgcaactaataattgatccttccttgcttatttagataaagcttaattcttgaataaaatattttatatatgtgtatagcttatttgacttagaaacgatcaagatgttgatttaaaatacaaggatttgtaatttattcacatacgacaaaaacaagagatcttttttctcttcttttcttcttttctggtcaaaagaaaataaacaagagatcttatgcattgtatactgaattggacattaatatagcataatttatacccacaaactgagccatgataatcccctgtaaatatattggatataacagatcgaagaatacaacatgacacaaatctatgttctcaagaagaacaattcacatcacacgtggtatggatataccttttggaacaaacttccaaaagttttattcaaatcataatcttaagcttaactaagccataacagctttataattacactccttgagttttctcctcaataatggagctcagagggtgctggtgctcatcttcactaagctcattaccacaatcgacaaatgtataacccacttgcatagaaccctgttgaaatcctcttccatcagtatctaaaggcttaaatatagtgttaaagtccaagtctaagcctccattgctgcactgatccacaattcttgctgttatggttgccccagttcccacattccttagctgcaaacacattcaaatacaccaaatcaaacaaaattacacaacaaaaatcaaaaagggaaaaaggatcgtagatcatagatcatatatacattatatacatatagtcataccctcaaacactttccacaagagtcacggcccctaggtccggatggtccacaaaaggcagtccagccatatttgctgcgccatgagaaaggcttattggcatcccaagtggagcaaaaagcactaacagccattaagtcccagttgttctctgctggattgtagaaatggtatgttgctcttacaacagtttcaccgctcggtggtgttgggccaccccaacaattgctctggcacccagcttggggtgaacagtaatcgaaggtgttgccacaccacccgtgctggctgcagcacagcccgttcgggcatttaacgccgcccgcttggcgtccgcattgctcagcccttgctccaccgatggccaccactactaaaaccaaagccaataccaatatgctaagcttacccattgttttttatttttttttt

SEQ ID NO: 296339 - DNA, 4571 bp, Cannabis indica
aatcaatacgttaagatcgaagggtttggtgcctcgaaaagttattattcgatatacttatttgtgatacgttatttttagtagattattattgagttttgtactaatgtaattactttctagtaataaaaaactattttaccaaataataatataaataatttaagtcatcaaaaataaaagcgcgtttacatcaaaaaaaaatataatatttgagacaaacaagccaaaaataaatataaaaactaacttttaatatacaaaaacacaagtaatgcataattaattttttaatcatacaaataaattataattattcaaaaaaaaaaacataaaaataaaatcatctagaaggttttgttgtatatatatatgtcattgaattgcgtactacacatctagaattccaaaagaataatattttgattttgtactatagtttggtttggcaatgtattgattttgacctttcaacatttcaatcaaattgctttacacaatcgattaccaactcagaaagaaatattttataagaaaataaaatgtgattttaagaggttataattaaattattaattaattaattaattaattattagacagaaggaagaagtcaagaagtaggccactctattcaacattctaacataaatgacaagtactcttaactaaagttttgtcattgaaaaaaatatatattgttactataaaaaaattaaactaagatattatatataaattaattaattatttatttgcatataagtacaaaaagagtagttggtggaaggaaaagtagtactatttatatatgttatgatttgaatgaggtctaatctaagccttcaaatataagtaattaaatataagccacatatctcaaccatttcaccatctcttcatctagggtttttattattttttttatattcttctatttatttttctttaaatgtgacacaaaaatttgaagagtaagaatttttgtatagagagaattagaagaaaaaacaacaacaagaagaagatggcatggaattgcataatccctagttgttcaaagggtaaatacaacaataaggcagaatctaatacaagagaggtttcgaagaaatcttctttccaaaggctatctttttcagatttaagtgatccaaactcgcttatgttggctgatgatttatcgaattctctcattagctcaaatcttcatgttttttcattggctgagttgagagacataactaataatttttcgtggagcaatttgctcggggaaggtggttttggacctgtctacaaaggttttttcgacgaaaagtttaagcatggtttggagcctcaatctgttgctgttaaactactagacttggatggattgcaaggatatagagaatggctggttagtatagtcctttttacctcaaattgcattatgttaaaaaatgaaaaataaataaataaataaaatagtattaatttatttaattatgtgtaaatattatttgatatatatatattttcaattctaggctgaaattatctttcttgggcaactaaggcatcaaaatcttgttaaattgattggatattgttgtgaagaagaacataggcttcttgtgtatgattacatgccaagaaaaagcttagaagatcaactcttcagaagtgagtatacaattattcatcacttatttttgcaattattataaagttttttttagcataaatacccttgttgtttaaattgtttagcaatatggtccctataatcttttcttccaatatagtccataaattttaaaaattataacaacttaattattattgcatgcatagaatatcatctcttcataagggagtaattattcatcacttgttttgctattattattactataagtttttaacataaatacccttatcattaaatttttttgcaatctaatccctagaaaaagaaatatttcaatatagtccctaaattttaaaaatcataccaatattattattttaatttaattttatcattttataacataatttttgttcaaattttcagggtactctactactatgccatggtcaactagaatgaaaatagctcatggagcagccaaaggcctagcttttcttcatgaaacagatcaacctgtcatctttagagatttcaaaacttcaaacattttattagatgctgtaagttttattttattttattatttttcaatgcattaaaaacatgtacaaaaattagtaatatatttttttaataattgataatttcaggactatacagcaaaactttcagattttggattagcaaaagatgggccagaaggagaagatacacatgttagtactacacatatagtaggcactaaaggatatgctgctcctgaatacatcatgactggtatatagttcatcaattttgatctatatataaatatagaaaaaattagactaattagcggtgaaatactatatatatgattattttttgttttgtaattttgaggcgtcagttaaatattacccttaaatataaattgaataattactgtgtacatttgtgtatatataaaagtaaaacttcgaagtcaatacactaataatttagttggtatttaacagtaatatccaattgacattttacatttgtaaagaaaaataaatataaagaaattttgctgcacacaaaaaaaagaagaaggttaaatgtagaaaatcaaaacataaaaaagttttgcggctaataacctaaaaatttaataataaagatttttttttatgggtaaacacatctctatttatagcacttaaaaatataatttaaatattcagtagcacatatgatcgtatttttatgtgaatgcaattgattatttgaattttgtttttgtatcataaattgttcaaaaaaaaaatatatatatatacgaatgagtgagtgagatggttactatagatataatgtatactaagaaaaaatttatttatttatttgtaaaaagttaaaaaatatagtttaaggtatgataactaaaggagtaatcaattattttatactgtttttctaatatttttgaattttttattttccaataaaataacttttgttaagaaaaaataagccatatttgtccaccaattgtataaaaaaaaacataaaatgtgtaattttcactataaaattaggttataatttcttcaaatgccgaaattataaattgcccttatggagtgggacaaaactcttatatataaatatattttttaaaatgcaaggtagtattctcaaaattattcttgttacaataaaatattactactatctcaaaattattatttgttaaataaaacttcactaacccaattcaaacttgtataaatacaggtcatttgactacaaagagtgatgtatatgggtatggagtagttctattagaacttttaacaggcaaaaggtcaatagataggaataggcccaatagagaacagaacttagtagattgggccaggccttttctaaaagacccaagaaagctttacaagattatggacccaaaacttgaaggccagttttcagccaagggggcccaaagggcctgtgcattggcctacaagtgtttgagtcgcaggcccaatttccggcccactatgactgatgttgtagctactttggagcctcttctagggttagatgattggttttatgtgccatttgtgtacattgcaccacctgatcaagatgagaaagtgattgaaagtaaaggcgaagagaaggacgacgatgatgacggtggttgtggtggcggcggccgcagtggttggcgggatcggattatatcgactaccatgtcatttgggaattacttggatgtttccttatacaaaaatagattagttgcttcaaataattgtgtagattattagtagtggaaaaaaagaaaggttaaagtaaaaaaaaatgaaaattttaagtttaatccttttttttttttttgagttgaaatttgccaacttgttatagaagttaggttataaactattgatttaattagtcaaactaattaaagatcaattatatttattattgtttgataaggtttaagaatggacataaaacctaccatgcatctaagaagttggaaatttatgattttaaccaattaaatatgagaatttttggtaaaatagatacaactaaataattaagtacttataaatattttaatattttatttgttagttgttcccatccatacataagtaattatatattaaattataaaaaaaaaaaaaaaactagcctctaaactaggagtgttcatccaatccaatccgcactattttgctcatagtgcatccgatccgctcaatagatcaaatccaatccaatccaatccggaaaagtgcggattggatcggttactttagattgattactttttaatgttaaattatttaatatttatgaaaaaaaaatatttttttttcacataactagctacaaaataaaataaattgtagtcattttatatctccaacaacacattaaaataaat

SEQ ID NO: 296340 - DNA, 7253 bp, Cannabis indica
gccaacgacagtgagtcaaattaaagcgattgagaataattaaataaaataaagtaaagcttataagtaaagaaaacaccagatttatataggttcggccccttatagttggtaatagtgtactcccctttttgctgtattaacttgtgagcaagaataaattattctctctcgaaagcttttacaatgatctctgagcaattcattcttagatcatttcacttgagtgttttctctctgaataatttcctgtccctgaatagtgagatgagatcactatgtatcgggattaattatatgaaaatagtttcccttaatcaataacaaataaaatatgagactagtttatttccataaatataatgaagaaaatggaaaatttaggttgattgtctttattccctaaagatacgaattaatccgataaatgtaggaattgtgccgtgacttgcaagcttgaagatatacaagatatatctcagaatttgctaactcacaccccctggtcggtgcatgcgagctacttgcttcgtggagctggtcggatgtctattcatgatctgttggaacatcttatcatttatgtgtgactttgagcatcataacaatctgtacagcctactaggagtagaatcatccaccaaggttatgagatatgttacacgtgtcacttagatggatgccacgtcatactgtaaaaatttagataacattttctctccaagtctgcgcgggatcttcttagtcgcacgtggacttattaggaagttgtctggatggaagacacgtctttgattatcatccatgatcgacatgacttgattaaatgtgtcttcagtgtctgcgacattcaatacctcttgaaagatgtacctcgaatgacgcactgacggttgagtgacactgcatgcatgacgtctgtaccatttgtaatgagtgttaacattcaacttagggggaaacccaaaatattcgaatttcaaatcaactaattacccctttaagatacctataaaaggggtcaaagcttttaggggattcttttagctatttttactctcagagagccaaagcgaaaaaaattcttttttattctcaaatcttcgaacaaaactttgttggaaactccattgctaatatcctccgagcagattcatattgcttcgaacagtgagaagttttttttcccttttctttatgcaatatccgttaagtacatgcattactctctgaattttttgctgcaaaattcttcatttttgaacttttcttgactaatcatagaatagaagacattagggcttttaactttgactaacatatgattatacctcttgattctcttatttcttataacttttggcttgaaattgttcatattcacccattcatgggtttcaaaaaatttctaaatatttctttgaggttttgaacttttgagtttaggaattccattttagaagaaatcctttctttttatctttaatcggcttggtcggcatattacacatggattttggcttgaaattgttcatattcacccattcatggattttgtgcggtcggggccacatgtcaagcaggtgcaatgctgcctttgcatccttatttcaaagaaatagccaactactatcacatatgtttgacccaacttacacccaaagacataaagtatctattcgtactgttcgtgttgtatgcttcctaaaaatggggccagccatcagcccacgacactaactgggtatttttacttttctcaaaatgagcgtaagtggctaatcggtactacggacacagatgtgtccaaaattagcgaatttgtgtaggattactattttgtcaaggaaatcatcaatttccatcacattccctcttattgtcgtcctccttttaccctagaacttaggacaagagcctagaaaatacttcaactccaggagcgagctaaaaatatttcactattggccattaaggctaattttattaagtacgggctctacccatctaatgaagtctaagaacccgaccaagtgattgaggaggttacaaccgagcaagaggctctaaagaagaagaagaagcaagctccctagggtgaccaagtaccaatagagcggtccataaggattagggtgaccaagtaccaatatgcttttgcacctaccctatggtggctcacaaattttgcagctcggtatcatctccaatcactactcgaggatctccaacaaatggatttttagtttttggactggtctgcttgatttgagcattggtggtcccagtttcctgtacgcctagagtgaacctcgccagaggagttgtgaatccttatcttgttgattgggaacctattggaggctgaggaatagtagggttgggatctgttcttactggatctcttcgatttgcaggaattttcacattaggatccgtgagcatcagattagttgtctcgttgaattacccctccgtgtttatacatccatctttgtgtgtcctgaaaggattcaaaacaacaattgtgttcttttgctctcaacgagaccactaaaatattgacctcacttttagcaaatgaccgtgagtcaattaaagcgattataaataattaataataacaattaagcaataaaaatacgaatttgttatagaggttcgacccgtgatagtggtaatagcctactcccctttttctcgtattaacttgtgaggaaagaagcaagaagttcttgatctctctcgaaagcttttataaagaatttagcagcttcggtgctctattgaatgaataatttcgaatccttgaatagtaaaatggctccactatttataaggaatacttgtattaatttagtttcctaaacaaataagaaataaataaggaagttcgattactttcctaaattgagagaaataaaagatgaaactaagggattttctcttttccttgtcgatgcgaatccatcccaaaaaatcaagaacgcgattgcttgaacatttaggcagaatatctctaaagatattctagccacatttattccggttggtgcaagtgagctaactacgaggtggatgctgatcggacgatataacataccttattcggatattccaaatttttcttcaaatcaattatttacaagtgacatattactttggacggtacgttaaggagcgtacagcgcgtccaggtcatgaaatgttctccacgtgtcactcataatcatatggatgccacatcacattttacggaaattggtttaacaaaaactattgctaatatctcctcagattatagggacacaaacaaagtttatgacatgaaccaaacagaataatggcaaatacaacaaagatgatcaagattccacacaaaatattgctactgttaatttttggatcttcaacactaatgctgctactcccattaaaactctccatgtaagcaattttttccatattgttaagtaaagattgctcatcaacttgaacccccttattcaagaccttgggtataaaagactgctcatcaagaattttcacattgttcaggtaataatgctcatcaatatttgatgttaaaatgtctaaaatctctacttcaagccttcaaattgtccgaaggagcccgcgaaccaccacttaaggccttacacacataggtgggtcgatccactttcataaataacatccttcaaccaactgcgaaaaaaatttcattggagacgaagagaggaggagacgaacataggagaaaggaaaaaactggagaagaaaaaaatttaaaaactcaccccacacttaacgaattgtcttcttgggatcgaatatgtccacgatgttttgatcacagcatggtattgacaagagcaattaggatttgaaacccttctcatttcttcttctcgtcggtaacaatggcagatggagtcgaatgggggctactcgaagggcttcatctagttagagagggtttttacttttggggtattgattttcttttgattttactttttaagttttctttaataaaattgtaggtttaatttatgtttagtttggttttaattgtatatttgggtgtttttagtttttacttgacatgcaaaatatgaaatggattctcactgggattgccacataggacggttgggcacttaccaaatagtggagagcaaaacaaaggttagtttagccgatgatcagcgcagccaccagccgccaccgcttttctcgtttccatttaccttccatggctagctagctgcaccctgcaacctccgtctccatctccatggtagtgaccttcaatcataccattattgtctcactttctttttgtaccttcactcatggccgaccaaatggcgacaaccttccactccctcttcttcttttcctgcttatttttgtcactgctgttgtgtgactctatatccaattttagaacaatctataatttgaatggaaattttttcaactttgaaagtctaaagccaacgttttgagttgttttgacgacccatttccacaatttgaataagcatgcaaacaatatcacttatgttacagcgcagactcactcagtcaatacgtcgaacagttctcgcgccatattcacctgcctgcaaattcccttgcatttttgcttttctctgcagccaagcgcctgttaatatcccagatgaaacttttgatttgaaacaggaagaaaccagaccctgcttatcttatagaattgagaaactgcctggaggcgaaggcgttttgctgcttttcagagctggatgagagatggaaatcctgttcacaggggtgacgtttttcacaccattaatcgcctcagaaagctcaaaatgaacaaacgcgctctcgaggtaagattctcaattttctgtcttttccaaatagtgtaaatatctcatcttgtaaagataatcactcttgcttaataattctgtcaatatgcattgcacaactttgattgttacattatcaaatgccggaatcaatattttcgattcaatttcttaaattgttggaactattttgtacttctcttaccggattatcattcttttcaagttagtgaaatcctgaagtgtgttaaattattgaaagggcgaagtagcaatttcttcttttttttttcgttaattcatttgtttctttttgaaattgtgaacatcctttgtgcattgtgtgtatgcatattcatcagatgggctagcttgcattcatgccactcttatgtatataaaggcaaacatatgtcttttgacaggtaatggaatgggtgatcagggaaaggccctacaggctaaaggaattggactattcttttctgttggaattcacaattaagattcatgggatttcacaaggtgaaaagctcttttcttgccttccagcagagtttcaaaatgagctcctttataccaatttagtaatcgcatgcttggacaaaggtgcaataatactttcactagcttacatgaagaaaatgagggaattgaatcatcccatgtcacacttggttttcaaccgcctcataattctccattcatctcccaggcgtagaaagttcatcccgaaaattctctctcaaatgagagctgataaagtgccccaacatgtctccacatttaacattcttatgaaaatagaggccaatgagcacaatattgaagggctcatgaaagtttttagtgacatgaagcgagcaaatgttgaaccaaatgaaatatcttactgcattgtcgccactgcacatgctgttgcaaggctgtatactgttgcggaagtctatgttgaagctatagagaagtcaatgacaggtaataattggtcaacgttggacgttcttataatgttgtatagctttctggggaaggaaaaggaactagagagaacttggcaagctgtgcaagatttaccttatgttcggtccaaaagttatgtgctggcaattgaagctttcggtagaatgggcaagcttgaccaagctgaggaactttggctcgagatgaaatcaagaaaagggttgaatactactgagcagttcaattctatattgtctgtgtattgcaggcatgggcttattaaaaaagcatcagaaatttacagggaaatcggaaaacatgactgtaaaccaaatgcaataacttataggcaccttgctttgggttgcttgaaagcaaacttggtggaggaagccgtgaaaactctcgagatggggatggatttgacgacaagcaacgtggtcaggaattcaagcccatggttggaaacaactctactaatagttgagagttttgctagacaagggtgatgttgggagtgctgagaagttatttgaagagttgataagagcaaagtatagcaggcatacttttgcttacaacactctaattaaggcttatgtgaaggctaaaatttatagtccaaatttcttgaaacgaatgattttgggaggatctaggccagatgctgagacatatagcctggtgaaacttgctgagcagtatagaaactgagtttagttttttgaaatgatcataaggaggttcatttttattcttcttttatgtacaaaattctgtgttgttacaaatagaagacatgattgaataagcttaaaagggataaaacaatggggaatttacacaaaatattatttttttttaggtaaattgcgacaaaactctcaaaaattttattttgctttcacttaaccccaaaacccaaatttgtgcgggatagctaccaaaaccacaatactgttagcaataacacacctctgtcccatgattgttgatttttgtgccctaaataaaacttatttcaatataatcagatttactaattaataaaagatcagaaattgttttatggtccatggttcacatgatttattttatgattatgtttaatgtataacttttatgaagtcctgaacatatacatatatatatttgttcatgattatagtgttgtcagcacagtgaaatataattataattatattttcaaaagtttaattctcatgatttgtcagttcactagatttagactgacatgataatcggtgataaggtatacttacacattggataagtgttatgtcctttctagggaattgacaaagtttactagtatcggatgtatgaagtatacattggaagggaccgatattgattttggataatatatcattatatctttctaagtcaatatcaatggttgat

SEQ ID NO: 296341 - DNA, 4841 bp, Cannabis indica
atattatagatatcgatatatcatataattatcatatatatatatatatatttgttttttcttttgaatggaatattaattatgatatatttattggtaacttataaacatatataaatgctaccacatttttttattatcgttgttatgccattactatgtatagttttggtttttgtcccacaatgaaacataccgttgatacaaattatttatttaattatgttttttttttaatctttattaacaattttagtttattgtactgccactcctgctaggtgttaaagttctaattccctttcaccattgatgtcgagctcaacagaaatagagaaaggaagaagaaaagaaacagagtaaaaagcaaagagagaaaaaagagagagaaagagaaagacaagaagaatgaattttattcagtaataagcacaatgacaagtttatatataagctcaattgagcaaagaagctaacaaccaatccaactaactcctaacaaccatacaacacaacaaacatttataacagaaaaacagttagttaattagttcactgtcttgacactccccctcaaacttagaattggtactaccaacaatgccaagtttggtgctgaattgagtgaaccttgaacttgaaatggtctttgtaaggccatcagcaattcgagctgcaacaggaacatgatgaacttgaaccaacttttgttgtagtttctctcaaacaaaatatagattaaattcaatatgtttaatgcgagcgtgtaaaacaagattgacagtgagtagaattgtactcatattgtcacaccaaatggtaggtgattgaggtaattgaacatggagtttagaatacaatgaatgcaaccaagttatctctaataccacttgagctagacttttatattcagctttagtgcttgattgagaaacagtatattgtttcttgcattgccaagaaaccaagttagaaccaagaaaaatgatgaagcctgatgttcatcttcgatcgtctggatcacttacccaatcagcatcacaaaaggcagtaacatcataatctttgggacacttgaaattcaggccatgtgaaactgtaccaataagatatctcaatattcttttaactgcattccaatgagtatgtaaacgattggccatgaattgacagaccttattgacactgaaagaaatttcagttctggttattcttaagtactgaagtgtaccaactattgatctatacagctgaggattgtccacaggatccccatcaaaagcagacaacttagaccacttgtcatgggagtaggagcaagttttgcatcttgcatttgagccctgcacaacaaatctctaacatacttagcttgagacagatgcaaaccttctttggtaggatgaaacttcaatgccaagaaaatagtgaagattgccaagatatttgacaacaaattttatttaaatccaaggctttgatcaaagttgcaatcttttcagggtcactaccagtgatgcttatatatcatcaacatacacaagtataagaatcatggagctacacgtatgttgaatgaataggttgtggtcagacttagaagatataaagccaaaattctctattaagcagttctgcagtttttcaaaccaggcccttggtgcctgtttgagaccatacagagctttgttcagttcagactaaatgagggccatctggtagctcaaaactaggaggttgagtcatgtaaactttctctttcaaatccccattgagaaagggattattcgcatcgagttgttggatgcaccacccttgtgcaagagccaaaggacaaaaccactcttattgtaacaggtttgacaacaggagtgaaagttttagtgaagtcaaaacttggttgttgatgaaaacctttggctacaagttttgccttgaatttttttatagttccatctccattaagtttaattttgtacacccatttgcagccaataggtgtccttccctgaggtagagtaacataggtccaggttacatttttcttgagtgctctcatttcatcagacatggcattattccattcatgttgatgtaaagccatcttaacactagtgggttcttgaagatccacataagccttaggtttgtgaatactagattttgctcttgttttcatagggtgtttgtttgttatgacatcatgtggttgatggctctcagatgttatatgaggctcatgattaataggtgaaataggatctgtggtgggagtaggctgaagtaaatcagtatgaaaaggggcatcaacaggtgtttaaggagtagtagatgagattgattgtggagtagacatggatacacactcagaactggaggacacattgtgattgggacgggaaccatgaccaagagagtaattatgagaaattggaaatagaaaatcggcaatgtacatttgggatgctttgggaataacagcagatggtaaagttgttgatgaagagttaagatcaggagtagaactgggactttttcaagcataggggaagttggtttcatcaaagatcacatctcttgagatgtatagtctccctgatggatcaagatgcttatagcctttgtgattcaaactataaccaaggaatgtgtagggaaaagatctaaactccaatttatgtttgttataaggtcttatgttagggtagcaaagacacccaaaaattttcaggttagactacttaggtttaatattaaataacatgtcaatacgggaagcctgatttaaaacaggagttgacaacatgttgtgaaggtacacagcacatataaaggcttcatcctaaaaccttaatggcatggaagcatgggcaagcaagctaaggccatgttgaactatctatctatgtttcgtttccactaacccattctgttcatgagtagttgggcaagggtgtctatgaactaccccagacttatttttcaaaagattgatccaggtgaacctagtgtgctcatctacaaaagacatgtaatatttgtagccattatgagaattagtacgggagggtccccatagatcagagacaactaattgttgaggttctgaataaatagtataagattcttttggaaatggcattttatgaattttgccaagacaacaagcttagcagacaaaacttttattgcttttaacatgaatattacatgagttcattacattttgcacaattctatatgaggggtggcctaacctgttatatcacaaatcaaaagcagtaatagtagattgactacacttgttacaatgattgacactaggttcaattgtgcgtgtaccataagtgataagacaagcaaggttttaaacattaagactgggtgcttaataggaattgagtgcttggtctggtgagacagcttggtctgagtgttttctgtcttgggccttgcaccttcacctccattgtagggattttaaccgttgttacagcaccggtctcacacaccagtgtgtaacccaccatgccaattcttggaacccgcccagaagtcttggaagggagcttagttggctcaactgactttttagtaataaagcgatctctaaacaatgagaacatgttaagacaaggaccaaaaagagtaaactgagaaccactaacatcgagaatggtatccgaagcatcttgtgaacagctgctacgaatgtgacctaaatagccacaaaaataacagaactttccaattttctcatatttatattgcaccaaagatttaataccattattttgctcaacaaagcaacccgagaatgaaggagaagaaacgttaaactcaaattgaactctcaaatattttgaccaagtcgttggcttctcctcatctagcttaaccaaaatgacatttcagcattattacctagacagagctcatgaggcaactggtgaagttgcacccacaaacgaatcgaattgaatgacaatagacaagcatcacttgaagcccatgcttaaagtaagaaagtaaagtctctaacactccatgggccattgtccaaagcccactctctatcctcctcacgctcgaagccattttgaacaaattccttctgcttgcattaaagacaagttcaatcaccattacggggaattttcaagcattcaatggacattcttttatggtatatttatttatagttttaggtgacaacactttgccataaagacagagcttagttaaggctaggactgaagattcactaggaatcaaagaaaaagtagcctctttaaaggaaacacacctacttttagttaccaaagggaggggggggggggccattgaccaactccattgaaccccagcaagacagaaaacaccacaaactgcagcccaccccacgacaaaacgaaacttacaaagagacaaggaagacacactcacaaacaaagcaaaccacaagaaaacacaaaactgaatagaggccacaaaaaacaggaaggggacaaagaagcaaagaaaaaggaaggaagacacaaatggaggaagagaagaccaaactaaaggaagtcaccaacacaaagacaccaaacagaccggatccaaatggatatgacaagacaacacactagaacaaaggaaacagggccaaaagaaaggaatggaatgtgacaaactaaagaccaaagggtaagaacaaggactgagaggaaagtatatgatatttctaaaggaatgaaaagtattataaaacaaaaatattattgttaaactaaaattataatattattatatattttttatatatataaatatcactaaaattaaatattttttta

SEQ ID NO: 296342 - DNA, 3831 bp, Cannabis indica
gtggagctcaaagaaggtcctttggaacagtttacccatgagatggagccctttttgcgtaaacaggggatgcctgttcgtttgaacaagggttagtatattcttcctcttttgctagtctgtttattttagacgagcagctgtacttatttagccgatgtatgtgtacaggtactattgagcttgttgcagactacgttgtttgtgaggagggaaagcctttgtcacctgaggcttctcgcatattggtatggtctataatcactctttaaccaaccactaagttttcttgtaggttccttttggaattaggtttttctgctaacatcacaagagcggtctaactgatctatctagttttttgctaaatatatagggattaaaattgatttgtttctaagataaagttggaaattataactttcactgagtgtgttaaagtttcctccatttttgttggaagcattttatggagaaactagtgaggccaggttcactcctagagatagaagtggcttttgagcctttagaacaaaaatctaacttgtaaattgtaaagcaattgaatgaagctaaaattagataaaatattcaccgaaatctctcttgattttctatgcagaggttattgggaaccaaaatggctacttttcgacttcacttgatttgcagatggagtcctgatgattttgaactctacagtagaggaacagaagattcagatgtggaaacttcttaaaaagccttgaagcaaagttttggttatcttagttttaatatgttttgagtataaattattgttcaagttggaatactaaaatactactgatcaagaattttgttttattgatttttctcacatcttgtggaatgatgtgtatgtattgataatatttgcagtagtgacaccataggtttaatgcctttcatatatgctcttaaaattgttttaaataggttaattttcccaggagagtatctgttctgcctctgattatacgtttgtcttgtttgtgactttttaaagagatttagggaaagctggttcaaaatacacactccctttaaaacaaattgcacactcaaaaataagatattttgttttgtttttttaagaaatcccactcttgttaatagattgattggttataagacattcgtttttttttttttgaaagttggttataagacatcttcaatgaataatataaaataatctaaaaaaagtgctaaatttggccaaaataatgaacataattgtaattatgtattttgaaaaataattcataacaatattataattaaaatttgtattaaatttgtttattaatgttttgtaataatgatgtaaaggtggccaaacttaaggaagaaaagaaattagaagaagaactagaatgaaagaagagagggtgacaaactttaatttcattcatcgatactgaaaaggatttgtagctttatttagctaactacaaataactaaatgcttctataagttcgattctcttgtacaagacattaagtccctcccacattgtttttcaatcttcatttcatcccatgtttgagtgttcacaagtaacaataagtctatgttacaacaacagcatcataaaactaaatcatcaatcagatcaagtaaagtaagccaattacgtgtttatttttggcttaaaaaactatattgatcttgaattcttaggcaagatatagaaccacctttgtggttgttgttatgcattaattctaaaccaactcatctttaaggaccaagtttctaatttcatgcagtttgttaagagcatcattgatttgtatcctgtttcttggagatatttccgaacacatgactccaactttgagtatagaaactaataactcatctacttttcctcttcttgtttggagcagtgtgctgctgctgctgctgctgctgctgctagtagtagctctttcctcctcttcgctgaaaacaagactagaatcaactacttccatcactctttcaggtaaagctgttttgacaaaccggttcaaattcaactcgtctttgaagcctgcatatgtaggccttttccctgtgaaaatctccaacaagaggataccgaaactgtatacatctccttgagttgtcaccttgcttcccatgccatattctacaaaatggaaatcagatttttcaaaactaggcattgtgattcaaaagattcatcttaatgtaattgaaacacatttacctggagctgcatatccaatagtaccctttattccaatggaacttgtctggtttatagaactgtcttcaataataatccttgacaaaccaaaatcacttacatgggcagtcatgttttggtcaagaagaatgttacttggtttcagatcacaatgtacaatatgtaattggttatggttatgaagataatctaaggcagatgccacatcgatcactatgtttaatctttgagacaagttcaaacttttctgttgctcttctgaattttttgctggaatagaatgcagccaatcttccaaactcccatttggcatgaattcatatatgagagccttgaaatcattaccttggtaatcaacacccgagcaaccatcaataatcttcacaaggtttcggtgtctgacacttcttagaatttcacattcggtcatgaaactctttgtagcttctctgtttacaaggttgaatactttcacagctacaattgtttgatgtggtccaaggattcctttatagacagagccaaacccaccttgtccaatcatattgttgggagagaaaccattagttgctttaaggagctccccatatgaaatattcatgacaggatctctctcataagattttaaagctttcctttttgacttcctaagaaaatagtagattacagcatataatagtagtaatactacaagggcacaacatatagagattgtcaacttggcctcaaaagacaagttatgttttctaaagcattctcttagttctaactcaggtatacccccacaaagcttgtcattaccaacaattgaaattccactgaaattaccaaaaacacctcctgttggaagctcaccctccagatcattgaaagaaaggttcaattttgacaaggaagataacttagccaagtcttttgagatatgcccagaaagattattatatgataagtctatttcttcaatgcctttcaacgagtacaaagtttctggaagaactccttcaaacttgttatgatccatataaagtctttgtaagattgtgcaatccccaaggctgctaggaatatcaccagacaaattatttttcgaaacatctaactcgacaagatttttcaagttaccaacttcccaaggcaaagaaccactcaaataatttctggacagatttagagactttgacaaagatgacaaaccaataacatttgggggaatggtaccattgaaggagttactggaaaggtccaaccacaacaagcttttgcaattttcgagactagaagggatgtttccatgaaaattgttctcatctaatcgaagctcactcaatcgactgagattgccaatggaaaaaggaatttctccatagaattcattagcatggagatgcactctttctaacatgtgaagtttaccaatggtttcaggaagagctccttttagcttattgtcatacataagaaactcatttaagcttactagatttccaataccaggtggaatagttcctgatatctgatttccttgttagacttttatttgggcttacattaaattttattggttttattaaaacttgggttgattggatag

SEQ ID NO: 296343 - DNA, 2620 bp, Cannabis indica
gggtttttctgacctacacgcagcagtcagcagggttaagttggacaattcgcaaagtagaatccagcgatgctaccttataaatgtaggagtaggagacaagggaactgttaatcaaagtacataaagattatatgtctctttcatgcgacaaaaagctaaagcagcatggatgcaagatggagattgcaatactgctttattccatgctagtatcaagcattggctgagacagaattgaattctctctattgaatagtaggatgggagtagggtgcatgatcctaatttgattactaaggctttttttggatttctacaagggactattaggttctaaaatggagaataaaagattagttgaggctaggattctggctagaggacctgttgtgactctagatcagactaacatgctgctacagggatttaccaaagaagaagtgaaacaggctgtttttagtattcctagaaacaaatctcctggacctgatggcttttctagttgcttctaccaagataattaggaaatcatatgtgatgatatttgcgatgttgtactatcattcttggaattaggtaaaattcttaaagaaatcaattcaacaattattactctggttcccgagcttaagtgccctaacactgtcaaatgtttgagaccaattgcttgttgcaatgttatctataaggttgtaaccaagcttttgagttctagaatcagaaacatcttacctgagataatatctcactcccaaggtggatttatcaaaggtagatttatagggcacaacataatgatatgtcaagatttggtgagacattatggtaagaaatctaacaaaccaagttgcatgattaaattagatctccaaaaagcctatgataccactgagtgggaattccttgaagagatgttgataggtttaaagttccctattccctttattcaactcattatgaattgtatcaaaacccctaagttttctcttatgtgtaatggaaccttacatggtttctttgaatttaagagaggacttaggcaaggggatcctatgtcccctctactgtttgtactaggtatggaatatctatcaagattaatggggaagataggtgagaaggaagatttccattaccatgacagatgctctgatctcaaattaaatcatttagcatttgctgatgatgtgctacttttctgtaaaggggatctcaaaagtataatctacatgttgcaggccttaaagctattttcactaacatctggtttgtatcctaatgcaaacaagactgcaatttattgcaataatatgcagcagtatgtcataaatcaggttctaaatttatctagtttctttagacaagagctgcccttcacttacttgaggattccaatatgcggaaggaaaatttttgggaaagaatgtgaaccgttgactgaaaatatgacagcaaggatcaaaagttggagctctagaaacctatcgtttgagggagaatcacattaattaattaaattttaattgctatccaagcatactggagtcaaatgatgatcatgccaaggaaagttctcaaaggcattgaagcaatctgtagagctttcttgtagaaagaacaaacaatgttccatggtgctggagcagtagcttgggaggctgtttgtcaaccaaaaacagcaggtggattgggtattaaaaagctcgaagagtgaaacaaggctgcaatttgcaagtatgtatgggccatttcaaatagacaagagagcttgaggatgagatgggtccatagtgtgtacattaagagggaagactggtggagctacactgcttctgtccactcaagctggtagcattaaaagatcaaattaaattcctaactgatgctgctagttttcaggtgcagaaatattctattgcagcatgatataatctgcttaatcctccttgaaccaggttatattggagtcaggaagtatgggcaaggttgaatattcctaagcatagtgttatactatggatggcaatgctcaacagactaaaaaccaaagatagattggttaaatttggtatgcaaatgagtgagagttgcaatctttgtaatgttcagaatgaaaatggccagcatctattctttgagtgtagctttgttgatcattgtctccatgggattaagagttggccatcttggaatgcaagatccaacaagctttctcaacttgtgagatggatcggtaaggcaaagattagcaaattcaggaagtaagtgcctgctggagcagtggcttccctagtttatagcatttggggagctaggaatgctatcatttggaatgaaggacaattatcctccgccaagcttcttgatgaaatcaagtggagtctaaagcttagaatttctatgtttttgccaaagaaaatcaaacatgtatataaagagtggtttcatgctttataagcgtatacatacttaaaagaaaaaaaagaagaggcaaatagaaatgtatagatagcctataggccctgattatggggtgctagtacggtgtaaagattgatttgagcaataaaattttctgatttataaaaaaaattattaaattcctctcttttgggtc

SEQ ID NO: 296344 - DNA, 3079 bp, Cannabis indica
ataggggttcaccccattgaaataaacaactgagaaattctcattcactttctctttctctcttcatcttctttattctcatctattttatattattctatattattttataacaactactacattgtcttattttttgaattttaacaattggtatacaggtgaatcacataagatatatatcaacgtagttgatatttgcatatttataaggtttaactaattggagttggtctttatcgtacaattatcacacattttatgtgtatatacattaagttggtgcaacattgccatacaattggcaaacaattttattattaataaaacataagcaaaaatgtcatataataaattgtcttaaatttgtcttaaattagtataggaatttgacaatatgttcttaaacaagaaaagtaataaaaccataaaataaaacacaagtcttaacatctttgttcataacaactaaaaaaacaaaacaaaagctgaacaataattgacaaaacactacaacaatcactttcttggaattgccttattgtactcaaaagagtatgaacaacataaggatataatttttagggctgaatatttttaccaaatatgacctgacctggccaacctgccaggacccgactcaaccaactcaaaaatttaaagaaatccattcaattcaggcgggtcaggttcaactcggtacaccttttgggcagattttgggtttgagttttcaagtgaccaaatttcgggacggacccagacccgcccataaacccgattttttttactcttacataaattttaataataataaaatattacactttacatacattggacctcaaatataataacatttactatttctaaaaaaaaagttacataatacaacatatttacatttttttcaatgtgttgaaagtttatatgtatacatattttattaaatttaatggttttgttatatatttatatataattaagtaaatgtttaggttttgctctacgctcatatataattaagtatgtttatagataattaggtgagtataaaaaaaaagtttgactgagctaactgggtcaacctgcccaacccgaattcgccaatccaaaacttgctaatttgcaacacgtgaacgggccgggtctgggtacaattttttcaatatgaaacttgcaaatctaaaatccagtcaacctgcccgatgttcagtcctaataatttgtactctaaaatttctaaaaaaaataattgaattgagtgacatgaaacattgtcatcacatcctttacttttcttaatattttcaataacattgtaagtgcaagtagaataacacttggacctaaaatagtcaaacgggtaaaacttatgtttctaatcgtgcttatataaacaacaaaaataaacatgataaaaaaataaaaacgataacaaaactgccctgtaattatacttgaactaatatacataacattcgcataatacacctaatccatatcaaatcaccagtaagtaaactatattgcaactatgtagcaacaactgaatgcataacacttaaaaattaccccaaaaacaacaacaaaaccaacaagcaataccaattaaacataaaatatagaactaaaaagaatagtaccagtactcattaatctaagataaataatctagtttatcttttgaaaaatataaactcaacttaaaatcaactaatgtgcaatttaaatacttttgtaggaatttttttctcttgaattaagaattcaccaaatgcatcaacaaaaataccacaatcattgcataacaaaattatagtaaaatgattcaaataatgataacaaaacttagaagcaattaaaacacatttttttttaaaaaaaaaacacaattatatcacttgaatgagaatttaacaaatacaacaacaaaaacaccacaatcaatatataataaaaataataaaaatgattaaacttataaataactaaaatacaataataaaaataaaataagaaactacaaaacaactaataaacaacaataaatcaacataaccattaaaaatttacaaataaaatactaaatcatcaaaactaaataaacacaaagaaaaatatatatatataaaactatttaagttaaagaagaataaacattgaaattggagatgatttcttttctttaagacatttcatcaaatatatgacagttgtacatttatatacatatattacaaaaactaaacttataaaataagagaaaatcacaaaatttgtaagcaaattaacataattaatagcaaacaaatacattaggaacaaattttttaaaaaaatactcaattcaaaacttatattaatgaaatttaaacaagataaaaaaaatttacagaccttaatataaaaatattaatagcaacaaaataaaccttaagaacataggaacgactgagacaaattcgaaatgtcgttttccccattggatcacgacataggaggggttgcgtgcttgacaactaggaattggtgatgacgacgtcgaggcttggagaaaagatctacaccagcgaggcttggagatgagacttgcgacgacgacgacgattggagacaaaatttctgatgtcaggagactagaggtggttgccgttgaaagtgagaattgtagaaagtgtacgacaaaaagagaatgtatttttgtaaattgttaatagttatagttataaaaatttatgtgcccatgtagagtattttaataataaaagctggctttttgtattttttttttgtaaaattttttttataaaaactatcaaatatataaataaaaatataaaaaaagttattaattatattaatgagtgataaaagagtaaataaaaaaatgatatttattgtggtataaaatttgatccatgctatattttgtgccaaatttggtacaatttttagtatatgccaaatttggaccacattatactttattattgaaaaatttacatgttatactaacttttgtcatttttttataaaaatactgtcaagcggtattttttacttttttactgtattt

SEQ ID NO: 296345 - DNA, 1994 bp, Cannabis indica
atttggtcatcacagtgtagattccttgtttttgttactgaacatgcagatggtttatttctcattacttttggttgcgaaggtgataagggtagaatcttagaaggctagccctgacattttgcccaaagcattaccatctttgctgcctctaaaagttcctttcctattacccctgaaaatttgcattatgtccctttttggatccaagtctatggtataccctttatgtgtaaatcatatgacttggctaggttcattgcttctgagattggagaccttatagaggttgacaaggacactgtcaaggagggcactggcccttacttaacgctaagaattcttttggatgttaatttacctatccgaaggggtataaacatcatgttcattcgtatgggtagagagtttgtcaaatggatagatttcaagtatgaaaggctccttgacttttctttttctgtagaaaattggaccacaccaagagatactgtcatttttacttgtaaaaatgtgatgaaagtcagtctgacccccctgcccttataccattctcttaaggggtaaggaaaaaattgttgataagtccatgcccattcgataccctcaccctcctgcgattaacttagttgactttgtccctgttaatcttagtcaacctaccaggaactttttgggaaataccattaatttcccttcttttctgaatgttagtgccagttcaacccctcatttctcgtcccaccactctaattctgctgttatctaatatctcaagcatgtttcctgcaggtcatagctctttcctggataatcctttgcgttcttcagccttgacttcttactccactgattctctggtggttgctattactgttggaaactcagaggtggttcctaatgcctttgtagttttggcctctgctggtgatagcacccccctcttgggactactgttgctatgtgaaccaatactgcttctggtcagcctgatcctatggttcgtagaaaagggctaacgtatgtttcttgggttaaacgcccttctttcatcccccaacaagctgtagttggaggctctgtaaggtctcagttgaagagggctcgtgctggtgatagggaggggattcttcctcaaattctactgatttggaacaggcaggtgatgctatgcacacccgcccaaaaaaatgagcattttatgttggaatgcacgtggattggggagtacacgtgcattccgtcgtctctcccttttggtgaaaggccattgtcctgatgttctttttttgatagaaacccgtttgccttcgagtgctgtggatagagttagagttggcctgggttttgaccatggctttgaagtccctaggaagtagtttttttgggggggggggaggggacttttacttttgtggaaggacaatgtttttgttaatattttaaccttttattgtaatcatatcgattgtaatctatgttttaatgataataaaatgttccattttactggtttctatggctctcctatttcttctcaaagacatttagcttagaaccttcttcataaaactttttataatgctcctaactttccttggttaattatggtagactttaatagtttcctttcttacaatgataaaattggtagacttattatgataccaaggatatggataatttctctaactttattgataagtttcttctttcccctctttcttttgtgggaaataaattcacttggcgtaatagatttgtttgtgaacgcattgattgggctattggttcggattcttggtgtaatctttttcctaatgcagttttgcaccatctttctttctatggttctgaccatcgtgctcttaagctcattcttaacgacaatagccccaatttacctcctcggattagaaagagatttcattttgagaatttggcttgaaaatcctaaatttttctctgttgttaaaactgttggaaattatttt

SEQ ID NO: 296346 - DNA, 4473 bp, Cannabis indica
aaaagaaaaagtggaaagagtgaactcgggcgagttacaagactcatgatctactcgttcaacttttaggtcaagttgggtgtgttagaggtcgtactttttattttattttaaaaataaaaagaaaaacgttataattttagaacaagaaacggtgtttgactctgcaaagtgcaaagcagtgaggaagagggtaacttagatctgagaaagctaacaactcagtggccagacgtaaaatgtctccacaccttcccgatttccatgtctaattcgagcttttccgtctgaattttcttctggggtttccttcattttccatctcaacccaaccagaaaactgtccctaaaacaacatatctatttatttaataatgcatagaccttattttcacaagctgattgtcttgtccatcatccaagcgaaacaactggtattttttcattattatttcttttccacattttttttgttattatttatgtcgattgattttttaaatatgctttttttgtttaagatttttcataccaaagttttagaattattagtttgcagattaggtaaaccaaaaagaaaaaaggacaattctgatttcgtacaaatatgatttgtggtgaagatagtgaaataggattatgtgatttttttcttaggttttattattatgactaaagcaattgtttcaattcatgttatactggactggtaatttcatttaaatttcgatgttaacgatgttatggaaggaaattagaaaacatttctgatactaattttagatgctgatactctatgctttgtggtcataaattataatgaaataattgactatttgttgaaattttagtatttgttcaatgccctgtgtgtaccttgaaatctgatattctgttgaatttttacttcatgttgatgccctgtgtgttcctaaagtgaaatctttatttgcttccatgcaagctgacatgcataaggctgttaacattgtgaattgttgaaaaggtgaccttgttcgaagtgcttctatgagaatttgtatttttctaccaactgttaactgttatcttgttcgttgttattgagcttgttccgtcaaatgaaattggctagtaatttaaatcagctttgcaatgaaccaataattggctatgtaattgatataaatgtttgttcatttagttccataaagttagattggaagtagattctcattgatctttctccccatttgcttaagcttttagaaaatcatgttactgttttatgcacattatgtcacaagagtttccttgttttctgtttcttccgtgagatttggatattatatctttagcatttattatatcatcatttgaattactttgaaatctgaatctttacctgtcgtaagtgattttataacgcccgttttataaagcaacaagttaaaacaaatgtgttaacaagaatttacttctaaatgatatggagttaagaaaacatcatggaaagttccttttgtaaaggaaatgatcatgtgaatttgaagaagattcattggcagtgatgcatgtcattgtagaatttacttgcaaaaagctacagttgcagatgtcaattttgatttcctggcaatctcataaatacaatacctttttaattattacaatatagaaatatgttttttttaaataatatcttatgaaattttcttgtattagaattgctaacatttaagatgatctaaggacaatgataatgatatatctacatatttgaatgtcacatgttacttctatgcttttattttcgttctgtcttgaatactcattgttccatgagatggacgaaaacagtttttaggttcaatatactaatgctttagtggaatattgtgttcttgaggcatctgctctaaattcttgtattagttctgggatgatttttccaaggtatggggtgacaagaaagcgtagaagtctgctgatgtatagtatattagtatacctaagagttataagtcaagacttcttataattatagtggttctttggttagaaagaaacaagagatccagggacagatttggatggtttcaactttgggaggatactaaaatttggatggctgtttggatctttaacacaaacgatcataatttccttgtagaagatgatatccactattttatcatctgttgtaaatctttgtttctccttttgttttctctctctatctaatagaatatcagtttcttaaaatatgtgtgtgtttctatattgtataggcttgtgtttgattttatcatatttacaatttcttccagccaaaaagccttacttgaattttgtatttgcagaggatcccagataattttgtcaagaagttcagggatgagctttcaactgttgctacaatcactgttcctgatggtcatatttggcgtgtaggattgaagaaagctgataacagaatatggtttcatgatggttggcaggattttgttgaacgttatggcatccgtcttggttacctcttaatattcagatatgaagggaatacaactttcaatgtttatatatttaatttgacagcatctgaggtcaactatcaaggaaattctgtgcatagttctcaagccatttacaacaatagatgtcaaatctttgaagaaatggaagatgattcggatgaaatattggggttttcatctgggcgtatggcaactggtcccttgaaagctaagcttcttggtgaacgtgcagagcaaatggcacaaggcaaggttttcaatcccccatctctacagaatttgttcaatgggtctaaactgaactgcataaattggggcattgaagggaatatggatccagcaaagggtactggcaatttccaagcccaaaatcaattgactcaaggtgttcctcagttcaatgttatggagtctaaaaagtctggtgaggaagtcaagatgaacaattctgaagaagaactgcgaaagtctaaaaaagctgggaggaaaaagcggaaaattgattctagtaagttctttaaacttttattacttcatatgtgccgttttcataagagtttgttgtattaattgtatgaaagtgcagatgggcaggagcctcccatcaagcatgatgagacagatatgcgctttagattttatgaaagtgcttccgcaagaaagagaactgtgactgctgaagaaagggaaagggctattagttccgccaaaacatttgagcccacaaaccctttttgtagggttgtattgcgaccttcgtatctgtacaggggatgtataatggtgagttgttcaatgattcgatgtacataacttattattgatgttttccgttgcagccttggtgtaaatataccctttctgtctgtgcagtacttaccatcctgctttgctgaaaagaacctgaacggagtttctggattcatcaaacttcagacgtctgatggtagacaatggcctgttcgatgcctttatagaggaggtagagctaaacttagccagggctggtatgaattttcgctggagaataattttggggaaggcgatgtttgtgtttttgagatgctcaagatgaaggaagttgtgcttaaggttacagtttttcgcgtgcttgaagatgcaggagtcataaaccatccatcacagcacaatgtcaacaatagcaaactagtaagaaattgatggatggccggtatattttcatatgataaaccgtatcaaatgatgcatgttcctttaggtagtgatctgatttgttgatgtggaatcttggtgctgttcagtactcagtatactcgtccgaatgacttcatatagctttcttttctttcttttttgtctcatggctagtcgtttcagtacaaattttgttaatcgttattaggtctgtaaatagcttgtgcaatctagttgaatgtcaaactggactccttattgatccgaattacatctctcttgaagttggattctgaagactgaacactagtttttcatgtcattttggctatgatacttgtgtgtcaattgtgtatataaacatgtaaattggatccctttcccttatttttcatttgagttttaagttaagaatggtgttgataagcttaagcgctagaagtacaagcctgtgctaaatagtaaaataataacaataataacaaagcatcttgcagaataaaattactgaggatggtgagcccacaataattttgggaaatttcactttttgcccttaataatatactccatatcaaattttataccccttactaatttatacaaaacaattccactattttcaaattctacccaaaataccccttacatttaattttctcactctctctttcccactctctctttccctctctctctgtctttcccactctctctccgacttttcctcttcgtccctgcccaaaaacaaaacaaccgaacaacgaaaccgaacccgacg

SEQ ID NO: 296347 - DNA, 1396 bp, Cannabis indica
ttttgtaaggagttaaactccatttctataattgatcaagcttcaatctatctctattgtacagatttttttgctgaataaaagttaagttttcttctctcaattctgttgtattaaatttgtttattcttgttcattattttgcctttgaattcgtgtcttgattaagtttagttcttgaagtatggtgattgattcacaacatttactattccataatgaaaagaatcaatgagaaaaaaaacatggcaagggatcaaatgatcatacatatatgactacattttcatgtgaggcctagcaaaactaattataatcgtataagtaaagacacgaacatatattatacacttcacttcttcccttaccatcacacattagtaaagtaaacacgaacaaaattttcaagtacctgatatatgacttcacaaggaagacgattctttatcacttcactgcaaaaattagtaataaaattatataaatatacataattcaaattgaagaaaagatacataatgttcttacaatgctgaagcagtagtagtggtcatcaagatattcaattcaggtttctttcgaatacactctttgattactggaatcgcagccactccttcacctgaaatgaaatgcagttttctcgaaatccagacaggaagtaaaaatatattttaataaagagagagaacggaaacctaaggagacggcatggaaccagaggagttggcctgggggacgaggaagggaggcgcggccgagacgctccggccaccggagctgatgttcgagacctaagatcttacgccaacgaaggtgaaggtataacaatggagatagaccgtagctgagagctctgtaaatagtgtagaccaacgaggctttcgttgccgccatttctgtatcttctgaggtttgattttgctgtctagtttttacgcagacgaaacgaaacggaacgacgatgcttctggactggaaagcccatgggcctgtacgacataatagggacaaacgaaggctcattgggtctttcttggtgggcctcacgtgtaatacggaagaacgaaggttcatcagctgtctagttttaaagttgtttttgtttttgtttttttgtttttttaataaatttcaatcaaattcgtatcgcttcaagtttttgttactttcttttagagaaaattatatattttataagtttttaatttgtgcaaaaatatgaaaaaaaaagggagagttttcaatattatatttaaaattgattttatttacaaaaatacctttaagaaaattatctgtacaaatagcgttgtgccacgtcaacatatataccgaaatttagaataattaccgaaaatagaaaaactgaaaaaaatctcgtttccaaattttt

SEQ ID NO: 296348 - DNA, 1230 bp, Cannabis indica
ccattcgattcctaatcctattcctatttctattcccattttcattctattctatttctcatttactccaaccaatgaccacctttctgaactttgaataaaatacaatccatacttaaaacataagaaatagattttattattctaatcttgatcgtgaaagaaatatgtaaaacttcagactccagcacatacacaatataaatcctagaaggtccacttcacaacgcaatcaggtagatcacatgagaaatatccaaagccttaacaaaataaaggcattaataagaaagtacactatgaaaattcatatacagcagaaaggtctattcaaacttcgaaggaattgataagatcacaatcatgtttacctttctcaaatactcaagggcttcctcactgactttacacagatctatacaaagttgaattcctgttattaaaactccatgatgtttttctttaagtaaggaagcagcaggatttatgaaattttctgccaagtctgggactttctttacgatccgtatagagcataatgcagcctgaaaatcagtagtgagtccaggtcagcttgcaaatatcaacggttatggaaatacatatttgggagggaagctaaatttaaattgcaatgaaaaaactgaagaagtccatggtcaacataggaaaagcagccatgaagcgccataacataaaacaagtatggaattgacaaattggatgcaattatcctaccactaaagaagttcgaatcaacaagtatacaagttaatataatgtcaagcgctcttcatcgtaaagttgccaacaagattttcaaaaggtagagtttctcagggtgcctaattaattaattttttgtcgaggccatcttgataacttcaaaaaattctcttaaacattcctaatatcacttttctggctcatacattaaatataaagacaactgcaaaaaaaatatatgtaccaagagaaattaaagtttaggatagttgttcatggcattacagttagaagaaacttactttcttcctgatatttggatctcgaaattgcatcaatctttctacttctggtgcaagatcacgagccatttctgctgaacaaatatttcccagagcacaaagagcaagacccacaatgtactggtttgagtgatttagatctctgaaacataagttaaggttgctgccataaaaggaaaaaaaaaaaaaaacaagaaatttt

SEQ ID NO: 296349 - DNA, 4653 bp, Cannabis indica
aataaataatagaaagcaaaaactataaagtgaaaagaacaccaaattttaaagaggttcaaccccttaagaatggtaataacctactccccttgtatttgtattgacttgagagaagaaataaagtgttcttcctctctgaagctcttacaatggatctctgagttattttctctcttagatcactattctctcttaaatgtttctctggattaattctttcgtaccccctcaatagtgtgattatgccactatttataggagcttataattacatgaagaatggtttttcttattctctaataaataaaataggaaactacattaattctataattacaatgtaaagaataggaaaccaaggcgtatgccgtattgtctttattctctgactaaatcccacgaatgtagggattatctacgtgtcttggaagcgatgagattgatctctagaattgctaatttatatgttttgttcggtacaaatggatctgtatcttggtcggacatcttcttgattaacctgttgggatatccgagtgttacaaagatttaaattaaccattcatgagctgctaggaatacttctctccgcacatgtagaaaaaatgtgggacacatgtcattcattctcattgctacgttagggtgcaaaaaataggatgacagtgcatattgttatttcacgacctagtctatgtgtcataataggtagatcaggtgtgcactcacctgtaggtgaaagacctagattaatctctacaggaagaaggtattatggtggttatcaggtgcgactacccagtttttagatgtcgttttctatggttggtattaagagctaggggtctagtggatggtgtgatatgtacgagtagcttgtcttttgtgattaatcgtgatctctctatttttttcttgtacatgatgatgatggtgagatgtttcattttaaaagctaaccatgtagagatttttattaaacaactgatcctttgatattagttgtttccctattgggttttataagctcactcctatatttttcctttcaagaactcagtttggtacttgtagctgtgaaagaatcgttgatggagaacaatgtgattagcttagtcctatctttaatattaattaactattcttttaaagactaatatgtaccaaattattaatggatggtctgatcactctaattgctatgaaataattaggaatgagaaatgatggatgcttagtattattttggtattttacaacttattaaatctaactatttggtgactacataactgtggggatattattgttttacatatatattgacgagtgtcctatattattacaattattttctacttattataggattatttcgttattttaaatatgtacttttatataattgtgtaatataaatatcatttgtaagtattatttttcaacaaaggtcaaagtgtgacatttgaccacctaagttttttttttttatgcaaaagaagacttcattaaaacaaactaaaaaccagtagcaacaaagggtgctactcccctttcagtacatgcacgggatatgtcgttcacagcagcctaggctgcaagcttatgagccacaacattggcatcccgaggcagccaagagacacttaaaccaaaagaagttttaagacaagaatacaaatgcagaaaaagattagagaggttccacacaggtatggaacattttgtaacagcgttaacaagttgtaagcatctgtgaagaagttagcatccttgcaattcaacttcaggctcaaggagaaggcatgacagagagccatacactcggcatggagcgcagaagtagcatgcatcttggcagtgagagcgtccacgaaaactccgtccttgttgaaaataacaacagccacaaaggcccagcttccacgcaccgcagcatcagagtacaaattaaactccttcaacacctgctgaggttgacaaggaggatcacaaacctccaaattctccaccgatcgagagtctcaacttgcaagcgagaaaattgtttaccaacttcgagcaattggagaggacatcctgcgaacgcaacgaagagccgctgtggtaaacttggttcctagggctcgggtcgtgacacttctgctccgcttgttctattatcttgtattttggacaattgctttgtttactgaagttgattgttttaaaaaaaaattgtaattttcttttcattttttaattttctattttatgtgtatattttgtaacattatttaatttttgttttgtcatcatttcatagaattttattttattggtttgttatttcttgggcactaatttttccagtagtttgatcgtggaaataataacaaaagttgcttaaaacaaactaataagagcctacaaaataggagaatttatacgcaaacaaagaagcagagtgactggaaatagaatataaaaattaaatatatgtactatactgaactggccgtaaagagagattctgaattgctaaatttttttaagaaaatcataaggtaataagcaataacatattattaataaactatatatcagcatcttatttaaatgttcttattatgatcacaacagaagagtatactcccacaccaaatcgtttacatgatcagcaacaaaagtaacccaattttttttccaaacgtaaatatattatatataacatccgtgggctatattatcaccaaaacccccgggtaattaagaaaacaacagtcttattcttaaacttcatcattaatatataattaattaattataaaaccaacttataattagctttataattaggttctcaccaccttaccgttaaacctcctggcagcctcgtaacagtccatcactgcaccatgagaagaagcaacagtagatcccctcgtgtaaatcgaccccaccggcgccgccgtgtgcttattaatagtcgtcccgtacggactaccagctgcttccgccgtatagtgatgaccactagtcttgggtaatgggttgtggccgtggccgtagggcttcacagcatgagaattatcgctactaatagagctagatttcaagtaatctatagcctcttcgatactattcgtgggcatgctaagtgatccgctgctcgcgtgaccataatgagtagtaggattataattagtactaccgacaatcggggtcccatagcctcctcctccgatggtggctttgccgccgtgaccactgttgtgatcataaatattatgcttaattggtacgtgttgaatcgtgcgcccaggcttgtaataatcttcttctctctcgtaatcatcgtcctcatcatcatcgtcactgctgtaattgccatagccagaggttttgtggtggccgtaatcatgatctttcttgttatatcggccaccaccaattgagtgaggagcaatagttgggcttgggcggatattagctatgccatttgagggagtactgtacctgtgaggcgaaggtctgctggcttcgatctggactccagtgaggaatcggtcaatctcttgaggataatgacgaccgtgacccttgtcgtggccgtacggactcgagggcttacggtaactgtcgtggtctcctccgtaggaaccgtaattagttcttatcggttcaagcttattcggcgatccatagcggtagtcggaggtggcgatcatgggcgaggcagagaggatgtgctcggtgatctcagtctctacgacgtaggcatcagcgtcgtacggagaacagccaacgacagttcttttcctgccatcgttgtcgtatatgaccgtacgacagagttgattactgtcgttttcgtagtcatgatgaccaccgccgtagttggagtgacctttgtatgggtaagcttgatcacctcccaatcccattttcttcttttttttcttaaataaaattatatatttgtttttttcctttgcagattttgaacgtgttgagactggtatttatatggaaagatttggttgtagttttggtatataacttgcaattgggaagaatcaggtactatatttatagattctttaagctagctattatctttgtcatggttttctttttatatgctgttaggaaaatgacctccattattataatgtccattaatagatatgagagatgtgagctgggttttcttttctttacttccagcttgaatgggaaaacgccactgattatatatatgagaaatcacatgatattctggttggtaagggaataataaaatgagaagtaggaatacagtagaaaaagtaattaaatgaaaataaaaaatacataatatggtttacatcacttattttctttattcagtgtcgttcacactataaaaaaacatacataatttatctttggttccatttggtaaattactaagggtgcgctctcaagccatttttttttgaatagatattttgtttttttctttaatcagaaaagaaaatatatttaaaatcatgtttagtaaaactacaatttcttaaattttaaaataagaatcaaaatttcgaaaaaaaagatacttttaaaataattcaaacaattttttaaagaataattagcttttttagtccctgtacttatgacactata

SEQ ID NO: 296350 - DNA, 2031 bp, Cannabis indica
ttaatgagccttagtctacgagtatttgatatggaggtatttctttacagataatattctactccattttccccctctccaccctaaatatgcttggggggtatttatagctattttgagagaggaaaaaggcctctattgtctccagcgtccaccttggctttgtacaaagttctcaaattagcaaaatagggtatgcgcgtctacatagtaggttacacagggtttaggtgagacaaacccttatccttccttgattgatgtgacagttcattatgtagtcatcacttacatccttgattaatgcgtaatcaccgaagaatgagtttaatgcattcgacacatattttcatattcgtctataaacgtttcctccatgctgcatttaacgcctgcgaatagtttatctctaggaccctaggcccaaagcccaactcctggagatggacaaaaggttgatccttctagatccagttatagctctaggaggagccatttgattatatccacttaaatcataagcctgcttaagatatcctcgagcacctccaaatcgtaagctttaattgccacgtgttcgatgacagagttgccacgtatattggacaaaagcaaagcaatatttacaacccaagtcttatttaaaaactttataaaatgagacttgtacattgtctatggtctcagggagtgatgtggtaaacatcttgcgcgggcgttggctattttatttataatcattccgcctcgttttctacaagcaacgattcgattcctgcctatttgatagaccccttcattaatgcagttgtcagagaggtactcaagcatttcaaccgccctttccttttatcttgcaagtttatcttgaccgttagatcactaaaattcggacggtttgaaccctcaacatccgatagtactcgattaggttcgacacttaccctgaagggcctataaaagcttaacccttttgtgactgggacttttactcaccatatttctatttccaggccttacaacccttccaacaaaattccagactccccagatttcctcctactcttcatccgtcgttgccagacgaactactaccgtcatgcggcgacttccactccagcattgtcttcatcgtgtaagtttctctctctccctctcttgacttttcagcatggttgagcagactgtagcagtcagtagttcatcttttaggaaacattttgtgtgcatgtcttccagggtcatagctatggcgatttttcttgggaagtcccttttcaaaatgtctgacgttgttgatattttatttttctttttgggacgaaaggaaaaagccctttgttccttcttaatagacgaattcagtttatttatggttcttgcctagaaaatttggtaggaaagaaacaactagacctttgaagaaagcaatcaaattgctagttcgttggtggatcagtgctacgagcttttaaaagattttaatggagagagcttgaaggctaagaatattaaggaggcttccagatggtctcctccctcctgtttcggtggtcaaaataaatgttaatgtgggggtgaatgccttgtccagttgctgcagtgtagggtttttgtaacgggatcacttgggtaatattttggatgtgccaatgctgagtttctgcagcgtcctctgaagcccattgctattgaattgtgggctattagtagagtggtcaaagcggcgaatgaagcaggtatctccaaggtgttaattgcttcagattgtcttaatgctatctcctttcttactaatccaaaaaggggcatcagtgactaggatagtttggtttgggacattaaaagtgtttgttgtaagtttgagttggtttccttttagtttcgagtgtagagatgttaaacttctcgctcagtacttagctaagatgactttagatgttaaagcttcctcttgttggaacataatataatttttatgacacattttaatatttttcttttaatttctaaaattatatgtgttttttt

SEQ ID NO: 296351 - DNA, 2801 bp, Cannabis indica
caattttggttatgaaatggtaatcacacacacttgaatgagaaaaaaaggtccaatgttgggttttattaataggatggtaatttaacctccttaccagggtatacctgttgaattagtcttacagaaaaagaatgatgcttccaatcataacataaaaataaatgaaacaaataaaacgaggcatgcctcaaacttcactattattttgcttggtaattgtatataaaaaaatgatgcttccaattaaattgaaagttttacaagttacagaagaacaaaatttaaagtaacttcccccatgaccctcaccagtctaacattccctcttaattctagccaccattataaaaactacactaaaaaaaatgcaatgctattcatcacaataaaacttttggcatgatctactaatcaaaaatttattgtttccaaaaacacattaataaattattatactagtaggtactcaccactaatttctctctctcggttgtcattatatatatattgacatatgaatcatagtaaatactcaatcattataatgctgtaatacactttctgaagaagaaagaaaaaactagcagggacaaaatctttatataaattcactcttcccctttcactggagagaatggaggggtcccacctgctcaatttatctgtgtttttacttgttcaagtttccttcaagcctgtcaattgcagcaccaacaccactctttctctctccccctatgggatgtgaaactgcattcccttcatttgctttctctatcagtttcaaatgaacccaccctgttataacattaacatgtactttctatatcagctgacctgtttcatattatgcacttcatttgatttttatgagcaaaaacttttgcaattattttcctgtgaggttctctcaacactattctaacatatatgtaataggccctcttaatataattcattcaaattagttggaaaactgatattttgatagttcagtcgttcataggatgaaaatcattaccaagtgggaagcaaatagcagcacctaggactgatcccatcgccgaattccttagacgccaagggagtgaccccggtactgatttagataataaaagaaaagaacaagcttattagaagcctgagattatagagcaagagctaaatggtgaactgtaaacatacatgaaaagtttgaacatttggcctttcttacatatcaaaccaaacgtagcagcagtagctgaaccagctccaacaacattgaagacatcatgaacacctcttttctcagcaagtacatcttgtaaaccataaaaaacagcggtgaagagcccgagccgtactccaccaataatcgagcccttagtgattcgaagaaacctcttctccattgcatctctcattaagcggtactgctcacgcttgtctggtgtactcccaagcttcaacataacttctgcatccttactctgtcaaaaggtggtggtggtaaaatctcactaagtttcaacgaaaaaaacagaaaagggagtataatataacaatgctgaaggacaggcaaaaccaactactcaactagtccattcgaaaaattacacaagatggttctgagataccgaaaaaaaaaaaaacatttagcaattttagcataatatcatgccaagtctcttctttgaaagttgcacaacaaacaaaaactttaacatgcttattgcttatgaacctaactcctactgtttggttggaggtaatgaaatggaaatgaaatacaaaacaaataatctttattccatttctttggttgtattaaagtattgaaatgttattttaataaaatatttctatcattttggtaaaatgattattctattttaaaatggaaggaaaaaccattctctaatgcaagatgagtaaaaatttaataatttttttatcaaaattttatatgtattttaaatttgattcgattatatttttatttctattctcattctcattctcattccttcaaaccaaatgccatcttagtgttaaagataatcacttgtagccttttatgtctgtagcataacttacaactgaagcagaagcctccttgctacctccatataacatgcctgcaaatacagcaacgagagttgcagggccccaacccacagttcctgccagttttggagaattctaattcatggaaagggaaaaaaaaaaaggaaaattggagttaaattttgcttgttcttaaattcaataactccaaactacaaccggccatttacacacacaatgatgcattgaaaacacaagcataaaactttagcagaacccattccttatcttgaatcttgatacagtagtcttactctaagtacgtgtgtgtctataatatatatatttaaaaaaagaagaacctgtaccaaaaatctagaaatccctaatccccaatcagatatcaagtagaaatatacttacggcagagatggtttcttcgggagcttccgccatgagagtatattgaattcgaagagtggcgttgaagaccggagaagggtttagggtttaggaggtggtgagggaagcgcagatgagatttagatgaaatttgtgtgagaaagaaggggcggcgagaggagacggacgatcgtgactaaagaagaagaaggaaatctgttttcagttaaagggggcatcaaacacgatcataattcatacatggaaaaagtagctcacattttttctttctttcttccttgaaaattgaatcaaatcaaattttctaataattttaaaaaatttaa

SEQ ID NO: 296352 - DNA, 3868 bp, Cannabis indica
atgctcgtgcattttcaactagtacattaaaatagaattaaaaagtctcaaacattacgaaaatatttttttaaaaaaataaatatagaaaaagatgattccaataattaaaacttaattttaagaataaactatatttatgtcgtttctcaaaaaaaaaaaacagtagtaacaataattggcttgtgcccatgctcaactcccacaagcattttcatctttttagaagcaaataattggctttgatgactaatacatgcttaaataataataataataataataataaaaaagtaatgatagaaacaaaagacacatttaagtaaacaatccaatatgaaaaacttgacagatcaagaagaagggagaaaatgtcaaggagtgttgtgatcaaaggtttgagtttgagatgaacattggcatcatggaatggagatcaatacaaacatcatggatagaaaattcaagcacaaaactagaaccaactaaatcttcaaagaaacttctgcaacctgttatacttcaaccagtgcatagctgctaataaaaccagcttcccccgtttctgttcatacgaaagacgattaataacaagaagagtaggctttggaagactagaacaagctgcccatgctcaactcccattaggcattttcacttgtgtcttaccaaacaaagttggtacctcaaccttaccaacacaaaggattgcaaagcttaacatagtttttttcagtacttattcaccaagaatgctgtaattattgaagaaagaacaagaatttaacccctatatcacctatatgatataatcatacataccatgaggcatgaattcactaacaaacgacaagaaaagaatataagcctaaatactatactaattctcaaacacaatacagaagagaaacagaggtgtaagaatatagaagattgtattactgaaaatggaacacattacagaaagaatgataaccagccaagtaagaactttgaggcatgaacctctcagccatacaattaatggtttaataacaagctcttcaattccccaagctaacaaactaccctataaagctccccatctgtcccctctaaccatctctcttaatcctatatgacctgaacaaaaatgatgcattactgcctgtctgtatgttttttcagaaaaatgtctatatctctaaaaacccagtgtgtatatatacaaagtggaacaaaatcaaaaaacctggtatggatcacaaaatcggaacaaagcctcaagaaaaaagtctgtcattcttctcatcaagcagggaaatccggaacaattccagagttaaacacatacaagtccattaaagtgttataatgacccttctctatttcctcttctttcacttgatgaagaaggagcatctcaataatcaaatcttcccaatcaatggcactaaattttgctctcttcctcttctttccaagctgttcacagtccacaacataattgttaacacaatcatctgaattcgatggaaacataattcgatcaatgcgtcgcttagcagcattaatcttttctctcctcttctcataaaccttgcaattattaacaaacgatggaggcaaggcattcaacccaacatctttctccaatatttgcttgagtaaaagctttttgctcaactctgactctccactccaccactctgtgcaaacaccaatgtcaaaattcctgttttctcttctatgaaccacacttccgctctctctagaagattttttacagcccacttcattagaaaacttttcataaatcatcattaagcattcggacgaaagttgaaacttctccatatcatcaatacttggcaaacccttgttgctatccaagtctaccttgaaataatcaataccatcatccacattaaccatatcattctcatagtcaacatctttgctcaaacactcactaaccacatcttccaattcaaaccgcaactgctccaaatcgttcctcttctcatccgatttcgacatagacttatgctccatatactgaatcacaaaaggagcattattcacaatgttcttaatgttaacattcttcccccaaggcaatgcttgagccaccttaacaagcgcctccatcagttccttataccttaatttgctcgtgcaaacggtagcatgaacttctttagccacattctcaatcctaacattctcaatttgattcaactcacccaagaaaaccaaaactgcagccaccaccgcaactggtcgcctccctgtggtgagagaccatttaaccatacattgtatcaaaaagatcccttgtcgccggattctctccctcgtctcatccccaatgtttccaaaaatatgggaattttgcaatgccctttcgaaagaactaagcacattgaattcagggtactctggtctcttcaaatttagaaactttaccacacgagaaaccattttccccaattcaaactcatcacaaccaacaaccgaagaaacctcagccattggcatcggcaaagaccgcttatctttcctcataacaacataagcacaagcaccaacaaaaaccccaaaccaatcaccaacgccatactcaccttccgtaatggaactgaccatagttttaatctcgtaagctttcgaacccaaccctaacctatgcaatatatcatcaattagtttctgagcctcaaaaattttcttatccttataatgaaaaacgctgcctgtacctgcggttccgacgcggacgaaggtcccttggggaccgttaatgcctccgaagttatcctggaaattgtcgaattcttggcgaagccgcatgattcgcataccaggctttctgagtcgaagtcgcggactaatgatttggacttgcaattggcgcaggaacctgacatttttgaatagtaattaggttttgcaataaagggtctgtttggttgccgagaaaatacgtaaagctgagatttgggaaggaaaatggcaaggtactactacaagttttgtgtaaacagaggtaatttgatgggatagagcgatggaaaagttgaagaaattcatgcatatagaaaatcaaagtgattgattgaaatcatgggtttgattgtaagaactaaaattgatggattcatggaataatcggccgggaaagttagagaaagtgagaaagtagggaatgggaagaggaagggattttagggaacggaaaggtttttttcttctttctttccaagcactcccaacatcaggattgctaatgtgcaacactaataaccgacactttttataggtgacgctttatgattagttaacgatatttttcaaaaattattttttaaaattatataaaactcgatacttaattacattaatagctgtatgagaccgaaaaatatgctagacaatattaattccttttaacaatttttttaaaaatatattgtataaaatctacttttccttttatattttataggtgagtttctttaaaatacatcataaaaatcatactttttttaaaaaattattatattttatttattttaattataaattattaatatatacatatatctacatacaaaagataattattaaaatttaaaataattcataaaatatatttaaaataatgaatagtttttaataaatgtaaatcatgaataatgtattttaagaaattttaaaatgaagaaatagtttagaacatctattttagcgtatttttgtacggttctttaaatatttaaagctcttctattttaaagaagttgttgagagtactctaacagggaagggagttcaaattctcgcgtttggttggaggtaatgaaatggaatggaaaggaaacaattt

SEQ ID NO: 296353 - DNA, 5373 bp, Cannabis indica
tttaactacttaataaaaaaaatcaaaaaattatcttttttttacactaagttgaaaacttcaattcattttatttgtccgaaaatatatatatatattttaattttttttcagtcaatagaacttgcagtccatgtaatgtaaaaattagtgcatacataattataataaactcaccatttaattataattatattctagtaaacactactttgaaagttgaatataagaataatctttctaattaattaatttagttatcttacaatacaaatgaaataataagttgatttggttttggtatatacatcatatacaggtggggtggggataggaaagagatgagtggttaagataatggtgatatcgaaatatatataactcctatgacagatgacatccaagccatgaagtgaagttatgtatagcgtaataagccaactcacaccaatttggatagtagaaaagaaactgtcctactcattttatttatatgtgtatattatcatggagaaggtatgatatgattttttttaatgcacaaattaaagagatttatataatatatcatatatggccaacaaaccatatattctgtagtaagcattctcaaatgaacttacgaatgagctacatatatatatatatatgttcactgaaaaagctcaattcaacagaagtgtgtgttttgtattttttgaaggaattattattattggttggcggtggtatagctagctggcctggcatggcatacgatcaaaataagagaaagtagtttaatgttaaaagaacaaataaggctgcttttaaataataactgatcaaaacaaaaagaaatagggataaaattaatacttatgatagatatagtactacaacttcgtcactcttattaattgaaggtataaataatttaggggaaggtaaataaaaggtacgtactgtataaataaatagtgtataagtttctgaactaacacatttattatattttaattactggaatcaacaacttgagttgcctttaatttggggtttgtttgacaatatttggccattgttatacctatgtctatggtcttttcaagtggcttaaataagaaaatgctaaatgcaaatgaaggtttccaatggtaagtaggtgttatatattattattataagttgtcccatatattttaatttaataaggatataaaattgctaacactagaaaagtgttacctttaatagtattgcataccccaaagtgtataataatattactattgttgcaattaagtattggatctcatataatttaatttaataattttaagaaatatcgctaattaatcatgagacgacactattggtgcctaataacaatactcaatgaaaaagatatttgtatgtaattgttaacaaattaagctttttaggccactaaatactttgcctcgccctacttcaaattgagtaattttttttttttttgaaaagtctcaaattaagtatttatattactaaaaatttacaaaacaccgcaaattttaaaaaaatacataagacatgtaaaatcttaaaagaatagcaacattgcaaatagctagtaaaagtgaaaaattctattttttttaaacatctattacacacatgtattcagataaacaaaaaactattacacatttgtaaaaaaattcttacaattttgtaagctgcatttacaaattaatccgaaacaaagaaaatctcattttgtaacaaaactttatagaactaactccacaagtagaaagatatatattcgtaaaataatttataaattttacaaactaattttatatttttgtaccaaatatctaataaattacttacaaatgaagaacaaagaataaaggttatttgattctatatatacccgcatataaatgtaattcatcactaataatatgtattacatttgacacaatttaattagcacaatagaaaaaaatatatatcttttaaaaaaagctaaaatatgacattccataacaactttggtacttttgacaacttttagcacaattattttttttttttttttttacgaaaaggctaaaatatgtcttgcatcataaagttggcactttattggagattctattctaacggtgtgttgtaatattgtaaatacgggatgaattttttaacacgagcctacaaaaaatacaggtagcacgacatgacacgatgctacaaattgacatgacactgtacggaaaatatgtccttaagcacaatacgacacgagaagcacgaaaggcacgacacacaagcacaaataaactaacataaaagcacaacatgcaacaagtccgaaaacaacaatattaaaaaccttataatttattattattattattattgatatatgaatttatcaattataaataagttaaaataataataaaatttaaatataatactgaatattataattttataattaaaattattaaaatatgatctgattaggtcgttagcctccctatttttgtggttcaactctgcctgttgggcttggaagatcgtgacttgctgatccatccactcttggaattcatgtctttactgggcgaaagcatccccaatagcagcacgtgtttcttgttggtcatgatgaaggagatttgtatgaccctaaacttgtcctactgcctctctcagcctggaaaattcagtgtcatcccctaagtccacgtgaggttcatcaatactagggttaccaaccccagatccagtttcaccagcataacccccgtgctaggaacttgaattattgattggatagtgagtctagtaggaggttgttctcttggctagacctatgtgatggaggtgccgaccaactggccggagcttggtggtcgagtagccatgcttgggttagtcataataggtggcacttggacattaggatccacagccatagggtctcgtggttcagtagaattctcacatcttgtgacagccatgtagaatggaaataaaaaagatgggagctttctgaacgagaattttgggctctcaatgaaagtaccaaaatattgaatgtaaatttagccaactcgcatggagtttgactaggatcgaatttcgctaatggcgatcaagtgcgaaatgataataaatatagacacaaggatttatagaggttcgacccctttgatcaagtaatgacctactccctttttgttgtattcactcctgagataataccatgcaaattacatgctaaaaccttgtaatttttagctatggctctctttagtattataataatgagaatatgtgttgcaggtgaaaaaacttgaaaagagagggagttctatgccttagtgcttctgagctcttaggttcataaatgaattcaggttgaggtcctgagcttggtctttttcacgtagggttatgaaccttttatatagtgttaaggtttacaagttattatttatgtcaaataggaaaatatccttttaaaataaggaagttacatcttatatttgaaatacaaaatagataaccgaaaatccctaaagaatagaactgctatttgttgatgaagaattcctattttcgtgggcaatttgaattgttttgaagttgtaggagtgttgaggaagatttagaaggcttgtgggaaaatagaagtgttggatcgtgacatgtatgcctggccagccagccatgtttggaggctacctggtgcatggggctatctcccctggccgaacagctaaaggtccagcaagaatcttcctagtgcttgcatatctctgtctttgcttggtggttctgatatcagaatgaacttgcttcagaaccttgaagaggttgatcttgtaagtctccatactgtcttgtttgagtccatcttgaaactattggatcttgaaggatggaaggctgcacggtacaaacctggtcggtcagtgctgactttccatatgatcttgatgtcttgagggttgaggaaccacacaacactactctagctagccagtgatgggctcttcttcatgtgtcttctgctttttgccacgttaaggtgccacattaggtgggtaaaaattggaataacacaatcaaactctagacagatcaacaaggcatgtaaatagccttgatgcagatacataacgcacacacgatcaactgcaaaggaatagagaagacgctaaaactagtgtagaagaggaggcacttcgtaccacatccaagagatgcgtggctgtgcaaatagcacataataatgccttacctcaatcaaaagacatggacaagcaggagatgatctagaataagctcttggtgttagaagcaaaaagctagttgggagtgaatagtggattggcaaggatggagggaacaatgcaaatcccatttagaattcatatccttagagtagaggctccacattttacgtagcaccaaagctccatgagtatactagaataggggacccttcagagtatatgtatgctagttgaaacaaaagatgctgacagcttcagtccctttagaagaccttgaagctatcaaatgcaaaaactttactcaaggttttagaggacccgctctacattggttccataatttattgttgggaacagtaaattcatactaggatatgattctcaaattttagactatcaagctgacagaagtggatacggatttaatgttgatacatcaagggctagatgaaccactagaattttttttttaaaaaaaagttcatcaaggaatatgtgagtataccgaagtgcacagattcagtagcatagaaatagcacctgaatctgtgcactatcaagtgctattcgctccactacgaaataaaggaacgaccaccagcaactcgactgcactgacgaaatgatactcgataatttagtgatagaggggtggtgagagtagcaacatctaataacactatatgaggaaggcaaaagggatgaacttcaataaatgacaggagttaagaaaaagaaacaaaacagctcaaaacaacacgtgtcaaaaccaaatcttcaataaatgacagtattgttaactaactaactaacagtcttgacagttggttagtgttagataagtttgttattttgtttgttagcttcttggttgttttgtttgtaacaattttgtattttcaatgtgtatataaactcttaattggtcattaataatatagagctttttctgcatttctctctggtttttgaccatactattagggctgtacatcggtcggtttagtcggtttatactatatattttccaacccaacataaagatcgggttataaaattttgcatgcaaactgcccaatttaaaaaaaaa

SEQ ID NO: 296354 - DNA, 7788 bp, Cannabis indica
ctaatccatttcttaattccgggtattacaaaactcatccaaaaatttctaatccccaaaaggaccgaatggattagttgcgcccttcccacaaaggataagttcttgctagcccagttgtgaagttttttatgaattttgtcaagaatatataatgtcgcaatcagaagcatgccatttttttggtctaaggtgaacccccaaatagttgagaggaaacctaccctcttccatttgcatcatctccaataactgggctttgcactcatcttttaccccaccgaaataagccaaaaagttggacttgttggcaataaggcccgtggtttcactgaaggtattaaaagcccctagaatatgaccaacagagctttcattacctttgcaaaaatgattaaatcatctgcaaaacaaagattcacaagctttaaagacttacagagggggtggaatctgaatcccttcaagttggaccttggcatcaataatctcgtcaagtactccatagttaagataaacaaaagaggagacatcagattcctttggcgaagacctttctcccctttgaaagtaccatgcaaccgcccattcatcataagaacataagaagcaccaaggagataacttattatccaataattgaacttggagggaaaacaaaggcccttgagcgaatcagagataaacccccagtcaactatgtcatacgccttgctcagatatattttgaagatacttctagttgaaatattgttccttgtgtagccttttagaagatcttgaaaaattaagatattgtgagccaattgtttatttttaataaacgcaccttgattatcatgaattagacttggaagcacctttgaaagtctcgcacagatcatctttgaaatacatttatataatgtattgcagcatgctatcggtctataatcactcgcatttttgggactgtcattctttgggataagcgaaatagtagtctcattaagctctttgggaagaatgccattctgaaagaaacccaggactgctttggaaacatcctctccaatctcattccaaacacctttaaaatatctaaagcccaaaccatccaggcccggactcttggatgtgtggatatcaaacaacgccttcttaacatcagctttattaaaaggccaaataactggatttgttgcagaagatccaatttattctcattgtctaagcaactctcatctatccttctagtagttgagcttttctttcccataaaattacaaaaatgatgaagaaaatgattaactactttgggataatcctcgataattgtatcaccattccagtaagccacaattttattatctgattttctttttttcatgatgtcatggaaaaaactagacttttcatccccatatctcaaccaagttactttcgaattctggtgaagatagcgaatatattattgtctagtggttaaaaacctttgatacattaccttctcaattcggcccatgatatgacaacttgggttggcagccaaatcttcccgagccttgtcaaactcctcttttgcttccttgtactaagttctgacatcattcttctcagctttagactagatttttagagagtgtttgatcctataaagcttcttcacaatgttgaagagattagcttccttggagtccgtccaccctttagaaactacctctttaaacccctctttaagcaaccagtaattgcagaatctgaatggccttaaacaagaaccgcctgcttctaaaagtttgatgagacaaaaattatggtctgagatagctccccaatcaaatcttacttcagtgttcggaaaacagtcttgccaagcctcattagtaaagactctatctaattttgagtagattctctccccctcctcatgcttgttagaccaagtaaagtaagccccatgactttttagctcatcaacttgacccaaagcgaggcattcttgagcatcatgaattttaaaatctttaacttgtctgcctccacatcgatccttatagaagaacatagcattaaagtaccctataatgatccatggctgtctcatttttccaaaagcatcaagtttactccaaagatcgtttctctccatcaaagagttacttccatacactgctgttctgaaaaaatcttccttgaagccaaccatttttactttgaaatgcacaaattgattatcttccaagaccacctccaccttgaccaatttatctatccaaattagcataatacgataagataaaacctgactggagtaccaattccaattagggtagttattcatcatactctgagctttttcatgtctaattttggtctcaaaaagagcaccaaaaccgactttattcacattacacgtatcaaacaaatccagttggtttcttttttattcagccctctaactttccaccccttgatattggatctatccatcataaagagatttttgaccagaaacgattgcctcttcatcatctttttccaaaacctcataaccatttatgattgtagcattagtgctcgatttcatgactgttttggaccttttcttctaggggttatctaatttcttgtatctttactcttgttcagcacccgaaccttagagttatcatcttctactagttttttttgtgataagttatcatcttctactagtttttccttgcattcttgtgaggatacttcagaacttgcaccagtatagtggtgctgggttttctcttttgtattatagttggatttttccatcagattctgcttgctgctgtagctcagaaccagaactcaagttctccttgttgtctattgagtcgtctttcttttctctttattgcttctttttccaagctactggtttgcatttgttacaattggctacagtatgtcccaaaaaggcacatgttgcacactttgttggcaaccattcgtacttaacagattgatccactagctgttttcgttcattgacataggctatcaattttggaggattgtcaattttccacatcgactaaaactcttggaaacttgatcatagtccttttaagagttaatataaaatatgtagaaatcgtaataaatatggcatatcttctaacgcgttgggtattatagagtaccttatgacaatgctctagtgaataaggtaaaaaaaattatccaacttaaaccaaatgagtaaaaatgatgcttaaattttcaacatgcaataaaatactagaactcaaacaagtatgtgataaaaaaaatttgctaagcagatgagtactgtacaatatacaactttatctatgtaaaaaaaaaagataaatcttagtaaaaatttacaaacgccgtgcttaattttccaatatagtaaaagatgacgacagagaaataaatatgatcaatgaaagattttcatagcaaaagtagaaaccaagaataaaaaaataaaaataaatagacaagaagattttgtagccacttaattagaagcctttatttctgtaatacaaaatatgtgtagtgctagttttttgtccaccttttaatctttgtgattagaagcatttcctgtgaacaattgacggtccagattcatcatattctgcctttgcaatccacatctacattaagaaaaccaacaaaatagttagtatagacagtttttccatacacatgtaaatttttttaccatgtacatttatgtgatggtgcatccaatccattacctgttggaaagtactgagagatgccaaaatggaacctccaatccaaacactgtactttctttctggtggagcaacaactttaattttcatgctgcttggagccaaagctgtaatctccttgctcattcgatcagcaatgccagggaacatggttgaaccaccactaaggacgatgttgccatagaggtccttcctaatatccacatcacacttcatgatagagttgtatgtggtttcatgaataccagcagcttccattccaatcatggagggctggaagagaacttcagggcaccgaaatcgttcagcgccaatggtgatcacctggccatcaggcaactcataactcttctcaacagatgagctggtctttgatgtctctagctcctgctcataatcaagagcaataaaggcaagtttctccttcatgtccctcactatttctcgctctgctgtagttgtgaaagagtaaccgcgttcggttaaaattttcatgaaggcatctgtgagatcacggcctgcaagatccaaacgcaggatggcatgtggaagggcataaccctcatagatgggaactgtgtgactcacgccatcacccgaatcaagaacaatacctgaggaacaacaaagcataaaaagaacattagttaaaagggaaaaaattcacgcaaatgatctattgattgcttaccagttgtacgaccacttgcataaagtgaaaggaccgcttggatagctacatacatagctggagtattgaatgtctcaaacataatttgagtcatcttctcacgattggccttaggattcagtggtgcttctgtaaggagaattggatgctcctctggggcaacacgaagctcattgtagaaagtgtgatgccaaatcttttccatatcatcccaattgttcacaataccatgctcaattggatactttagagtcaaaatacctctcttagattgagcctcatctcctacatatgcatccttttggcccataccaaccatcacacccgtgtgtcgagggcgaccaacaatactaggaaatacagctcttggagcatcatcaccagcaaaaccagcctaaaatttcaatatcaataccaaaaatataattgagcaaaaatgcatctcaagaaaactcgttaatgctctaaaaaaataacaaaataatgaattttgaatcaataccttcaccattccagttccattatcacagacaagaggttgaatatcctcgctttctgccattttatattaccttttgtagaaataaactatgtttaatgatcctttctgtaatcaaaatgtcttcttcaaaataattttataaaaagttatcatataataataaagaacaaggaagagatcaagcattataaacccattttaagttatattgaaggaagaaaattatgttatcattatcaaaaatactaagtaatgatgtaatggctcgtttgatttagtttccaaaactgaccaagtaaactcaaaaacttttgctcttaaattttaatgtaattttataaaacaggagaagcaagcatatcttggatgtaaatgagtttttcatacattatttaactaactacacaaaattcatattatttcatttcatctaaagaaattatgaaaaaatcaaatgggtaatgatgaatcataaaattgaatcaaaacaactacttgagaacaaaatgaaagaaaagaaaatacctttctactgagaataagagaattttaatttcttaaaatatgttcattataaattttgatgtttatactcaatgataatttttaagagcatatgtataaactataaaaggaaaagctgataaaggaaataattgtaaattaagagtatcgatttactcccaaaaacgaccatgagattgtcaattataaatagtgttaacaattttcttagaggcttaacaaattttttggaagacttagcaaatattgtaggatgaccaagtaaaatcgattaatgtttgttactttagaagccaaatatagattaataaaatctaatgattgagaatgcaaaggtaaaagtcaactaatattttataacacttaaataaatatgaaatgatgtgaaataagaaagtaatgtatatacgtacatttagaaaataaaaatttatagcaatatatatattatataactttattatattatatatacttatttaaaattaagtgttcattttttttttgaaaatacttgttataaaaaattaaaatagatagtcatttacaataacagagtaaataagtagaagaatatttttcaaccaaaaacaagcctcgtccatccctaatgcaaattttgccaaactgtgagcaaccatattagttgtacatttgacatgagaaacagttacattaggaaaaaaaaaagataaaatataagaaatatctacaaccaaatcatgaaaagaagagattacattgaagggagctctcaaagaattagaaactatcattgttctgtctctacaagtgaaatcagcagctgctgttgtaaggcccagtttaagctatggaaaatcgctttggcctccatttcatgagatgaaaagtttccaattctcgacatggagagagcagcagtaacacatctgtttaagtcccgaactatagctccaataccaataacattcttctttacatccactgcagcatcaatgtttagttttaatgcaccagcaagtggcagcttccatggtagtggaccgggaacatgggatgttagttgtgattgatcaacagtggcagtagcgtggtacttgagatttgttggtcgatagttttggaggtagatagtcacataaaaagcaagatccttagctggtttagcactttgaccatgaacaactttattcctttcactccaaatcgaccatagtgtgtaaaagatttatttcatctcaaatttagaatacattgagtttagatggaataagtaatcagcttttcgcattgaagaacatgcttgccaattgaacttcaggttcaaaaacctccaaaatttttgtgcatatttacagctaaagaaggtatggccaattatttcccaagcttgatggcagatagagtatgtcgagttcgtaatgatttttcttcgaactaaagagcaataggtaaagcatcgtggataacttgccaagaaaatattttcacttttggcagtagttggagagactagaacaatttccaccatgaagaggctgatgttaagcttgaagtattatcagcttcatcgagagatgtcgtaaggtggtacgtaaccagttagtactgtataaaaactggagtgatgatgatgccaaacaagcgtatcattagagttgaagtacttaagtttacattttattacttataaaaaatataattttaattttatatacattcaatatataacatatattaaaaaatatatataacatttattaataattaaatattattaagtataattaatacaatacatatatatatgtaatttttcaaatattatatatcaaattttatattatattatatatattttattttattttttgttataataaatattatacttggacataaataagatattggacgatttcttaatgggtaatacccattaatgggtagtaaaaaaattgatgaggtggcaatttagtgacttggtaaagtaggttaccaattaccaacaagtttttttttaaaaaaaaaaaatatatttccttttttaattatagagaatggtgattttgagaaattatttttagaaattaatttattttacttaaattattatattatccttacattaatattaaaatgtataatgcaatattaaagatctatcttggttgaaaggtttttttcttagtttatgcattattattattatttaattttatttttatttttttattctttttttcctcccttcctatctattggactttgtgttttaaagttgtttttttttttttttttgtctatttgggtccaattaacagttgaatcag

SEQ ID NO: 296355 - DNA, 8525 bp, Cannabis indica
aactaaaattgtgcttctcgaagggaaagttaagcaagtcttgtacatgcttggagatatatcctcaagcttctctggatatgccctacagtgtcatctaccctccatggcttctgtttctagtacttcaaattgtattatagtcaatacatatacctcatgtactaaatttgatatcaatcaaactttagatgcttttacttactcttctcgtagtcctacagtttttctattatttgtcagcaaaaatgttaatacctggcattgtattcttgggcatccagcatctaacaccttgaatagcacgttatcttatttaccccacattggctctattaaagatctaagattttgcaatgaatgtcagcagggcaagagtcacaagttaccttactctctgtccaattcaagggcctctcaaccacttgagcttattcacacagatttgtgggaccacctcatattctatccaaagttggctataaatactatgtttattttttgaattactatagtagatacacctagatttttctcctcaccttgaaatctcaagcctttgaagtcttcatttagtttaaaggtctagtggaaaaacaactcaatttgcccatcaaatatgttcaagcagattggggtggtgaatataggaccttcgagagatttttgagagaccaaggaattcatttccaacgtccgtgttcccacgatcatcaacaaaatggtcgagcaaaaaggaagcacaacatcaaagagacaggtcccacaatgattgccaagtctgttttagactttagctactagtggcatgatttcaattcagttgtttttactataaacagacttccaaccagggtgcttcacaacttatctccctatgaaacattgtttggttctaaacctgactacataatacttaaaccttttggatgtacttgttttccttacttgagaccttataatgctcacaaattggattacatgtcttaatagtgagtttttctttgctattcctctcaacacaaaagctatttctgtgaaaaaaaggaagaatatatgtggctcaaaatgttatcttcaatgaagactctgcaacagttgccttgaattctcagtcttcatcatctaatcaagtaccctcattcccctctcttccctactctgttactaccttctctactaccacaaatgtccctcctgagccaattccccaacctaccaacatccctgagccagctccccaacctcccccacattcctgagccaattccccaacctctcaatctccatgagccacttcttcaactccccaacctctcaatctccatgagccacttcttcaactccctgagtccaactctccccaccctaccatcacacctatacctcaaccctatcatcatattacttcagaaatcgatcctccacccactttaccaacctcttacacaaactactatccaaaacttaccactccaaccttgtaacccaatccatgtgtcacatgtacaaacaattcctttccccataaactctccctccaatgtcattcctcaaacttcaaattctcaacaaaacttacctttatctatccctatatctactgagatacatcaaccaaggctgatggagtccactacttctagtgcttctctttctgcaccatccaatcaaggtactgctgcaatttcaacgacacgctatgagaaccaggtctcaaagtggcatcaccaaacctaagtcttacttggcaactaagcatcctctttaggagtcacttcttcaaactgagcctaaaccaataaaatcaactctaaagatccaaggtgaaatacttcaatgtcaactgaattctttgctctcaaaagaaatggtactcggactcttgtaccttttagaccaggtatgtttgtcattgacaataagtgggtctatcgaattaagctaaatccagatggtaccgtagataaattcaaattgatgcttgtggcaaaaggctacctccaaacacctggtattgataatgctgacacattcagccctattgtaaaacctaccactatttgtgttgttcttagcattgttgtctcatctaattggagtgtggcttgtgaagcagctggatattagcaatgcttttctcaatggaaatttaaatgaaacagtgtacataaagcagccacagggatttattgatcctgataaacctgatcatgtttgtctccttcacaaggacttatatgacctcaaacaagcccctcgagcctagaatgagaaggtcaaacagagcttatatgagtggggatttcaagcatcaaggtctgatacttccttgatcatctatgggtcaagttcttctctgatttatcttctagtatatgttgatgatatactagtaactggtacaaatcatgcttttatttccaagcttattcaagatttaaataccaactttcctctcaagaatttgggccctgttcattatttcttggggctagaaatttttagagataacacaggaatgtatttgagtcaagaccaaatacattacagattttctagtcaaattatacatgaaaggctataagagttgtcctaatccaacaagcgccactgttaacctcagtctcaataatggggaagcatttgagcttgccactctatacagaagcactcttggaggtctgccatatctcacttacaaggcctgatgttgcctttataatcaataagctgagccaattcatccatgctctaacaacctctcactgaaaagcttgtaaaagattgcttaggtaccttaaaggcatctctgaaggattgtagctgaagtcatgagaaacacaccctgtaaggctatagtgatgctaattgggccaattgtattgatgatcgtagatcaacaggagactatgttgtgtttcttggtgaacatttagtttcctggtcttccaaaaagcagcaagtaggagctcgatcaagcaccgaaagttaatttcatgctcttcccaacgatgcagctgaaatacgatggctctcctctctgcccagtgagttgcaagtctcaatatctcagcctcctatactttggaaggacaaccaaagtgctactgctcttgcagccaatccaatctttcatgcaaggagtaaacacatcgaaattgatcttcactttatgagagatcaaatccttgctcagcaactgtcagtccgatttgtgccaatttgtgccattagtggatcaagttgttgatattctcaccaaggcattatcaacagaccagtttcaatacattaaatccaaactaaaaatggctctttcgccattccgtttgaggggatgataaccactatactaacagttagttaattagttggttttttgtagtaagtcttttctgttgtaacaaactagcaagttgctttttacttctttgtaaacttggtgaatataaataaagagactcaagctaatcagttttgattaagctttaagcttttctggcatagctcttgctttgtctgtctaaattcttgctcagttgagcttcttcaatccaaaataacaaaatgaagaaaggaaaaagagattcgaacctgcccattcctgagcatcagtaagatgagtgacagcatcgcgatttgttgcaatgaaaagacagcctggattttcacggatgcagagtgttccataccttgagttggagaaatgaaaatttatgatcagtgaataattaattgctaactatagatttaaaaaatggattctctataagttatgaggcagacaaatgacctaaaatcagccctttagaagtaaagcgttttatgattttcttgctttatatcacgtatcgtttatgtgcaaataatttctggggtaagaagataatcaaacaaaatactgaaaacagcatatagatacaacaaaaggccacatccattattataagaaaaacttactgaattttgtagtaattgaaataacgatcaaatcctactacaactgccccaatctagaaataaataaacaaatttcattaccataatttgtagtgaaatccagagagtatagataagccataagtcaatgaaagcaatttcgttttgtactatgatatcaaatgcaaagcccaaacttacatccttgtcatgttccatcagaaatcctggcttgagttctatctttttatcaccatctgcctgtaatagaggccaactgaaatttaagatatgtcgtgcatcatttgtaatcacaatgtccatatgtgtctcaaattagtcaaaggcaggtgaatagcaagtgagatacatcagtttagcattcatatgactagctatgaggtaactattggtagtgaaaatattccttctaatatttaaggaacacaagaacatggatacatgtaaaacaagcacagaaagatttgtttaaaaaccaatattgtatgtgggtggatggatgtagtacaagtttcatacctgaggcagcttcctggtcccagcgcaaaaccaaggtcatttcatcttgaaataaattacatcttactaacaagttacatggcaaatttcttgattatcaggaatctacatgccatgtacaatacttgtacttattttcaagattatatattgtaaaggaagaaaaagtacatgaaataaaaaaaaaataaataaataaagattaattctttcaacagttggcaggcagcaagatttttgatttggaagataaatattgcagctgcttagacatagtgcttctgtcagatgaacactacatcactttgcgtagcttaatttagtaactatataaatttcaagtagattattagtgcagtagaattcttactggtccaccaaggtactgaattccagcaagctcaagctcctttaagattccatcttctccaatcacgtagacctgcaatatcaccaaccatcagtgaagattgtgattaaggagagtaaaattaaaagtatcctgcatttgaaagaattgcttatttatcagtaactctgttttgataatcacaagagcagggaaagccctttaacctagaaacgtgtaaattattttttctagtttacaaaattaaaacgcctgagattgtagccttcaaataatgtgacttttgtaatgtgaaattattggttgacatgaaatatcacactcactgaatatataaataaacaacatgcaactgattttaccagcatatgagatttaatgaattgtttctttgctgatgttaccttcttatctttcgggaagttgatagacttcaaataagcagcggcagcaaaggatgacgcaaaaatttcctcctgaaagcatttgaggtggctatgaatcctatgttaaggagcatttactaagatggcacgattacttcagatgaatgagaattatttctgtggtactgatttccatttacatgtttatgaatgctttacccttcaattatttaagagatgtgattgacctcaatcacatctatttctcatgaaaatatttatattattaaaatggacaaagtcaatctaaaacattccaattatgctttcctatttatgtaacaacatgaactcgttctgtttcccattctagtcagttaaagtaaacaatataataaaaattatgattctgattctttttccactatatgttattcctattttgattgtttcctacttataaaacaacatgaactcgttttgtttcccattctagtcagttaaagtaaacaatataataaaaattactgattctttttcccactattttcattccaattacagtccagtaaacatgccacgaataacggaccaacctcgctgacactaaggccaagtgtctcaaacttcttcccatattgcttcctagacttggtggagttgttagtaacaaacactaatctctttccctaataaaaaggaaaacagaaaatccataagaatgttaaataaatgttagattgataaggaagctaacaagatgaatgaattagttaattccatgactaaaaccgtaaaacaaacctttgaccgtagcagatcaagagtttctgggactccatctattaatttatctcctttccatataacacctgaatatatgcaacaattctcgtgaaaacagtactctcacccatctcatagtaagaatcaataggaaaatctagtaattttgaagccatacataaattaaacctcttagagcctctacgccatcaacaaaaacgtggggaaagtaggacaattggacaatttggcaatatgaacttggaaaaaagcaaaggcttaaaagttctttgcagaatgagctttggcaaaatcgagtatggtgttgaacgtggtcaacaacattccttggctttgcttggtaaaagccatcttcatatatctatttgcaaaggaatccctttagtagtaaagagtttacggtcgagttaactaacttttgaacagttggaagtacttctggagactgtgtatcagtgccaaatattaacatattaatacaatatattactggcatttggttttaaaacagcttaactaactccaaatccaacccattgtacaatgtcattctttttcttaggtaaaatacccaagaatccaaaaaaagaaaatggatgattactagtaataccaagtgaatttatacttatttgattgcaagtttttacttattcgggatatgactaaaacaaccttcacttctaaactgaccaccaattcagagacaggtaagaagtaaaacagccacacaaaataaaaacaagcgacggaagacccagataagcaaatggtctcaccatcacagtcgaagataaatgtttcgacagagtcaataagctcgtcagcattcgtgaggggctgagcggaggcccgagtagtgaagctcttctccattcgggaggacctgctagagcttcttctactgatgttccatgaaagggttgagagagtgaaaaaagggttctcagaagaagaagagaggtgcgtattggtggttttgccgaagaaggacttcgataatgggtttggagaagtgacagaaattgaaagagaggctgtgactgctctgcctagcatttctctatctctctctctctcttacttttgggataataattaacagtcgtgtttacgggttatttgaggccgttgggtttttgaagaggttggtttgttctaacgtggcaagaatgagtggctgagtaacttccccatactttatcatgtgaagatatgggaatagcatactatggtctctaaacacaccataactaaaataaaaatttgtggcataaatatctattttattaagtttattgctactaaatacccaaaatctaaaaattgtggtaaaagtactcaaaacctcatttagtgttatttccgttagtactcattttgatagttctgtttagtactcaagaatgccacgtgaattctcaattggtcaaattcacaaattataaaaattattaaaataaaatataaataattattttttaaggaaataaaataaaatatttattttgtttcttctttccctctccccagtctcttctctttcccttccctctttcccaatatctgaccagcccccctaatatcagttggtagactcttggagttgcatagagaaaacataaagtttagtaatggcagaagtctgaccaggtaagcactttgagttcgtcaaataaaaaagattcactgtcctcctctccggcggtctagacacgacccccacccaccatgactcttttgctctgggctagccgacggtgatgcctccctcctctatatgtgttttgatgcctccacctttggtggtccatagtttagtggtggtggactcgatcacatcttattctcagttcaacaattgtaaagactttaacttcgatcactaacccaatagaaaatattaaatccaacagtgttggagcttccttcttcttgctctaatcttcgattgagcttcctttcagcccagtctcataaattcggagcagatctcgaacaccatgtgaacagtgccgatcttaggcgatcggcggttgactctccatggatgctgattgaggtgattgagagagtagagcgagagggaaaggcttgggcagggggatttaggggtgaggaaagttggtagtggcctctgtttgggtcgtcgatggccagagagagcgcattaggtgggctagtcagatattgagaaagagggaaaggaaaggaaagagaagagactgaggagagagaaagaagaaaaaaaatattttattttatttccttaaaaaacaattatttatattttattttaataatttttataatttgtgaatttgaccaattgagaattcacatggggccaagatgcaaaatggccctaaatctaacaatgatgttaataaatgtccctttttataaaaaattatcaaaatgtccattctgttaaaagtttgatgatgaaattacaattataaccttgaataattaagtgt

SEQ ID NO: 296356 - DNA, 3139 bp, Cannabis indica
tatgtgacatgatatatcgtgaaggatagaaaaaaaaactattaaatattaatttaagttttcagtatttattttttattttgtacggtatatctttattatgtgctatgatatattaataaataaatagagtgatatattatttttatttgctatggtgtatcatgaaagaaagagaaaaaaaaaatttgtggaagtttatttaagttttttttatatatatttatttgattatagaattgtggtggtatatttatattactctaaggtataatatttatatgttatattatatcatgaaggaaataaataaaaataaaattaaaagtatacatatcactaaaaaaataataaagtacataatattcagattactctaaggtatattatatgtatgacacttatattactctaaggtattattataataccttttatataataaaagatattttaagtattaaaaagtaaaaaaagacattttttttattattttaaaaaatagatattaattatcactaaagttagaaataggtaaatatcggggtaagttgaaaaataccacttttattaatcaattaatcaaatttacctctagttttatatttaattgaaatattcttctttttatatgtattgtactcaaaataccctaatataagagcgtcaaatggagagtatcgtgaagtgacaggggtaaaattgatacaatatttaaaaaagagagtaagaataaaagaggacaatataaaaaagagatagagtgttaagttttttttatttctgttttaaattttgtttgggccttgttaccattatttgggccaatcatgcaggcccatacaaagtagaatgaaacgacatggtttggttattttcttgggaaaatgtttctctccctcccaactcgattgtttggcgcacgagaaaatccaaagtgaggaaggaaacggaagagaggaagtgagaaaaatggcaggatcagaagctggagcagataatacagatgctataataactagaatcgagcataaatccagaaagatcgaaagcctactgaaacagtaataaccgcatgcaaaatctccactttacaatagttctcaggagaaaatctaaagctttcaatacttttttctccgtacaggtctaagccagtcgaagctctgaaaactgcacttgaaggatcacctcccaagactccagatgagcgctgcaaggtttgagttcttcatgcctttgtataagctttttaagataattttcttttgcaaggtgaaaaggataggaagaaaaccacattgtttccttgttagaccttatatcgtagaatcgaatgggaaattgatgctgaattaggctttgattgtagtctgcgaactggattgtggttcatagagctcttatggcgattaaagatgtggatgctatgttctcttctctggatcccgaatactacgatattctaatgaagtgagaacccgtatactgtcataccatttcgtgcttcggcattttcttctgtttctctttttgctaattttggtgattcatttttagggatattagtatatatactgaacggtgataattagactgtataatcttaaaacattgtgatgaaattggattaaggattcttgaaagaataggttgaccaaggataaatataaggtaataaaaagatatacattgttcaggctcctttctttggatgcaatttagctatggaatttatagtttttgtctccaaagcttattaattgctgaataccgtcatcatttgaatgaatcttaaggtaagataataatgaaataattggagccttatttagaaaatgatgcattggctagttatatacatattacataaatacttattttagttctagcacgtatatatgagtagcttttagcatgtttgacgataatagaactcatttttttttatgaacagaactcatggtttgtgaaagggaaattaggattttctacatgaagtaatgaatatgttaaccagttttctgttaggaatttcagctgttttgtaaagaaccatttttgtgcatattacctttatgtttgtcagatgatgacatttcaatactcttaacactttgttattaccattactcaaggtacctgtatagaggcttgtcaactggagatcgcccaacatgtgatcagtgccttaggattcatgaaaagttgacagagagagctggtttgggatgcatactccgttctctttcagacactgtaaatacagtttaattcccatcacttcactacggtaatgatagtaatttattaaagaagccttcttttttgaggtatcctcttaagacattatgcaagttacaaatcataatcacaaaggtgtttccaaatgtttgtatctttttatagactctgattcattgagctgttttccttccagtgattatgttgagcattgcggtaacaaaattttcttaaatcatttgtgaaatgagtttcttaaagatagtagtgtatctatggcatctaaaacaagtttccctaagtcatcccgaaagtaatttcgttggaagaagaggtcaatgcatgttcctaacatgcgacatgattacaaggataatgattgtacccttgtactttgtacaggattgcagaaaaggtgaattatttatttatttttttttgctattactatctgtatctgtacatggacagtcgtatcttctttaaggagctgttcttgctatagtcccgatcaactctttaacaagctcatgggaagcctttccatctatcctagctagtggctgcgagctcacattggtcatgcttagcttttacgctctccacttgctgttgtctatatcctgtgtgagatgtgagccctatattttgtgagttaataattgtcactcagtcttccagtagattttgtgagccctatccggtatacttctaaattaggctatttatcattatctaccattctttcctaattatgatcttaattaagagggggcatccgatccaatctaactttttttttttttttttatttttttcattcgatccaattcaattagtaattggaattgaaaaatcatcatccgatccaatccaattagacctcaaaatccaa

SEQ ID NO: 296357 - DNA, 3765 bp, Cannabis indica
aaacagtatattaacaaaaaattgatgttgttaccttccgggaaatatacaagaaccatggcctgcaagaataaacgagaaaagcattagagattgtcaaatagtgtcaagcagcaccaaaaatgaaaatctttaaccggggtttaatccttactcgggtctgttgtagtgatggttgccactcctttaaaatcacatgttccaggagactttgccattcgctgaaagtaagcattgaaagcgtatgttgcatgtgcaaccacgttgtcgggttgataacatgattgcccctgcaacataggtgagcaatcaactttgcccggtccacatgcccaatccaacgctgcttgtagcatcttgcggtcagaaccttccttagcaacacagaaagtttgatttgtagtgtcgttcgccagaacagtcccagctcccgtcaagtgcaagatataaatcggtattccatcagcatcaaagaggccccagtttttctcagatgttgaacctggtctcaaatcctcattgtaaagctcgtatataaaagtactaacagctatcccgggacgtttaggagtccctgtgttgttaagtacatgtctaatcaagttactattgtaagtattagcgttatcaacagtggcatcaggctctgttgagtcaccctttgagggccagcccgactcagtcactacaacaggaacattcgtaatgttcaagtaagacattgcaaaataagcggcatcaacaacagcatcgaagacattggtgtaatgcaatagtgtatttgaatccacagcttctttgtttggggaagggggcggaatagtgcatagtccaaggggatcacaccgtttgatttcatgtaatcgtaataagggtagacattgagcataaggtatgagccactagattgcaaaaacttaagcaagggaaccatgacggggtcccatgttcgattgaagaaggcttgggaaggtggaaaggaatcgagaataatggaagaagcgtgtggagtggatacttttattaggcgatcgagattagaggcaacaagagcagagtgaatgaattttagcgcagagactaagatggggccagcatttgggagggtcgtcaagacatcagatccaacagctatggctgttatgttggtggcagggacatgagcaatcacatttcgagaaacccaattggcagcagtggcattggactgaccaatcccgagaagctgctcatttggaatcgatacaatcacctgtatgcctgtgtttgcaagtgcaagaagcatagctcgatctgcatcgaaaagtcttacatgtttaatattctgagctttcaaaagtgccaccacttgagttggggttggcatatcagaaacatcattaccgatatttacaccgatgaaagcatctgcaacatgttaaaaaattatgtttaagaacaaattggcatagttgattaagaataactctcaagtttgagacatgtcacataagaaacatatgtcatcaaagtttgcatttttttattgataacctatcataaacaccataagggcatctttatttttatattattcttctggtgaagatgtacaaaaatgaaaagacgaaacagctgtgatgggacaataactgcatgttaaaagggaagaaaaaccccaacaagccatagcatcaaaggaaagatgaatggggccatgttactatttctataaaacgacaataatacacaacactagtcagaaaagctagctaagaataataataactcagcattgacatataataataaagcatgtcaatagttgaagatggaaaccataaagcaaaaaaattgacaagtcagctgttgctgttgccgttataaactaattcaatccaataaaaatgaaatatcaatattaactcttgtatagtatttgtttcaaatagctcatataaccttaaacaattacaacacaatctcatactatgattatctatcacctttgtgggtcctactcttcttccatcagcctcaatcaaaagctcattttctcatgttttgtcttttctttctttacatttgttgtttgagtgttaaaaggtaccagtgtgtagcaatgctatatacaaatgtttcaataaatgataggattaattataacattgaacacaaattaatgacagttagttggtagtggacacataataagacaatagtaaaaatccaatctttatatcagagtgtgtcttactatataataatacttaacagcaaaattaattattgttttaattataataaatgtactattttgaaaattaactcctgaagaagtgaagaggtgcctaagattatgaactgaatttgttgtactataatgatgaatttgaaacgcctgagaaagagagagagaagcaattggcttgggttattaatgtaatgcagtactttggcactagtggaccaaaccaactgtacatacaatggtcctttcctatttttaataatagtacagaaaatgacaatattatcctctcaaattgagtaacacctagaattcaatttacccagaagaagggtaatttagtcttttagagattatgcatactgtcatggagatttttagtttaggcctaagatggtaaaagaactggcaaatgagctgggatgcaataggcttgattccccattagagaaggctgaggatgatggacaagagattttcaacagagggaaaggtttccatttctgactctgtgaaccttgttgtggtcagattcaaaatatttttttcctttttaattttcttcatttcccaaccaaatattcaatgctctaaagttattaaacaaatcccatttaggaaatagatttaacaacacaagaaatgccaaagaaagagccacacacattggttgagaaaaagaagtaaagcatagcagaagaagtcataactcataagaggcagttcaccaaaatcaaagagatgggtccaatgcaacaattgaagaaactcttcatttttttcaaactaaatattaatgccctttgaagtttataaacaaaacccaacttggaaaaagatatagcaacacataaaaatgcaaacttgaaaacaaaaaacaacatttttaagcttaattaacagattatataaacctattacacaaaatcataaactaagagattcagacaaaatatcaaacacccagaaatcaaaaacagaaatagaaaagcatacatttacattattgtaagtgaaaatgtcaaatggagaagctcaccttcatcagctgcaacaacagagattgccataagcaaaaacagaataagacccgccattaaaatcctctaaaagaacaatctttcttctcagtcttcaacaaaatctcaccaagggaagaagagagctctagaaaaccccactacccagaagaggtagtaaaggggggaagaaaaatgaaattagaagaaaaagggaggcttaaaagaacaaaagctaatgaaaaacaagtaagaagaactatagagagagagaggggggggaaaaggtagctccttttgaggttttgttgagactatgggaagtggcgtgggcaaactgaagtgaaagacggtctttagtactgtgggtaatcgaaggagtggctgtcagagtctcggagatctaacggttgagattaactatagtgaggactgagcatggtaagtgagtgtggactagcttagaggatgagattttttatttagttctctatttatgaattatgagattttttt

SEQ ID NO: 296358 - DNA, 3080 bp, Cannabis indica
aataatcccttatttttttttgtctaaactcttgaattagactaccttaacgttatgttaatactatattaataaattatttaaataaatgaccaaaatagagatatttgcaacgattattatagttcaggatagatttttgcaacaaagaaaaattcaagggataaaactctacaaagcttatagttcaagggagataaatcctatttattcatttttaaaacatagtttcatttgaaggtgtttaagaaatcatgtttaaaatgtttatggaatgaaaaatactaaaaatgacagaaagaaagttctatgatcaaaatgaaaataatttttttttgttcaagagaagggactaccattcttttttatgggcataaccataaaagctccaataattctgtccatgaatattcatcaagaccatcatagtggctcgctcccacttacacgggtgtatcgcatgagccctaacaaatcactaggggcacgagtgctcttatgatagatgtcaaaagtggttaaactgacaaatattgtcgtcacatttaaaattttcaaataaattacttaaattcgaactcatgatctctgtctcaaaagaattcttgagaataagcactttactgccactaaaccacacactaaatcgaattaatctttgatgaaaatttggattaattaactccttatttttgtttttatattggcctagtgtaattgtatattgctttgcttgaaatcgatttatgagtcatatgtattttggtcatggcaaccttttcttcaacaagtaatcatttgcttatttgaatttgtttgtttgattttttttaataaaaaaatcatttaaatttgttttcatatttggatatcttttgttttttttctttacgatccctttatttatttcatggaataagtttatgttccttgttttctagtgaatatgtaaataaggtataaatgctcactattattattattattattattttcagaatataaatgcttatttttggttcattgaatatgcttttaatgcctctttctttgtgttttttcacttctgagttttacgcttgattcttgaaatgatatattcttttcacttgtttagccatataattacataattattatataatttgtggtgcatttagaaaagtaattgtgtaattatactaggtgtaactatatttaaattataatattttataagatagttagtaattacaataaaaaaaaaataataagttttaagaaaatacttagtaataacttgtgtccactttgctcttgtgagttggagactacccatcatgtactttgtggttgtaacaagcttgccttgactcgcaagctttgtgcttttaaactgtaatccaaatataattgttaatgatatttgtagtttcatttacaattatttttttcagcttccttgtagagaagttgaattgattcttgttatttggtagtgtattttgtttcgtcgaaataaacaagttcatgaagattcttttattttgcaccagaattcataagcccttgggcgactaatttcttgggcttttatcatagtgcaaacaagaggcatggtcagcctcttcctgcccacagtgtcgctataaagccgcctcgctggaactgtcctcctccaggatcgttcaaagccaatacaaatgcacgattgagttctaactcaacctcgtgtggtcttagtatggtagtcagagatcatgatggcaatattttcgcttcaacatcttggaaagctcacgacaaccctcctccaaagtgggtagctctcgcaatctgctacacactctcccattgcatctctttcggcatccaaaatctccaggttgaatctcattgtcaaaatttgatcataagctcaattctttaataatattggaatcttttttggggttacttcttgaagatatcatatatttatgttttaatttttctattatactttttaattattgccctagaatttttaatgtagtagctgatactcttcctaaatttactttgcaagctagtcttagcaaaatttggtggcctgattatccctcatgtattaagaatatcattttggctgatgtcagttatcaatgaatttttcagtcctcgactcctttgagatatcttctcttcagtggtattttctgaggctattttctcaagaaaataatatttaaaatagaaagtttttagtaattacactcaattctcaagtgtgcgagaattgaagagaactttcaatgtcatgtttttttttttggtgaaaaggatggtgccaggcaccaaattcattgaaacaaaaaggatctgaaaacaaacaggacaacaacatcggtccaaaccagacaacaaccaaagaaaactgtccgaacaaatacaagaaacactaaaacacaaaacataattcaagaaaacaatagaacttaaacaataaaaacacacgataagagaaccaacacaaaattcagcaattaacccggattagggaaccattcagtgtcatccaggagcactcctccatccatggaattcacggctaattcaccaacataattcaatgtcatgttttacttaaagagaatgagaatcaattgtttactaaattttgaaaagaaagaaactagtgggccccacacaaattacgaagaatataaaaggaaatgttctccccttatttttatgcgggatacatttctttttcttaacttactttatttcaattttaattttattaattaaaaattaaaaaaataaatatgtccttcaaaaattgtaattacatgtttaacaaggacaatttagtctaattaaaacactccaattaactttcatagttatgtaaacaaaattaaatgattatagtttcatttttggacatttagtaaacaatataataaaatattatatccaattattttatattttaaatcgattcatttattccattgattattctaattttaaatatagtttagtaagcgtgtcacctccaactgctgtgatattttgcacacgtaagtgcatgtatcgtttacaagtaatagact

SEQ ID NO: 296359 - DNA, 4397 bp, Cannabis indica
ttaaggaaagaagagaaaaatagatttagaaagattttagagtgccacatcaccgcttcatacttctccattatagaagtatagatatagatagatatatattatgaataagcgaaaaactaattagttttaacctataaacacatttgagttggtgaaaaattagaaaatttgttactgaacaatttaagagaatgtaaaaaaacaaaaacattaaaacataaataaaagaatgatacaatgcaagaaaaaacatggtgcaaaaataaaaaacaaataaataaataaacaagtaaatgagatgaattagaaggttacacatgggatttctttagcactcctctacaaataatttacagaattgcatttgaaattttgttccagctgacgaaaaattctgggtccgcatgcacacaattatgaatagcaattccataaatataacaagtaaaatatgattttacgcgagcatgatataatttgtaaatgttttcaaacctagacaacaaacttctacacaattacagtgaagtatagaaatatgaacaagatgagtaatagtataaaacaaaaaaattcacagcatatcatcccccacctatataaatttgggtgacatctttagtcttgtttttacagtcaaaaacaaaatgcatgttgtgttaagtaactatggaagtaattgatccactgtactactgtagactaagctcggaaccagatcaaatccaccaccacatgttgggttttcgcaaatgagcttatacacaaatgcctcatatttgggaaatagaaccatgtgaatgaatgcctaggtacatatataaacgaaaaaagcaaaagaatgtctattgatgatgatacttaccacaaattttcctcaatcactgaccactacgcattgatgtaaaattattagttttgtgcccaacgtgtggtatgaaaactaataaaaggtaaatagatggggttcatactgatcaggcaagacaccaacagcattgttgctatcagctgaaccaaactgtagacggctagccaacgcagctccaactccaatcagatgattaggtggataattcatttgctgaggaactacttttgaaactggcgagcaactggatttaggggaagaagttgctcgggtacattggtttttgctttgcttttgcgattgttgttgagagactggactgccctttcttctttttcttctcccgcctgtctgctgctgctgctgttgcggctgtggctgtggctgttgctgtttctcatcctgggactggaaaaatagtgttgaatgtttcctgtcgttctttatcttttccagcaaggcaatgcgctttgttatattgtcaggtgagagttgagtttcaagaccataaattttgatgcattcaactacattcattagagcagctatttcttcgtcagtggctgcatcctgtgagcagttcttaatatgtcatgattacgcatgcaacaaaaatggcagttcgtataaaaaagagaagcaaatcatgacactcgaaaatatgggatcgtaccttttcttcggctgatttcttttgcacacaaagctgtctggtataactcttcacatagtccatgtactctttcaatagtttaactggctcgaacatttctgttaactcgaatgcataagtgagtctgattgccgcaatgaatttgttcctttgaatcagatgttgaataaagactgcagtatgtgtaataaattgtaggctttacaaaatctcacaagcgcaatcaactaataataaagtatgaaaatataaatcatgttacatagggcagcaagcaaaatttaataataaacttacaaggaatcttatatgcagaagcaaggggacgacttagttctagagcatgtttattttgagtgatcgtatccagaaaactcaaaatatcatcatcatcttcaaagattggaaaaattcgatatataccaaggaaatgtagaaaccccaaaagctctaaagagttttcaatattggctcttatcttttctttccactcatatgctacctttattgcatattctctcaagtgagattcaattcgtggtgagattctcaatagctgctcaaacaaggaaatgtaactcaacatgacactttccttaaaaccaacatctccactcttccgaagtttagaaaaagactcttccacaatgaccaaaacttgttttgctgggtccggcatttgcagaacagataaacttttgtcctgtgtcaattcttcaagcaaaatatgctcagaacttctttcgctcatggttgaaatggatttaaaatttgaagaacttgcggcagtgtcgtttgctccaaaattttgtgcttcctcctccatgtcaactgcagaaagaagagaatttggaacaagaaaataaaccataacaacaacacagattacttgcactggcctgtgtattcgaaagtctttctcaaaattataatagaaataggcaatcaattaatcatacaatgataggccactatagagagtagctcggaattggatactgtaagtattataatatactggatcaaccattcagatgtttaacccagtagttacgccaactctaaaattgaaaaattctttagcggttgtttctaagagaatgagaaaaaaaagtaaagattctctctctatagttatatccattaacttttttagcggttgtttcagatcatcaatggatatactactgcacgtgctatctcctgtagtatatccattgatgcgcaactcttccggcaaaaggtggatgaaaaccataagcttgtctcagaaatgtcaatgtagaaaaccttatgctgacatgctcatgtacacgaaataatggcattgagaacctacatatgttcacaacttcacatgcatcgtaggggaagaaagagaaagaatctttaggactaaatattttaacagttgaatatgagtaatgatgtgccagagccaggaaaagcaggtaacagggaccacatttgtctgggataagcaagtatacaaacaacatttgtgggtcccagcagcactataatgatgccataaataatatgaaagatactgttaagctcttactttcacaagattctgtggctgacacagatttttactagagaacataaacgaactcgtgttgtattataaaatattatattaaattgtgttgtatttcatatttttatataatattatattaaattttgatttatattaaaacataatatatatacaatataagactacgagatataatactataattatataacatacaatataatactatataatacaataatacaataccatataacaaagtgtaaaccaaacggactcataaaaactccataaacagtataggtagaaatataaacagagaagctcaccatgttctttgtctgcaatgcaaagggcccgatgtaattcaatagcttctctgttctgatcaacaacatcaaagagactgagaacctcatcagcattaaaagcagaggacagtctaaagctagccaaaagctgcaaaaaacccagcacttccaaacttttctctttctcagtggtcacggtcatcttagccttccaatcaacagccaatttcattgcttcctctctcacttgagggctaatatcgggtgaagtgttcattaattgtcccaacaaaagaaggcagctccttcttacaattttcaggtcaagctccttattatcactacttgaatgcaaggggtaaaaccccttaactgcatctaataccaactttggagggtctggtgatgtttgaagaacagcataaagttcagtacaacgaaattcatgcctcctcaattgatcactcaaaagcatctgcaagtattgcccattagtgatgctgtattgataggtagcaaatgatagaaaatccgcagtgttgagattattttctgatttgtcaagcttaagattattttcttcagttactcctaataaaccagttgacttttgtatagattcaaaccctatctgtctccaagtaggaaactcattgacccttttctcaaataggtctcttttctctacttcttggaaacgttcttccaccaatctttgaaatgaagcaacattcttctctttcaattcaacctcttcgaggatttctttgacccctttttggatcaaaccaattcctcaatttttgattctaacgatttttccttcagttgaagattctccaccaaactctcaaattgcacccctttcatatcaaattcaaaagcacattcgtccactgattttttcaatgaaaaaaattattcttaatcactcctcatccatccgacgaactcaagtctcttttcgattgactcaaaattccgaaaagcttt

SEQ ID NO: 296360 - DNA, 3789 bp, Cannabis indica
taataataatatgcttttgtaattacataatttttttaaaaaaaattgaagtgtgtctcaatcattactcgtgtgggaacagataatggctactgcgacgataggtgcggcgggtgcatcgagtgcaatcatgtacttggctcataacgggagcgtggatgccaattggttagcaatttgtcagcagtttacggacttttgccagcaaataactggcggcgttgttgcctcttttgtagcagcagtcattctcattgcacttgttgccatttctgctgttgcacttaaaaaaaccattcactagattcattacattttatgtccttattctactacacttctacatatggtatctacagcttaatatgtgaataaaaaaatctttctttttggaatttcttgcaaaattgttactttctcctaatcagctcagcaccacacaatatatattcatataggaagagattggatatatatctatacatattaccaaaaaaaaaaaaaaaatcttaatgattctcatttttgctaataatggttcttagtttaactcaaataaatgtaaaaatatttcttttgatattttgagagtaaatgttgtattaattctagtctgatgatcaaccgatattatcataccttaataagtaaactaatcatcgacaactaattttaggatatattatttatggtatttttttagtatttttctaaaataaggtaagttacatatttataattgtaaataaataatttaatttggcagtgatattgtaaagatgatttttgtttaaattatatatgaaaatgtctacgtgatttttttttttaaagaacatataatcttcccatcagttacaaattcgataaattatttgaacttacaatctaccacatacatataatttagatagtattagagtaccaacaaacaaataaagtaatacattcccatttttatataataagatcaaaaaagtgatccaattatatagcttagttatatcctaggactaggagttgtttctggtggctgagatgattctcttactgttggtgttggccatggcttccgtaccttgtccaccttgtctacgtaaacagctcgcccatcgatcacctgaatgcatatgcagttgaatcgtcatttaaaattttacaatttttaactaaatgaaatggaaaagaaaaatcagtactgtgtaagtatgtttctgtaccttcccatttgtgccaatcaatgccttttcagcatcatcttcttcagcaaaggtcacatatccatatcctttcgatctgtttcgagttttatccattataatattagctggaaaagaagcagaaccaacaatgttgaggatcatttgaataatatgggcatgttaatagcattaggattgtgacaactgcatactttcaattacttcgccaaatcttgaaaacactttagccaatgtctcctctgttgtcgagaaagatatgcctgtgagagaaaacccaactgttaatacttatgagtcttttagtaaaggcagcatatctacaacaactcatgtaataacacatggtgacaggaaatacttaattaactcaacagacagtagattgtgtttgccaggaatttttagatgaaagaaaataacagccccatagggatttaaatattaacctcagtcttggtacagtgaaaaacagataatgatgatgatgaaattgatgctgttaatccaccctattgattggaaagaagtttataacctaattctataaatcatcattagtcagcagcagtgtttatctccataagagcttaagtctaatcatatctatgaacgtatgatgattaaatttatgttgccaaactaccctattgagtagaggatgtattttcttgtagatttatgttcaagaaattaaacaaaatgaaggagattaaaccagtctaattcatgttcatttatatggaaatatttgcctcttctgaaaatgttctggttcgcttaacagccctgagtatgttgaaaactcgagaaaatttacagcaaacacaaaattgggtgatcatctatttaggactactcctttactgtgtggaagtttgaccgaaattcatacattaaataaaattgggtacgggccaagtcactttgtaaggagcgagggactttcgtaaggacagggtgaaatatgggtagttttagctatcccttgagccatatagttagagaaaaatattagaatcttcaatgttcaatcacatggaagtggacacagatggtattgtatctgggactaaccaaagttgagtggctatatagacttctaatacaaaggattctaaagttcccccttttccatgctatttaatgattgttcattatggttgtacaaaaatccatactaagctattcttttcaataatagatttttaaataggttgctactttgcaattcaaacgatctctcatcatcctttataagaagcaaagcaacctttgttatagtccggtcacccaaccaaatgagccaaattaagctatcattctatcacatggatccagcaaccagtgccgagaatcaagagtctaaggttgtgtttggttggaggtaatgaaatgaaaataaatcaatttttatggttgcattttatagtattagaatatcatttcgatggactgacttttctactattttagtggaatgactattctattttaagatgaaaaaaagaacccattccaatgcaagttaaaaaaaaaataattatttttatacaattttttttttttgaacattttaaatttcatttcattgtattcctattcttatttccatttccattactaattctatgctttcattccatccaatcaaacgcaactttagtattgattttcaactcctctaccttagtattagagtgtcctactcttaaaagtgtgtgggaaaattcaactatttataaaaacaaacattagagattagtttccaagttgaattctatgattcttataccatatccaccatacatttatactgtctaaacttctgttccactaagtttaacatacccaaaactgtaaacttttagattcataaactctttatgcccttaattcatagccctataagccaaattttaaaaacaaagtctctatagcctaaaagtagactggaaaatccaaaacacaaaaacataacatgacttagttagcaaacaacaacaacatcatcaatcaacacagccacattttttacaaattacatacaaatgatgatgttgaagaagcttagaatttaaaaactcaatgctgctttaaaaattattgccaggaaaataaaaagattagatcttttaaagaaaaattaaaataaaatgacattaatctcacataataattgtaagacccagaagcacaaaaattaaaattaacttacctttgacaaagagtttggaagaaaatcggcgggagaaaatggggttgtaagaaattggaattggaagaggtttggtatgtctgacaaagctgcgggacattgccctaaacgaagccgccattagaggtagagagagaaacaagctgaggttgtagggttatcggctgcggtggtggctgtgatgagaaggagattaagcttagttgcatcgccggctgtttaggagagcttgttgattatattaagctacgaaaattgttaatgaaagcagcaaaacgttaaaataatgggaaatttacatactaacttatgtcattttttttataaaaatactcataagcggtatttttt

SEQ ID NO: 296361 - DNA, 2343 bp, Cannabis indica
ggcataaaacccaacatcatatgagatgtggcttgggtcctcgatccatccactacttcctcactggtgtaactaaagttaacataaccttcataagcctctttaattctctttcgaaccagatcaatgttgattgacttgcccgctagtgaacactcgttcctagttctccaaatttgatcaaccatgcatcctaagtaagtaagaacttcttttcttccaaaacccgagtttgttgtagtagctacaagattttccacaaaactaatcatgttttgaccagggattttatcaatccttagcggaaacgcactagaaaaccacaaaagtttggcaagactacagtctctgaaaagatgcagacaattttccactgaagcctcgcagaaatgacaatctttttctcttaagaagggaagcttctctttaactggtagaacattgttgagcagtctccaaagtatcatagagattctcgaatgtaactgagaataccacagccatttccaaacagtatgagtatcatcaaatctatgtccttgatccaccacataagcactcttgaccgaaaagtctccatctcgtttctgcttccatactatcttgtctttatgagtcgaaggaagtcttggaatgtcaagaatcctatgtcccatctcttccccaaacatctgcacaaccacttccctgttccaagaattgtcaattgataaatctgctaacgttctagcagtataaccccagggtctgatgctctccatgagtcttccaaattcatcaaaatccatccaaggaatccaaggttgattccacaagtctattgcatctccgcttgctaccagcgctatagaccccttaaacaaaatatttcgagcatctaggatgcttttccaaagatacgagtcacttcctttcttattgactctccaaaagttttcgtgagtgcagtattttcctatcaagcacctaatccacgttttatcttggccttgtgcgatactccaagccagttttgcaattagtgcctgttcatgtcttcaaaccttcttattccaagacctcccgaagctttcggctggcaaattttgtcccaagatttcagcgctagaaaccgatctttactcacattttctagccaccagtacttgagaataatagcatccaaatccctacaggtggagataggaattttatttgttgacatcatgtataccggcatagaagctactacggacttgatcaaagttaatctactagcataggagagtaacttcatcttccatccgtcaagtttcttcagcatactttcttttaactttaggtaggtttcctttttccttctcttgaagacaaaagggttacccaaatgttttccatccccttgtgattgcttaatagcaattagatccagtatttctttcctcctctccattgacatgttattagagaacagaacactcgactttttcttgctacattcttggcctatccacctctcatatgtgttaatgcaatccatcatccttcttgcctcctctttgtttgcacgtgtgaagaggatggtatcatttgcgaacatcaagtgtgccaccggcattgtgtttctcgctatttgaataccatgaatcaacccctttctttcttggctaagaatcaagttggataggacttctcgacaaagaaggaagataaagggggagagagggtccccttgtctcaaccccctttgcggtttgaacttctttaagggggatccatttaggagaaccgagtaaataacccttgtcacacaagacataatgatactacaaatttttttcattgaacccattggcccaaagaactctatggataaaggacaattccatcttatcataagctttaagcatgtcgagttttatagccataaaccctgctaaacccttcttctttctgatcttgtgtaccaattcttgagttaagattgaagactctgctatccatctccccggaatgaacgccgattgaaatggagaaatcaacttatccatatagattcgcagtctattagacaaaatcttggtgattatcttgtgaggaaagttgcacaggcttataggtcagaactgctccatcttcctaggattattcaccttagggattaaattaaacatatgaatgtataattcagcctaggatgaatgacccctgatctaaaagcttcttgaactgtaacattttttaaggatgttgaatttgggggggagaaataaggttagagacattgcttttgaggaggaattgaattcaaactcagttcctactatcattttagacaatgttcaggcttccacacctgtcatt

SEQ ID NO: 296362 - DNA, 4328 bp, Cannabis indica
ccaacaaactccacttgcactaacataaaacaagtagtgcatttcaatcaatcaattgtctttatatcgagatcaagtgtagtatatttgactaaacccaaattactggaactgtaagtctgtggtaagctattggtttctccaccattggatgactcctagtatatttccaagtgtttcaaaagccaaaggcattcaacaggctgtaaaaatgcgcaatggaacttagctagttgacatccaatatcagccaagggtatccatcaaaggtcaatccctagttgactttgtggtggaattttctggattaagtgacctcccgaacgatcgagtctcagagttacctatctagaaagtctacattgacaaatcatcaaatgaaaaggggccagagcaagcatcatattgatctcttcgtaagggcatcaactccaaagtgctctttgttttaaatttcttgcctccaataatgaagctgaacataaagccatgctaacgggactacgattggctaaggaagttggagcctaatgtatcgaagtgcatagtgactcctagctggtggtgaattaaatatttagggaatattagaccaaaggtggaaggatggatgcctatgtgataatatcacgagagctgctgcaagggtttaagagctacaacatttgtggggtccctcaggaccaaaattcatttaaggatatggtagaaaaacttgccacagacatagagatcattcaatatggagtggtgcctgtggcccacttaggagcttcaagtatcgagacgcagggggtaaatgccaacactgatcattttaactcctgaatatggaccatctaccagttcccaaatttatgggagcttccagcaaacaaacctacttcacgaaaggtccagtaccagactccttgatatgtgatactagatgggaagctttaccacaggggcttatttgtgccatacctaaggtgcgtagtcgggaccaagataagcgctatcatacactagatccatagaggtttctatgaagaccatacttctggaccaagcctatccaagaatatcctctatcaaggttacttctggcggacaaaaaagaagcattgtatagagtatctcccaaagtgtgaccagtgtcaaagatatgccaaggttctgcgagcgccactaacaaaaatcaccctcatgaacagtccatggcccttcgctatttggggaattgacttagtaagatccctgcccactggaaaaggaggagttaagtacaccataatcgttgttgactacttaaccaaatgggtagaggcaaagcccatgaatatagtcacctccaaaaagtccttagactttgtcatcaaaaacattgtgtgctgcttcagacttcagcacgagattgtcttaaataacggaaagcaatttgatagtgatcacttcactaacttctgtaaccagtacaaattcatgaagagcttctctagtgtggctcgatcacaggaaaatggaaaagtaaaagctgtgaataagatcctaaagacaagtttgaagaagaaactccaagcttgtaaagcccattggctggaggagcctctgcgagtcctttgggcatacagaaccacggagagaactttaataaggcacacactgtattcgatgacttatgggtgtgaagcagtcaaaacctgtagaaaccacagttccctctcacggacgagaaacttatgacccaacccacaatcactctttgatcaaggaatcattagatttaattaaagagctctgggaacagtcacaagttcaactcaagatgtaccaaggaaagatttccaagctctttaattctaaagtcaagagtcgtacatttgacattaaagatctcaccatgaggagaatcttcccagctttgcgagaaatgggagtgggggtcttaggacctaattgggaaggaccctatgagatacaacataaagtgggaaatggaacatttcaactcaagagaatggacggggtcagagatcccttgcatctggaatgcagaccatttatgtcattattaccaataggctgggggtatctagatctgaacattcccctaaagttgtatgtaattccttgtaaattctctctcttaatgtaaaccttcaggcatgatgaaattaaaatagaagaaatttacacaagagttcacatttttgtcttccgcacaagctatgtttaaaacaagtgaccaagaatttggagatgtccaaacttcctagctcacttgggggtagtatacttaactatgtgccctcacatattgcttgtattcaatctttatttgcatttaatttcttacttgtattttacttttaaaatttcaaactagtggttgaaaatattgcttgaatttcaatatgtcttcaaccctccttcctagaagggggaattgcttacaacttggttttcacctttagtgtttaagtttgaatattgtttggattttaatacatcttttactctccttcctagaaggaggaatcactttaagtctattgcatatcaaacttgtttctcataaaaaagcacaaccaatatgttttcagcctttctatcctaaaaaggaaatgttgaccttgcttttaaccaatgatagtcagtcttaattaaagcgattgacaaataaataaataatagaaaaggaaatagttaaagtaaagaagacactagatttatagaggttcgtccccttatagttagttatagcctactcccctttagttgtattgacttgtgaggaagaataaattattctctcttgaaagctcttacaatgatctctaagcaatttactcttagatcatgatttctctcttgaatgttctctctctaaatatttttgtattcttaaatagtgagatgaagccactatttatagggattaattacatgatattggttttcctaaatcaaagagaaatagaataggaaactagtttatttccataattacaatgaagaaaatgggaaacttaggctgattgcctttattttctaaagacacaaatctatccaatgaatatagggattataccgtgacttgcaatcttggagatatacaagatttatatcagaaattgttaacttgcaccccttgggcagtgcatgcgagctacttgcttaagtggagctggtggaatgtctattcattagattctcagacatcctaccatccatgtgtgactttgagcaccataacagtctgcatgacctactaggagtagaatcatctgcccatgttataaaatatgttacacatgtcacctagatggatgccacatcatagtgcagaaatttggataacatttttccccaagtccacacgagatcttcttggtcgcacgtggacttatttggccaggaagttgtctttatgggtgacgcgtgtctggttgtaaactttgatccaacatgacttcatcgaacgtctctttcgtgtttaggaaatttaatacttcttaaaagttgtacctcgaatcatgcactaactattgagtgacatctcatgcgtgacgtttatattatttgcaatgagtactaacgttcaatttagggggaaaaaccaaaatattcgaatttgaaatcaattaatttcccctttcaatgcctataaaaggggttgaaagctctttgggaattttcttagccatttttactcttagaaaaccagagcaaaaaaatttcctattttcttctcaaatcttcgaagaaatcttactggaaattctatccgagaaagctcaaaaagcttcgaacagtgagtaatttgtttttccctcttctttatgcaatatctattgagtacacatgtttatttatgaatttcttgaagcaaaatctatgttcttgaactgttcatatagtagattacattagggcttttaactatgactaacatatgcttaaactttctgattctgtaattcgtatcacttttggcttgaatgtgttcataatcaccaattcatgagtttctaaaaaaattccaaatactctttgagatttttaacttctgggtttgggaattccattttatagtgaaattccttctttttatcttgaatttgcttggttggcatattaaacatatttttctcctctcccctcgtccaagtctcatctcttgtctcccttatttttgtagatgaaccctagtgagttctcgggaggcaaaaatcatatcgactaggacctctttcagcttttataaagatcatcctcagctccatgcaaattcatcttcatgttggaagttattttaccaggaacttagatctactcacaagtat

SEQ ID NO: 296363 - DNA, 4640 bp, Cannabis indica
gtatgtatgactgaaaaaaataaattgtcaacccccataacgggaaaaataatactggaatatagaaaagggaaagcatattacataatgaattagtaagaaagagaaatttttcaattgcgcacgatttaaactaaacatttagttatatagtataaatattgtattgtagaattacattggagagaaaacttgactttaacattgaaagatttagttctataatgttgttaattatatttatcactgcaactatgacacaatatataaattatttatcctttttaaggttttgtgaagattaacattaaacatggtgatagattcaagaatttgtgtgaaagagaattatattgattaataataattaagctcatacctcttctgcaattttgctggacattcctatccatctcagattttccgctgacctctgatccgatttgaaatcctcatcgaaatctccgatctcgatggatctcgctaggtgatcttcccaggagttgtccacaaaccgcaaagaattcatgtggttgttttctaacaatgattggttgtattgagtgtcttggccaaccatgaagctgaaatcatcagccgcagtaccaatattaacattacttactccccacattgatgcgtcatcagcaaagatactactgggctggtttatcagttcttgagaaacatgagcaaccgagaggatttcttgtaagatatcagtgtcattggccgtagtttctaggattgcctgatgttgatgagcacttgattgcatcgctttgaattcattgattttcgctgaagcttgaccaaaatcttctacttccaatggaggaagtgtcagcctatgttgtaacctagcacactcaagtgctacatcaacctgtcaattatagcaattaaaaatttatagaagtattgctttttaatactagcaatatatatttctacattattggttattaaaggtaaaccattttgtatattggtattatttataaaatataaaactgtactgaagctataataaaataaaaaaaaaataaaaaaagtaccttggaaggagggtaagaaattcctcctaaattctgaaaggatgaagtggatgttgtaccaaaattataattaaaattgtcatcattagataagaagtttgtccatttatgtgaatgatgatattctggtctatatctttgcatcatagactttggagcggagcaagtgtcaggaggcagcattgaataattgttgctctcaaaatcgtcacatcttccatcagaatatatttcaatgcttgaagaatgatcactagtcatgttaatgttgcgattattatgattaagaatctgatgatgattctggctcatatggttagtagtactggtgcttgtacttccgtaatattgctctccaatctttggcccaacagcacttttcttgaatacacgacaaagtgcatacgcatcctacaataatagcacaaataattatcctacatttttaaaattatacaaatataattaccatcactagtgttgatacatacacatattaattagtgagaatatattgataacagaaaaaatcgaaagaaacttaatttaaagattgagaaatcacctggagacctgatggaatctcacactctcgttcatccagacgatattcatgcataacccagtcagttctagagccatgtggagcccttcctctgtagtaaaccaatgtttttttcatgccaactgcacgtgtctgcgagttcacctttcggtctttccctgtggccttccagtatccacctttcgttgcccgacttagtcctcgacccatttggatatttgcgatctcggggactgaagaagtaccactccagatctttgctcggtaacaatgacttccctgcatatatgtattttcaaatattttactcatatcgaaattatataataatattttcattagaaaataaatcattgaatatactgtttcaagtttcattattagctagcgtcttttattttttggcttaatttgtcgtagttattcttgtcgttcgttagaagtaaaaccctaacaaggcaacaagaaaaataaaataattaaaaaaggtatattttaaaaagacgtaaaggattgcttgggaaatcttgcatatatttcttgaagagaatgccattcttttctttccgtggagtgcttttttgactcgggtctcttcccctatgaagtcttcatgttcacaacagaacctatagcttgatcgatctgttgataaagatcgagggaccatatcttggtgcgacctaaagtacttccctttgtccataacctcaaatactaatataattaaaagtgtaacatatttgactggtaaagtactgggtattcgatcaagtcacttgagttgattactatccaaatcggtcaataattgattggaggataaaaaaaaaaagcagcaattatttcatccggaagacgcatttttatcaataatgatttcttctaaaaggttttctagccccgatatatgttacgtgctcacttaacggaagaaagaaaaacaaaatcaaggcacaaacatatgaattcgcaagaaaaatactctaacatataaatattaaagtattagttattgtttttgtcaaaagaataaaaaaaagttattaattatagattgtttccaaatttctaatttaacttgaaaaatatggatcgagaaaacgtttgactaatatttactaaattcaactaacataatctcgcttatttcctgatgaaaataaaagtgatcaaatcaatctattggagatgagatcactcccaaactttccgaaacaaaatttatgctaaattatgtaagttagtatgcgtgcatacttattataaaacgtaatgtttaattatatataaataatcattacctggtaaatcccaaggttcgcacttgtacagatcaacttcagggatgatctctaaatcgatcttacggccgttgatctttctcttcaggtaataagctactagttcctcatcggttggatggaatcgaaaaccagggggcaacgaaaccggtgccatttctttccctctacttaccctgctaatttatgttatatagtatttatttccacactcctctttcacgttagtcacctgaggtaatataaggattacaaaagcatcagtgaaatatatataagtatattggtattcaaaaccctactagcttaccatataatcacgaagaaagaagaagaacgcttttagaagaaatagcaaatgtctcttctcgtttgaagaaagcaaattttaatgtgtatttatatatatatgactgaatcatacagtggcctacatatacatatacaatatatacgtgcatgtaattcagagtagtacctaggtctttactactagaaaaaggacagaattcaagacgtaccgctaatagaaacaaaacacaagagacagacggagcgagggagagggagagggagctagagagagagaaagagaaccaaatcgtgaaatcttggagtgttattattattctgagaggtttgtttgcttcaagggttttgttaatatgaggacaaaaaggaggagagagaaatgaaaaaaaaaaaaagcagaaagtgattagtggcggtcactcataccttctatataattttattttattttaaaaaaaaaattctttatctcactttaaggatttctttactttcttttaaagtccataccatataatacaacatgattcgtgttatcgttcccctcaagccttacgtattcctcaccctctcggtctctctctaggcctcactgccaattatcccattcttcgttcttgtcctttcttggaatctgagatacacgtggtgatttctgataggatcaagttatggggccgacctttttacgttcatattatatatatgttcggaaatataaaaggaccaaaacatgtaatccggcggcgccatgaagaatatcttcaaattttgaatgaagaatgtttatgtataaataaatcctcattcccacttccctgtatcttttcccacgtagtttcaagtcattcccttatttgttcattgtctaactcttactcttcttaatttttatttgtttctaattttttttaagaggaactttattaagaaccaaacaactatacggccccttacaaagtcttccaagcaaatggaaataaaccatgaaaaaaacaaagaagaagaaaagctcctacaaatctctaagaggtttattagctaaaatgtgaacaatactattacaagacctttgtaataaatagaaagttgcactagcaagtgtaaaatttggtattgatcactaaaatttaaagaatttacgaagccatattgtcactacaaaaataaggtttttaggggagatagggaagttgagttgccttccaaactttttaatcaccctaacacgcattcgggaaaatattttgcaaacaataatagcagctatgagtgaaaaacagatgaagaggacaagcagaacagagtaaaatactctgtaataattttattattttctgaactaactttacaaatacaagagagggaccttttatagagtgacttgagttagttgggaat

SEQ ID NO: 296364 - DNA, 1831 bp, Cannabis indica
ttaatttttaaaaggtaatattttttttatggggctatagccccacattaatactagtagtttaatttgtccctgcctagggtccacctagcctagggcccaaaagaaatttgtcaccttttaaaattacacatttttttacattttaaaaaataccatatttttctttaaaagggcccaaaatattttttttcatatgacccacttaaatttaaggccgactttgtgtatgtatgtgttgccctattagcttataatatatatatatagtagaaattacattgtatacccactttactttatttgttttaatttttacttttattttcatatcctttaagatacccacttttatagatgatgttctcaattatactctttaagttaatgtaaattatgtgctagacttaagtggagagtgaaagtatattgggcaactcacccattcacaaaagtggatacattttaatgaaatataatatgatgatatttttaattaatggatacaaaaaagagatattcttgaagtactcatctctataatatatttgttttcgttattattattaataattttttttttgaaaattagtaaaaaattatattaatcacaaaacaattacaatttaactacgctaaccaaatatttgtaatggtaaatttgataagtatatattaccaccgaacaatacactttacaaactaagtagcaccgcttttaaaagggtcttcaaataatttttaatacaattttttgaaccaatctatatctttttgagtaatttttttacatctaattctatttttaattaacatcaactttgattgtctttaaaatagattttccattgtataaactttcatatatttcgaagcgccaaccaattaattacatgaagtctctaactaccattcttatcttctatttaatctttgagtatatgtaccttgaatataattctattaaaaacagagtatataaaaaattatttattgatgttttttttatatattttatgtataaatttatatattttcatataggttgttatgaggtcatggaaagtgttggtgtaagttgtgataaccttctgcgcaatgggaatacattgttagcattctcagaattgtcaatcaatttccattcacctttaagagtacgtatatttaattctttttttttttatctctttaataattatgtatatgtatatataataattatatttgatatttacggtaaaatctactaattattatatatatagagaaatttaaataatcataccacaaaattttaaaaataatcaaagatatttactctataggtagtgccctaatttcatttgatacccaaattacctctctcattgcaaaactcatctttctcttttctctattttcgatcttccctctcccccgtctctacccaaactagcgtctcctcccatttcctacagaacaattgatcccacccatgactgatgatcattaatggccaagagaccatcgtacatttatcaactatcgtaccatattaaaccttcatccctaacctctaaattacattaatattgtaaccaccatcgtaccctatcgagtattcacaaaaattttatcaaactttatcatgccataaatttttttcatgacatagaatgtaagcaactatcataccactatctcgtaccactatcgtactatatcatgtgtacttttatcaactatatcctaccttatcgaaccttcatccctaatctttagattacattgctatcgtacccaaaaaatcaaggagaacctaaaaaatacagatttcaccaaaactcaa

SEQ ID NO: 296365 - DNA, 7390 bp, Cannabis indica
tttttttttttttttctaagtaacaactgttgttacatatatttaaagacgtggcaaaatttaaaccaaaaaaactggctttgtttgagagaggggtgacctgacctgacctgatctgaccacccttttgttgccttcgttcaaacccaagtcattgaatttgaatatctccaactatagggattaattcacgcacaaacaaaagaaaaacatatatgtattttaaataattataaaaataaataaaagaaaattaagaagaagatgatagcagctaggccagcttgtcagctacctaagctgttggaaaagctttgttgtgtatatcaacttgtcagcttcaccaacaacaatatatgtgtgttgttttcgccatttaatacacacatacactttcgagccattgaatcttatctcaagaaccggattattttgtagttggatatatatatatataataaataataatttatatgtgttatatagcaatagcatgcatgtctaaaatgagaaatatcccacgtcattatatatcttgatatacatgtaaattatataatgtacatatatttatgtttttatttctttaattttctataaataaataagttgttgtgtgtgactcttcttgtcggatctttgttttaatttttagctacacagatacgactagtataattcgacatgtgacattaacaaatttaaacttttcaagttttatggtccctagctagctatagctaattcatcacaacattattgcttcaattttgtctacaaataattaatagtataaattatttataatttgcgtatatatatataattgagtttggtcacctagtgaggtaaaggcaaaacaagctcctattatataatataatgttaccagccaaatttgctaaatttgctaagtgcatgaatcaaacctctcatccattttctatataaacccccttatatcttctacttctcagtgcttcacacactccaattttaacttccactctttagttctttctctctcaatttttattttttaattaaaaagagtcaactaatttataagaaaaaaaaatgccttcctcttccataattctagtctcaaaatgcgtagttgttccagaacaaaactccatgatcgaaactctgaagctttcagtctctgatatccctatgctttcctgtcaatacattcaaaaaggtgttctgttcttcaattcaccaactcaatctattaatgacttaatcaattctctgaaacaatccctctctgtggctctcctccatttccctgctctcgctggccgtttaattaccgacgatgacggccacgtccacatccattgcaacgatgccggcgtcgattttattcatgccaaagcaaaacatctcgctgttcgaggaattcttccactggatcgcgatgttcctgattgtttcaaggagtttttcgcctttgatcggaccgtaagttactctggtcattttaaacccttgcttgccgttcaggtaacggagctctctgacggcgttttcattggctgtactgtcaatcacgccgttacggatgggacctcgttttggcacttcttcaatacctttgctgaaatttgtaagggcgcgaagaagatcacgatatctcctgatttcagccgcgacacagtttttaactcgtcggcggtgcttcgtttcccggaaggtggtccaaaagctaccttttccggcgaagaaccattaagggagagaatttttcattttagcagagaagccattcagaagcttaagcttcgagctaataactattctgttctgaccactaaaacgacaccgtctaattgcaacggtttttccgactcgtccgagattctcggcaaacaattgaatgacagttggaaaaccgttaacaatggttacggtttcaatcgtacggctgagatttcatccttccaatcactatgtgcacaactgtggcgctccgtgacacgtgcgagaaagatagaggaatcaaaaacgacgacgtttcgtatggccgtgaattgccgccaccgtgtggagccgaaaatggattcacactacttcgggaacgcaattcagagcatcccgacctacgcaccggctggtgagctcatatcgcgagacctcgggtggtgcgccgatctcctccacaagaacgtggtggcgcacgataacgctaaggtgaggttcggcgtagaggattgggagcgagagccgaggcttttcccgctggggaatcccgacggcgcctccatcacgatgggaagctcccccagattcccaatgtacaacaacgatttcgggtggggtcgacccgttgctgttcgtagcggtaaggcaaacaaattcgacggtaaaatctcggcgttcccgggacgagaaggaaatgggacagttgatctagaggtggttttggcgccggagacgatggctgggcttgagaaggattctgagtttatggaatatgtatcggaaatagttgtgtgagttgagtggaagagttattggtttagtaggagaaagaaaagggaagaaaatgaggtgtcagtctcataatacttaatggtaaaggctgacagtggtgactagcacgtgtcaatatcgctattggttcaattaagtatcgggtcttatataatttaatataatagcttttacggagtatcgctagccaatcacaatgcgagatgtcgagaagattctaagcaccacaagtgtcttataacaatgctctactgttaattagctgagtcagcgaaggctgtttgggttgagacaatttgtccgtttattagttaaaatgtaaaagttgtacttgtatatttttagttaaagtgtgtcttaggctttcctatattttgtagtgtcagcattaatatattttgtgttttatttatttatttattttttgcttctttgaattctaactcttaatatttatttatttatatttgtagaagaatcatttgtactgctcaacaatcatttacaaacactaactacaattcaataaaagtaagtctatacaactatacccctcatattaattacaatttttgtataaatttatgaaaatcaattcttatcccccataataaacattttactagttaacacccctcttagcttattcaaggcatcaaatggaattttcctaatagtgtgttttactagccacaatttttgattccataatacatcattatataactgctaagatggataataacatgtttttccttgctttgtttagctttagaaattctacctagcagctcaaagatgttctagattttgccttccaatttagtcaaattccttcagaaaacttcttgctaaggataagcaaaaaataagtgtttgatgtcttttatatcttccccacacatcatacagtgaagattcaaactcagtttaaacttcataattctatcctctgttctaagcctttcccacattacaagccacattataaatttgtatttaggagtaattaatcaatcctaaacagatttagcccaatcttttttgtcattaagatcaaataaaatagtatgccccggctgaatactatatttttgagtaacaaaacaatcttaattgatctttttcttaaatacatttttgacaacaactagctttttctaatatcagctacaatccgtggcacaaacatatttccacaagttatcttttcccaagtagattgtatttatccacttaacaaacaaacaaacaaattgtctttcttttttggcaattgcccaaacatatttccccatagcaaccaaattctattcttgtacgttcttgaaacttaagccactagctgatttcgatagaaaagtcatattccatgcgaaatgctttgcatattgcttccacatcatgaagcaattttattggtaaaatcataacttgagcccaatatagatgtatagtcattagcactgaatttatcaatattactcttcctatataagataagtttctagagctccaaactctgattctattagtcattctctccaaaaatacatttacattcaacataagagatttttttagcatataggaataccaaagtacttgaatgaagatggctacgagaaaaacctgatacctccagaatccgaactacatcagcttcaagcatgcccttgcaatacactgcagtctttatttcatttggaactaatctagatgtggatgagaagagttccaaccccctcaacattagcaaaatagagatataatctccattgtaaaacagtagtaagtcatccgcaaaacacatggtttagttgaaaatgagcacaccgatcatgaaacttaaagtcactccattctccaaccttcttcataattttagataaaatactccattcccaatacaaaagtaggagagatatgggatctccttacctaagatctcttttagtataaaaaaaccacacatagagccattgaaaagcaagaaaatttttagagttctaatacataccatgatgagatttatgaattgttgggaaaatccatgctaagatccattttggtaagcgagagtcatgttgtatttcgtaatggcaaactttcagctttcacttaggaaaggctaaaagtgctcgagaaatttggacattgactttgcttacaaaagctggaggaaaaatatctcaggatggcgagggtcatgttgaatttttatgaggtaagcttcgacttttgcaaaggaaggctgaagttgcacaagaattcaagcttagactttacttgaaaagattaaaaagagaaagcaccacggggagtaatacaaacatcaaccagtccttccattccgggaaggagggttgaagacgtgccataatcatgccatacacttattgtctatttggcataaacctgcgtgttacgctcacacgctaaatacaataaggccttagaacgtttcatctcagttctagttattgagtccaaccagattatgccttgaacgcataatccttaatctcaataatatatatagcatggcataatatttatacattaacaattactagggtaataaccctaggctattaaaccgctcactttagggtaataactctaattccagtttctaattactcacaatataatattcagcataagccccaccgctcataactctatgtgctaactactgtcttacctgatgtcacacaattgtggagattccaaatccccaggtacttctgaccaagtgccagtaatcctagtcataatttctgggattcacaaaataaagttaatccctaaatccttttccacataattataaaattggcattcaaattctagataatcacatagagctcggaacgagctttccaatgatatgtggaactcccgaagtggagttcggattacaaagatacaagcattcgaaactgcccataaacaagggggcgggccgcgacactccccacacaggaccgcggcacctgggttggaaacccaggccaccaacaggggcgggccgcaatgcccatagagtggagccgcgaccactgggtttcaaacccaagaaaccccaaattacaggtttaaaaacatgctcaaacacacctaactcaccccaattatgcataaacctcaaaatcatactccaaagattaataggtaataaaatagagcatcaaaacacatatttcatgcttaatccacatccaacatacatcaaaaattcagattaacaacatacaagctaggctccaaacattgagctaaagatcaacataattccatcttcaaagacttgcacagccaagccataaactcatgcttcaagcaaataattttagagctacaaaccacataactaacactaaataccatccaaatattcactccaaaacctacccaaagcaataatcaatagctatagacacaatcatgatcacaacaacaaaaacaacttaattatcacaagcatgcaactcaagagcacatttcatgacttcacacatattttcatctcagaaatacaggaataaaaattcaataacaaaagatggaaacttcctcaagatctttcccactcaagcaccaaaatcctaagcgccaagcacacaccaaaaatccaattgaaagcacatattcaagtgaaaaagagttttcagaaagagagaggggaaaggagggacggttagggctgatcaaaacaagagatgcacttcaatttcactaaaattcattttgttgcaaaagtgagtcaaatggtcaaaatgaccaaattgcccctaaggccttttaacacacatacatacattatgggaaaataagtcatttccatcacaaactacatttaaataaatttcaggttattcactcaatcataaaatgccaatataaaatcccaaaaatacatttcggtcccgaacccggttcagcctaaaatactcgattatgactataccatgccgacttgtcaaaaaacacctgcaaaaaggacacaaaaagtatactatataataatatagtccataagcacgtcacaacattaaaatcatagttctacccttctcaagtcaaaattataaaaatgcccttgactcaccaacggggtcttaacatgtcatttcttaatttaattcacatataataatataattcaatatattattacatttatcccctccttatataaaatttcatcccgaagtttacctgaacaactccggatatttctgatgcatatccgtcttgagttcccaggttggctcttctactttactatttatccataatacctttatcagtgtaattgtcttgtttctcaaaactttttctcttctatcctgtacttgcactggttgttccttgtatgatagatctagttgaagttctaatgcttaataactctgaatatgggacgggtctgagacatacttccgaagcatcgaaatgtagaacacatcatgtacggatgccagcgctaggggcatagccaacctgtacgatacttgccctattctctcaaggatctcgaaaggtccaatgaattcgggctaagctttcctttcttaccaaagcgcttgatgcctttcataggcgacacatggagaaacaccatatccctgatctgaaaatcaatatcccgacgctttggatcagcataactcgtctttctactctgagccgcgagcattcgcgctctgattttatcaactgcctcacttgttctctgaacaactttgggacctaaaaactttttttcacctacttcatcccagtgaataggtgatatgtactttcttccatataaaagttcataaggagccatcccgattgtcgcctgatagctgttgttatacgaaaactcgatcagggg

SEQ ID NO: 296366 - DNA, 1452 bp, Cannabis indica
agtaaattagatcctggtaaaacataatcaaacacattggaggcttaattcaatgtttttctagggaagggtctgagatctaagaaatcaacataattgtttattttattgattagtttctggtcagtatgtattctttttagatttattgtatctaaatatatatcttgttgttttcaggaacacaacaaatttttatctaaaaggcaggataagttttctcctcccttttgtttggtgttgagaaagtggtcaacaagatgttgtttgacaagcatagttatcgtggtaactttttgacttcttcagtaagtgtgatttttatagcttttttgtggttgtttactttttaaatttacattttcttgtgttgttttttggtaattttttttaatattttctcactttttcttctcagcatattgatatcaatttctagtacccgtgtaagaaaatcaagtatgcaaaggagctaaaattaaagtttacgacaactgattgcctctttagtgctagcatcacaaatatctatgattggtttattgataatcaaaaaagatatttttgttttatctatagatcatattgtggtctaatatattatgggagaaaagatgttatgtgctactgcacgacatttagttgatcacgttgttttcctgattatatgaatgtccatgagaattggatacgtggtctcttaaagttatctaagtgtcacatctctctgtacaactcccttaagaacagtaggtttgataaagctgcgaatgaggcttgtaatcctttttctattatgttctcatattatttggctatgttagattttatactcttaagaaaaaattcaggttttttataatggagccattaaaaatcattcatgtttctagattccctgagcagaatgcagcgtaagtttttcagattttgttttgttttggtttttctatttttctaaagtgcatttaatgtttgttaatttttatcattcttttgatttttatgtattttactggttgtttttgtagtgactagagtattgctcttgcaacttttgcaaagtattttattgatagtaagcctgtcgcatctgaggattttggttgttttattttatcactatgatcgaaagaagcaagtggaagatattgatagcgagtctaattttccatgaaatttttaatggaatcatttgatattattttttataatatgttgttttttcttgtgactgaaaataatgtttacatatagtaatttttatattttctaatgtttgcagaatgtttaagttgtttatatgttgttttagggttgtattattaaatgttctcttaatttttctttattatcaaaaaaatactaatataataacttgttataaaggttgctagaatgtttatcatttttttctattttgacattctttgatagatttaggttcaagat

SEQ ID NO: 296367 - DNA, 12558 bp, Cannabis indica
taaattgattcctcaaaaaaaaaaaaagcctaattaaattgacatctcaacccaacgattcaaagctctagaattcgatcctatctactgattgttgatctttaaattaaagatctgttagttgcacttgggtagaactcactctcaaaagctagcctaagagagaagaccaccaaccaatcccatacttagtcgatgtgggatcctaacaagatctcaaaaagaaacttaatttaatatctcatgtggagtaatttaaatcattcctgctgcacacacagatataactcactggcttttgttctcttattactttttggccttatttagcagaaagcttaactttttttcaatgtttttcccgtgcatcaggatgatgcacaggcactcgttactaggcttttggatcaattgatgaagtgtgaaaagtatggggagcggcgtggagcagcttttgggcttgctggagtagtcaagggatttggaatctcttccttgaagaaatacaacattgtgactgtactacgagaaggtctagcagacaggtttgcttccatcttacgcttcaagcagacatgttaaagatgtagtgttaactattatgttaacctccaaacagttcgaagaaactttaaaacatttggttattggtagagatttgtgtagttgttaaactttaaaatgaattattatctaattgcaccagatgtttggctactttctgagatttgagaggaatatggttgggttgatgtttcaaaaaactttcttctactaaatataattatctcatcatagtggttctggcaacttttctacgacgaggaaagagaaaggggggatgggaagttgcttgtgtttttgatttttgcgcctacattttgtttaccatttttgcaatagttaacttaccattttgatgtttcataaaaactttcttctactaaatataattatcatcatagtggttctagcaacttctctaagatgatgaaagaaaaggggggatgggaagttgcttgtgattttgatttttgcgcctacattttgtttaccatttttgcaatacttaagttaccattttgattttattttaacaccacttaataatttatttcatctgaatattccttattatttttttaataagactacgtcaatgtttaatatttgtttctcttttcatataaggaactctgcaaaatgtcgtgaaggagccttgttgggatttgagtgtctttgtgaaacacttggacgattatttgagccgtacgtataagatattgtaatggctacactgttatgcttttatattttatgatttacttgatgtttacttttattctttatgttttcagttatgtgattcaaatgttaccattacttctggtttctttctcggatcaagttattgcagttcgtgatgctgctgaatgtgctgcccgtgcaatgatgtcgcaactcagtgctcagggggtgaagttggtccttccatctctcttaaaggtgtttaattttcacttatcatatatatacaaacattcatataaattaattttttggagcatttgtttacttattatgcttgtttattttcatttacaagctaattctttgtatgaaacatttaatttaatgcattaattttgcagggtctcgaagataaagcttggcgaacaaagcaaagtagtgttcaattacttggtgcaatggcctattgtgctccagagcaattgtcccagtgtctccctaagatcgtaccaaaactgacagaggtctgtctctctttgggtttctgaatttgttttttattttgtaaaattttttatacttgtacttaattttgttttatctttgtccttaaacatctatgaatgaaggttttgacagatacccatccaaaagtccagtcagctgggcaaacggcacttcaacaggttattttttttttctttctgattcatatagtagttctttgttctatagttgttgtgattttctttttcctttcatatttaggtggggagcgtaataaaaaatccagaaatatcttcccttgttcctacacttttgatgggtcttacagatcccaatgaccatacaagatactcccttgatattcttctgcaagtaagattacagattaaaatcttattttgtaatattcggagtttactttgttgattgacttgactaacttatttcaatcatatggggttgttttgtttattggctgaaatgcttaatggattcgctgcagacaacttttattaattcaattgatgcaccgtcactagcattattagttccaatcgttcataggggactaagagagagaagtgcagagacaaaaaagaaagctgcacaaattgtgggaaatatgtgttcattagttacagaaccaaagtatatgattccatatattgggttgcttctgcctgaagtgaaaaaggtttgtttcataaatttctgcatctttccttgccactggtgtttcataagattcttgcaatctagttgtccatgaaagcctcttacttttcatgtcaacaaaaataggttcttgtggatccaattccggaagttcgttcagttgcagcaagagctcttggatcacttatacgtggaatgggtgaagaaagattcccagatcttgttccttggttattagatacgcttaaatctgataatagtaatgttgagcgttctggagctgctcagggattgagtgaggtcagtttctttgtttgaggaagatttagtttcaagtctttttagatgcaacttttgtctgttcttaatattgatgtatgaactgcgttgaactgatttgaagtaaccctttttatggacaggtcaattggaaatatttttttgattactgtgtattctcaacatttcttattacttatgatgtctctgtggtcaaattactttctaggttttggctgcccttggaactgagtactttgagcatttacttcctgatattattcgaaactgttctcatcaaaaggcttctgtgcgcgacggatatttgacactttttaaggtgaattgtagatggtggcttttttgtttttgtgttattggaaagagacatggtcacttgtccatgagtgagctcctcagtcctcccatgtttattaagaaccctcacttacggttaattgtggatggtgacattaccagcattatattcttgttggtattcagaaagttaacttggtggtgttgtttatgtatgtagtatttcccgaggtcattgggcatccagtttcagaagtatttgcagcaggtcttgcctgcaattttagatggtaactaaatatctcgaaatagtttcattataaaaatgtcttttgaattttattattctcttttcaagattctttctcaatctaaacaaaatgtatgtttcttgcaggtcttgctgatgaaaatgagtctgtacgtgatgcagcgctaggggcagggcatgtactggttgaacattatgcagcaacgtgagtggattactcatttcctcactcccaaaactttttcctttataaattttatgttacttgattctaagatggatagtgtctgaaattattattactttttgaattttatgttacttgattttaaaatggtttgtagtgtctgaagttattattaggttattgtggagcatatattgcagaaaatatgcccgaaccttatgaataacaagtgtttttacatcttaaacactttgagtgttttgaattcttttctgaatcattttctagcgccggaaaccttttcaaaatcattggattatgagtggttgcagtggtgttttactttacatgtcagacttttctctgaaatcataattcatcagatttcctttttttttaaccctaatttccttcttgtttgtcactttctcaggtctttacctttgctccttccggctgtagaggatggcatatttaatgatagttggcgtattcggcaaagctctgtagagttattaggtgatcttttgtttaaggtaaacacttttttcccttgtccatttttctttctaggagtgttgtcacacttacattctttgatagctgaatctcatttcattcaggttgctggaacttctgggaaagccttacttgagggtggaagcgatgatgaaggtgctagtactgaagcgcaggggcgtgctatcattgaggttcttggaaaggaaaaacgtgatgaggttctcgctgcattatatatggttcgaactgatatcagtctgtcagtgcgtcaggtagggagaaccagagaacatgagaaccagttatttggcgacattttcttatgtatctgaatattgacttcatacccaacatttttacactgatttttactgtatcaggctgctttgcatgtttggaaaactatagttgtaaatactccaagaactctgaaagatattatgccagtcttgatgaatacactcattacttctcttgcttcatcatcatctgagaggcgacaggtttgcattgtctggttgatctggtcagttttagagtcctcattgaacatttctaattcaagttctcacgtaggttgcgggacgagcactcggtgaacttgtccgtaagcttggcgaaagagtgcttcctctaatcatacctattttatcgaaaggactgaaggatccagatgcaagcagaagacaagtcagttttttttttttgtattgctttaatttttgcatcatacagaaatattatatcgtgataaaaattataagttaatttttgttaagagtccatgttttggagaaaaaccctcttgaaatgcagtggaaataaagttaagactgcaaatgtggttgatggaaattatatagaaagggagtgcaatatatatatgtgactaattaatgtctttgttttcttatttgacactttcagtgatcagcctgtttacttcattttctggcatcatttttcacatttttattgtatgttaagagtaattaatgtcctagcagcttacattataccagaggtaataattgttttttcttacttaatgatatgatttatagggagtatgtataggtttgagtgaagtgatgggcagtgctggtaaaagtcagttaataagtttcatggatgagctcatcccaactattcggacagcactttgtgataggtttgtgaatgtgtttatggtctactgtttgattatcatattattttatgtaaaggagttagttttaattttttttttcttgctgacagcacacctgaagttcgagagtctgcaggccaagcattcagcactctctacaaaggtttttttttgtttcctgattcatttatctttgcaatggactatgtgattttcttttcttttcattgttcattatctaatataatcatcattaaaatgtttcgatgtagagtgctggattgcaagcaattgatgaaattgttccaacccttttacatgctttggaggatgacgagacgtctgatactgcacttgatggccttaagcaaatcttgaggtagaatatacatatgatctttctctccttgttttcaatcttcatcctttcccctgcacagatgtgttgcctccaaaaactaagcgattctgtttgttgttttagtgtcaggacttcagcaattttacctcatattttgccgaagctggtccatcttcctctttcgtatgttttctttcttaactttagtatgttttgcatgtttctttgtgaggacattcatatgaattttggttaattttagtgctttcaatgcacatgcattgggagcttttgcggaggttgctggagctggtcttaattctcatcttggccttgttcttcctgctctactctctgcaatggttggtgctgacaaggtatgcaagtagcattccactttcacgttttatgggggttttttattgctcaaattaagtttcaattcacttcttgcttacttttattcatccattgatcatatgatgacatttacttacatgctgtatgtaatattcattaaacttgtatgttatttgtggatacggtaggatgttcaaaatctggctaaggaagcagcggagactgtggtcttagttattgacgacgaaggtatcgaatatcttataccagagcttctcaaagcctctaatgatagccaggtatttttttaaacctagacttgtatatacatgtgagtaccatcaagaagtgaaatctttcagtgttcttagttcttactttttatatgatttttagccatgcagttcctgattaaagtatttttagtgtcagtaattttctaatcttttggtcttttttctagttgtctttcttaactgcagttttcttgtgttactttaccaagagtacaagggttgttcgtttttgaacgcgcagttcctgatttaagaaccttgctgatgttatctttctctaattttgttctctatatgattttttttcaggcttcgataagaagaagtgctgcatatctcattggatatttttttaagaacagtaaactatatttggttgatgaggctccaaatatgataaccactctgattgttctgcttagtgattcagattcagctactgtttcggtattttctatcttatacgaataagtcacattttcttctcaattattgatgcttacagaataaaattatgctgtcaggctgcttgggaagctttgtcaagggttgtgggttctgttccaaaggatgtacttcctacctatattaaactagtacgagatgctgtttctacatctagggataaagaacggaggaaaaagaaggtgagagagtaattaagatattatgtgtctgttcaggtttgattgatgctggttatcatatctgtgaaacgtaagctttcctaatcatcatgtttgttaacttgcaggggggaccagttctcataccaggattttgcctacccaaagcacttcaaccattgcttcctatatttcttcaagtatttttttttcaccctttatctcaaagtacatatgtgacactcttttcttttttcttgctactataacattaacatgcttttttagtttctttttgtaataaaataagcaagaaacataagtttttaagtaaattgttgggtttaactcatttgcatcagtaaatttgagatttttttcttcttcgttagggcaggttaataatctgtttcattattctgatgatgtctctgtggaaggctaatgatatcgagatgtgatttgatatcttctttttagggtctgataagtggttcagctgaattaagagagcaggctgcgcttggtcttggggaactagttgaagtgactagcgaacaatccttaaaagagtttgtcatcccaataacagggtacgtgcccctgaaattttatgcagttatacttgagatattgagagctaatttcatttatttgtaattgtcgatcgcttccgatacttcctctttatattccattagtagctgtgatgatttagtctctttctttctttttcttcattttacaccaatatgttggtctatataatgtatggatgtgttaattatgtacttgataaattgtaacctatgcttagtgtatatattttgattcttaatctaatcatcttgcaccccaatggggaatcttttactgtgatgacctaaactgtctggggtgagactgagagtgacttttagaatttatttattaacattcccacatagagtgaagcatgccattgattctttttatgtcatgactttcacgaccaaagattattattattattatttttattttacattggcactgttaaattaataaacactacatcttttatattctcatgtctgaaatccatagtcagtttattgatctgattttttgtttcttaaacaccaggcctctcattcggataataggtgatagattcccttggcaggtcaaaagtgccatcctttctactttaacaatcatgataagaaaaggtgggatggccttgaaaccgtttcttccccagcttcaaacaacatttgttaagtgcctacaggacagcacaaggtaggtgcagagtacatggatcatgtctgtagattatagtggcctagtgggcttgatgtttgtacttttttgcatctcaaactaactatagtcataatatgctattactcatcccatccatccacccacacctgaattacaaattttgctgtgcattttgtttatgcatagatttcattcatcttctcttttttcttgcttttgcttactatgttagataatgagtgcaggactgtacgttcgagtgctgcccttgcattagggaagcttagtgctctcagttccaggattgatcctttagtgggtgacctcctaaccagtttgcaggtgattattatttaatgtcatcaagaaagattgcttttaaccaggaaatacttgagttaatggatttgactgtacagacatcagatggtggcattcaggaggctattttgtttgctctgaaaggtgttctaaagcatgctgggaagagtgtcagcgaagctgttagaacacgtgtgtatgttactcttaaagatttgattaatcaggatgatgagcaggttcgaatatctgctgcaagtattttgggtattacatcccaggtatggtttttcttcttccacttttcttttgtctaagagtatgaatcggttgtggttcctatcattcttgtaaattgttcagctcttattgacctggtttaacttcaattttgcagcacatggatgtagctcaactgggtgagctgctgcaggagctctcagatttggcctcctctcctagctggtctgttaggcatggttcagtactcacaatttcttccatgctacggcataatccatcagcagtttatacttctacgttgtatccttctattttgcgtcatcttaaaagcactttgaaagatgaaaaggtacttaattcttgagacaccttttacaggttttttttttggtgggggactaattcttaaagacattttccttcccaaacagtttcctcttcgtgaagcttcgaccaaggcttttggaagactactgctttgtcaaattcaaagcgatccttcaaactcttccgcacatttagatattatttcgtgtctagtttcagctcttcgtgatgattccagtgaagtcagaagaaggggattatctgctcttaaagcagtttcaaaagtaagtagcttttaactcttgaaatttagaggcaagtacagtacacagggatcttatttgtgtgtttaatatttttcaggcaaatccttctactgttttgggttatgtgaatgtgattggtcctgcactttctgagtgtatgaaggacggaagtactcccgtgagacttgctgctgaaagatgtgctttacatgtcttccagttaacaaagggtaattttgttcttgtggttattctcaatcattgttttggatgtttgtttgcatgaatgagtgtagatttttcaatgtccgtggccaaattgctagagttgttcaccatcaccatcaccatcaccatcagtttgacatgttatttttaaattctaaaaagtaaagagatgaaacagttactaagtgtttggctttggtttattttccaggcacagaaaatgttcaagcttcccaaaagttcatcacaggcttagatgctagacgattatcaaaatatcaagagcataggtatattccacacaactccttttttagtttcttgctatcaaagatcattacatggcctttcaatagaaacatggaaagggatcacagaaaatatctctatttatatcagaagtacctgttcctttttttttattatatatatatatataattttcactctgatcatttaatttattattcctggaaatgcagtgatggcagtgatgatagtgaggatgagttgagaagtggttgagaaagttatttatttttttggcaacaccataattttcgatcagagacaaatgagtagataaagaaaatagaggcttttgatacccaaattttcggacctgggtgttctcttttaaatttaaatgtcattaaattaatttgaggatcatgtatagaaatgatttatcgctttttgtaatttattctcttgtgactatctcctataccattttttgaagtttaatgtattaaagagctcgtttatttggagaaaaagttatgtagaataaggccttcccagtttttaatgttgggtatcaagttgtaacattataatgagcaagtaggaattttcatttttcaaaattatctcaattcttatttttaatttatgaaacgtaacttatttcaattctgtgtatttttctgtgtcagaaatcagaaccttttttccgcaggtgttatatcatgtttacattaaagcaaatatgtatggttaatatttacatggaaattctctacagaaattatttggtataatacaaataaatgcgttgtctaatagttttaccgtattttaatgtcatcacttaccatgaaatttcggtcttacaagcttctatttttacagttaatgtcatccacagtggaaaccgaacttaagcgtcatatcccaacaatgtactcataaatagagaaaaattcacagttaatcttattcttacgtattactcagcaatcagcctcgctttccaaatgcacaagtttgtattgtttttctattgaaattaaataaataaatgaagcccggtataagttagagtgtggcaagaataagctgctaacaaaaacagaagtaatttctattttttttttttttaattaaagaaataattggatagtaaaaaagtcatttatgtcgagattatttcgcaccaggaaaaagaagagaacaagttacattcatgtctactctttttttctttttctctttcccttgaaatgttgcatgtctagtctactcaaataccactactggccttgattctagcaatacaagactattcatcttcatttaaaataaggttaattagtcattttttcccccgaactttgacatgtactaaattgtgcccgaacttttttggctgttagaaattcccccgaactattgagattgttaaatttaaggacttttatttcatttcattcaattttactatttcagtgattgtttatgtactaaaccatactccccagactttgatatttacgaaatcatgctcctcaaactttgatatgtactaaatcatgtcatttgaactttcattcatgttaaatttttttactaaaattagacaaaagtctaaatttaacaatctcagtagttcaggaggaattttttatgcccaaaaaagttcagggggcacgatttagtacatgtcaaagttcgaggggaaaaattactaattagtcttaaaataatgtagaaagtgatgtctattgaacgtatccctgtatataatacaagataagatgtattcatctctggttcattattgcttagcatactgcaatcaaaacacatattcggcacacattatatacatgtatttgataacgtataaagcatagaaacaataggagtacgtgtattttttttattcttcatataattgtagatgaaaatatcaaaatgttggagtaatgtgaagtgtgaagtggttgataagggtgtctctgcttagctgaaaaggttaagccaactgttggactcatggtattaatctttccttggccgttaaagtttcatagtcatggagtaatgtcaaagccatgtttgctacaaagaaagaaagaaagaaagaaaggggagaaggtcactttggtaaacttgctcagcacttgcatagttaggtgacgcaataataaatgttacggccaaagtcttcattcatgccagcttcttgccttaaaagcaagcccaatgtgcattgacaaaattgcccctacgtggaagctgcttctagttcatccattgacatgtttttgttccggttagatgaaatgtctaacctaaaaaattaaaattaaatacaaaatggaaacccacagccaccatgaaatgtatggtctacagtcgcatatcatatcaccgagtttcaaaggtttttttttattattattattattatccagctatacatgtacatgattactaagaaggttagattagatccacaatatattaaattaatccaaattctttatttgttaaaatgggtttgatcaagcagagaaaggatttaaatcgatcaagttcattatatggtgcctatagtattaattagatgttagtttttttttttttggttttgtaagaattagatgttaatgtttaaagtaaaggaagctagcaactaactcgtacaaattttcttaaggaaaaatactaaaagacactaagtacccttatcgtaatttcgttagggaaatttgagaaatcatgctaaaaaataacacatggtgtttaattaaactaaaaaattacacattgtttaaatatgctaatttttcaattggcttccaaaattaccc

SEQ ID NO: 296368 - DNA, 5220 bp, Cannabis indica
tacaatgcactctcttaaaatggatacattgatgtacccttgtctgttttagcacccgtaataatttttttgtcaaattttttctcatggtatgtatgttatagtatttaagacatcctgcaaaattttaaaaattttggaaaagtttaacatgccgaaactacgttcaaacagtgtgttgcacgcgtgactattttattttatacgcgtgtaaaatagactgtttgaactttgttttctatattgtaaattattcagaattccttaaaattttataggttatcttaaatagttataaggtacatgaatatgaaaaaaaattagactaaaaaattcttctggatgccgaaaaaagtcaagggtgtatcaatgcatcccttttaaaggggtgcattgtagaatcaccctaaattttctatctctatctatatgtttcagtagaaataaatattagactgcagttaggtagaaaatcatgatttcatcagaaaagacataattgattttctaagtgtgtcttcagaacgaagcaaaagaagtaaatggttttttttgtgctttggaaatgaaaacaaaaaaaaaacgagggaataaagaaaataataataacataataaaaatggattgacacgtgtcatttagctattatagcgcgtagtttaaagcccgttatttctttgcaccatactctgttttgttttgaatgttaaaactgaaacgtattatgactgactactcaaagaggaggttctgttctataaaacattcttgaactaaacaacaaaactaacccaatcaaatactcatatttatgggagaaggagaaagagtggaccaaagaccttttctgagttttctcttctgcttactattcctcggtttcgaagactctttacttttgtctctctttctgggtactaaccatctcaattaacttcatattcttgttattaggtgaaatttccccccttcaataatatttattatctccctctcagtctctttcgaaaggtttttctccatacaagtctcagctctctcaaaaccaggtgcgtttcattttcctttgaatagtacctagctattcaccttttttttttcacagggtaggtggtttgggttttctctgttttattgattgttttttttttccggatttgtttggtttgtttttttttcatagggataagaattcctgaaaggtacaagctctttttttttttccgcccttttctatgaacgaatgaaaaattaaattttgaaatcaagtggttacttggtatctacaagttttggtcttttattcaattttttattttggatgatagaatttttggtgtgtgtctcttgcttttttcttttcctcctggatgatcagtttttgctagagccctgatttcatttttatgtttagtgttttctggaatttgaccctaaattgtttgctttggtgctttaagactaagacgaaaataaaaataaaatgtttttttttttaaagtaaaataaaataaaattatagaaatatttaataaaggattctgaatgttcttgcttctgattttgggtcactaagagaagcggatttagttgtttgatactacaatctttagaatctcaaaaagtcaagggcttttacctgatttccccttcttttctaagatactgttattttttttttttttttggatttctaatcatatagcttcaaattcaagctaaaacattccaactttttcatcagaatctgcttttcttttctttttcccccggatcgaaaggtttatagattcctgtcctttattttatctcatatatatatatatatattttttctttttgatgaattaaaattattatggattggattttgattgtattttattactggagtaaaatgcaattgcagacaaaaactttattttagtatcgggcttctgtctaaaggtatctaatgtccaaaaagagaggggtggggggaacgaataataatagttttgcaaaatctaacaagtacccagatattaaaataatagcaattgagcttaatataactgtagattgcatgagtgtctattttcttttattaagtagattctacaatattcattcttgttaagtaatgactgaagtaagttatctcttgaaactagctcttactaggctgtatatttgaagtggcgacttgtttttgttcttatgaccttttttgtttcctctgtttcaggttgcttctattttgtaacttcaaacataattaagttacaatgagtaatctcaagttaggggttgaggttgtgggggctcatgatctcatgcctaaagatggtcaaggtgcatcgaatgcttttgttgagctccattttgatcaccagagatttcgaaccacagtaaaagaaaaagacttgaacccagtttggaacgagactttctatttcaacattactgatccaagcaatttacataatcacactcttgaggcctttgtctacagcctcaacaagaacaacaacgcgaaatccttccttgggaaagtctgcctcacgtcgacctcatttgttccttatgctgattcgcttgttctgcactaccctcttgataaacgacacttattgtctcgtgtgaagggagagattggtctgaaagtgtttgtgatagatgatccaagtataaggtcatcaaatcctcttcctgccatggacaaccctgtaaaggccgagccaaaacagccaaaagttgcaaattttgtctcgaatttattctcaaatgagaaatccgactcgagacacacatttcatcatcttccgaaagaaagtccagctgaacagaagagtgttgctcctgctccagttgtagttcagcctgcacagaattacgggttgtatgagatgaaatcagaacctcaggctcccaaagttgttaagatgtttacaggtgccccggctcagccagctgattacaccataagggagacaagtccttttttgggtggtggacgagttgtgggaggccgagttatccctggaaacaacagacctacgagcacctatgatctcgtggagaagatgcagtacttgttcgtaagagttgttaaagctcgtgatcttccttcaatggatttaacaggcagtcttgatccttatgtcgaggtgaaaatcgggaacttcaggggaaagacaaagcattttgagaagaagtcaagtcccgaatggaatgaggtttttgcatttgccagggataatcttcagtcctctgttcttgaagtagttgtgaaagacaaggatcttgttatggatgacttggttgggacggtcaggtttgatctacacgaggttccaactagagttccaccagatagtcctttggctcctgaatggtacaggcttgtggacaaggatggggacaagaagaagggggagcttatgcttgcagtttggtacggaacacaagctgatgaggcttttccagatgcttggcattcagatgcgatcggtccaacagataatgctccgtccgcattggcacacatccgatcaaaagtttaccattctccgaggctgtggtacgtccgtgtcaatgtgattgaggcgcaggatttggttacttctgataagtcgcgaatccctgattgttatgtgaaaattcagcttggcaatcagattcagaggactaaaccagttcaggctcggggtatgaatccaatgtggaacgatgatttgttgtttgttgctgctgagccatttgaagaaccattggttatcacggttgaagaccgaactgggcccagcaaagatgagacacttgggagagccgttattcagttgcacaccgtagagaagcgagctgatgatcggaacattcgtgacaagtggctacctcttgaaaaatctatgtctgctgccatggaaggtgaaaacaagagtgaaagcaagaaggagaaattctctagcagggttcgtgttcgggtatgtcttgatggagggtaccatgttcttgacgagtccactcactacagcagtgatcttcgtcccacggcaaagcagctatggaaatcctccattggtgttcttgaactcggtatccttggagctgatggacttcatccgatgaagacaagggacagtagaggcacatcagacacctactgcgttgccaagtatggccacaaatggattcgaactcgaactataatcaacagcttgaacccaaaatacaatgagcagtacacttgggaggtttatgaccctgcaacggttcttaccattggagttttcgacaatgctcaaatcggtggcactgatggtaacagagacatgaaaattggcaaggttaggattcgaatgtcaactctgcagacaggccgagtttacacacactcttaccccttacttgttcttcatccttctggggttaaaaaaatgggggaacttcacttggccataagattctcctgcacttcgttgacaaacatgatgttcaagtacactaaaccccttttgcccaaaatgcactacattaggccactaaccgtgattcaacaagagtcgctgcgtcaccaggctgtcaacatagtggctgcaaggttgagcagagctgagcctcctctgcgtcgggaggttgttgagtacatgtccgacgctgactcccatctatggagcatgaggcgcagcaaggctaactttttcaggttaatgactgtcttttcgggcttattctccgtaggaaaatggtttggagaagtctgcagatggaaaaacccagttacaacagtactagtacacgctttattcatcatgctggtttgttttcccgaactcatacttccaactgttttcctctacatgttcttaatcgggttatggaactttcggtatcgaccgagtaaccctccccacatgaacacgaggctctcacacgcagatgctgtgaatcccgatgagctagatgaagaattcgacacttttccaacgtcccgggccactgatattgtccggatgaggtacgaccgtttgaggagcgtggctggcaggattcaaactgtggtgggcgacattgccacacaaggggagcgcttgcaggcgttgctcagctggagggactctcgggccacaactattttcataatgttctgtcttgttgctgccattgttttgtacgtgactccttttcaaattctggcccttcttgccgggttttatgtcatgagacacccaaggttca

SEQ ID NO: 296369 - DNA, 5881 bp, Cannabis indica
acttcgccagatgagaattacaaggtattttacgctgaaaggagtccttggtggctggtgataaaggccactggggcaccaggacatggtgcaaagctttatgacaacactgccatggagaatttgatgaaaagtgttgaaagcattaggcggtttcgggattcgcagtttgatatgttgaaggctggtttgaagactgatagcgatgtcatctcggttaacatggtcttcctcaaagctgggaccccatctccaactgtgagtttaactcattctttagatctttagttaacaactaattcaagaaattttcttttgcagcatgcgtttgtacaacttatcattacattcattgatgaaagtaatgatcctaaagtatttgataccatttattttttcagggcttcgtcatgaatttgcaaccatctgaagcagaagcaggtttcgatgtaagggtcccgccaaatgctgatccagagtctttagaaagaagaattgtccaagaatgggcacctgcttcacgcaatatgacatttgaggtagtaattcacttgttggatcttttctttgtttggtcttttcagcctaaagggcatgctttcaagttttctacacttgccttttatgtcataatcagttcaaacaaaaagttgctgttcttgataaatttggaagaccagttctcactgcaactgacagttcgaacccgtggtggactctgttagaagaagctataaagaaagccaatggaaaacttgataagccacagatcatgatggggacgacagatgctcgatactttcgggtgcaaggcctgcctgctattggcttctctcccattgccaatactcctattcttcttcacgaccacaatgaggtgagaatccaatccattatggtctcaattgtttggtgttggtgtatgtcattttatttgtgagctcatgatatcattacttaatggcttacagtttttgaacaaagctgagtacctcaaaggaatcaccatctatgaatccattatcaaagcttatgcatcttttgccaagcctgaaagaaatgagagcatcaaggatgagttgtgagagagtaacaatggcttattcctcatcttaagaatgttatgtaagagttgttgatttacagtgttatgcctacactaatgacactgatgtactgaccagatgttatttgtaggaaaaaaataatgggataattagatgaaatactaatttttgtaaaatatttacatttttaagttcaaagttttttttttagattttgtttgtatatatacattgtttgagttacacatttgagattcgatcccatgagaattgagattcgatcccatgagaatgagatccccaacccttacacacaccccaataccttttacggccacttgagctagcctcaagtgatcatgactatcgaactttgatgagtaccaaattgtatttcctaaacttttatttacgttagtatttcattagtaaaattagacgaaaatcctttaactcaacaatttcaatagttggagaaaaaagagataaaaatgttagttaaccatttcacttaatatttatcattatcatatcctccataactatttgtcacttttgagacttaatgtaactcaaagtagactaaagaacacaaaaatcaaatcaaatatgatttttaagagagtcaaaagaagaaaataagagcaaacctcttaaaatatattgatgaaacttgatcttaccgtaatatttcctcagtaaatagtttttactgttctctcttcttcacttattataatacaatatttgaactttgattatattattatgtataatttatttttgtcattcaattcaacacacatctttgccagtaatgaacaattaattgtacttgttgtctactataaacattgaccataagctaccaaaatgttgcagactcttcttctaccagtaatctccacaagaacacttgccattttgaaaatgatggtatcgaatgggatcccgtatcacaatacttctttcctctcgattcgacaagagcttcgcaaagacatgacagtctccacatatcctgatgtttttcctaacacgaataaccttctcttttggcaaggacatcaaaccgaagacaattgccaatttttcgctatgataacgaagtgaatcttcactttgttccccttcaagatcttgtaaaacaaaattagtgtctggaacatatcccagttcttttaatcttttaatcaactggtttaggcgcttattaatggcgtctatcaatggatgtgagttatctcccatagtaaaagcatgaatctgtttgttaacttcgatccagctacatcccggctctttccttactcctatggctctcatgctccttctaacttcagtaacatcagtccatctctgagaattcgcatagatattggatagcagaatataggctccagcatctttgggatccagttttagtatttgcttggctgcgtgtatggctaggtctacattccggtgaaccctacaagcaccaagcaaagttctccatgtaacagcatcagcttcacccttcatttcatgaactaaatttactgcttcattaagctttccagccctaccaagaagatcaatgatgcaaccgtaatgctcctttgtgggctctatcccgaatagctgcttcattgatcgaaaatagtaccaaccatcttctacaagaccggcatggctacaggcaaacaagactccaagaattgtaatgtagtttggtttgggccctgaaactttcatcatctcgaataacttcaacgcctcttggctgaaaccgttttgagctaaccctgcaatcatggtgctccaggagattacatccttctctttcatcctatggaacaaactgtttgcatcttcaaagctaccacacttgcaatacatatcaagaactgcattgttcaaaattagatcctgatcaaacttcaacacatgaacatgaacttgtctacctaattccaaaagcgctaaccctgtacatgctctcaaaacacttgtcagtgtcgattggtcagccacaaaacctgccattttcatgttcttaaacagattcaaagcttcatccccaaagctgttttgtgagaaacccccaatgatggagttccaaacaatcaaatctccagtcaccatctcattaaaaacacctaaagcattttgaacctcaccccattttgagtaaatatcaattagagcactacgaacaaaaacatcagacaccaacccaactttgattatactagaatgaagctgtttaagaatccataaatccacacatgctctcagaacagaggagtaggtgaacatatttggcctcaaaccatctctaagcatcaataccaataactccaaagccctgtgattgagtttagcattagagtaagctgctatcattgttgtccaagaaacaacatttctttcaggtattaagttgaacacttccagtgcttcctccaatataccaaatttaacatacatactaatcagaacattgagtacaaaagtctttggctgatacccatttgagaaaaggtgtttgtgaacaagcttaccctgttcaacagccccacaagccaagcagcacttaatgagctccgagtaagtaatcgaattagcccaaactccgcggcgttgcatggcttccagagctcccatggccgctggcagttgtctctggtagcaatatctggtgaagttctcgaccagggaggaggatgacaatgattccagttcattacaagacaccaaaatcttccccgacaaacagcgttgtagaatggaaggcggctgcacgcaacgcggcttgcagatggctctcatcttctcgttctacccacagtccagtttcagcagcagccacagcatcaggggtttgaagatcaagtcctgtaaattgattagtttaagtcaagaaagccaatccttattgaagcattattatataagcaattggtaaaagaatggatctttattattcacataacatttaacaaaggtcaaatagatttatacaaagagagaattgcagaaagagataccatttcaataacttgagattcatttcaatctagtaattcaatatcatagctcttagaattgcctgttatacaccaaatcttgcttcaaatgtaagattagcatgccaacctgtggatcaagctgcaatttttcattgactatgaaaggcacttcatgaatcttaacaagctcatataagaaaagaaatccaaaattactaattctatttctacacttctaaatcttaaaatttgattcattccctccattgaaacctactctcactagttaaaatttcacaatgccattaaaatatgagaaaaaagaaagaaaataaacaacaacaaattttacagacagaccaaaacaattcagagatcataaactaagataggttcatttccaacataaataaataaactattattcataaccaaaagataggaaatttagcaagtacattcggggggcaggagcaatggtgggcttttcatcagagttagttttctttctttcagagagtgtaataataatagagtaaggaaagagataaaaagagtgaatggaagaaagagaaaagacctagaggtgaagtggagggattcttgtgctccaactgcataagctccttactggtttcagatcctcccatgcttatggcagagctgaggaagaagaggtacaaaacggcggcgttgcaactgtgttctcttctaacatatttctaccatattttctgtttatattcgtttgtagaagaaatttaatatcggctctcacttatttaatttattatagaaagtaacgttatctcgtaattatgatatttcaagttgtgattagtgttattgtcaattttatattacaatctttcagtgttagaagatattattttaatttattatagttagaatgttattttagtaaatttttgaaaattttctaataatttataatgtcaaaaataagtttaataatttttgaataaatgtagtaaactagaattttgaaaactttgtgtttaccgtttaatactgtaaagtattcaaaaaaatttaaaagtttacagatattgtaattataacgattttaaaaaatattaaaaaaatatcttcggacatattccatcatgtgattgtatccccaagttaattttggtattgatattttattatttagtgtgaatgttaaatattatttatatgatgatgtaattaaaacaattttataaaatttaaatgaagaataatttatgatataattacataaatatttaaatttaatttttaattgtagataaatattttcttttttataatgataatattaaattatatttttgaaatttcagtaagtacttgatattatttgtaagttaataacttgtgacaattcataataggtctatgtaattaaatttttattttttatttaaaaattagtttaattataatatacctagcaaaataataagggaaatttaaaaaactatacgttaaaaactctaatattttattcttaaaccaatacatttcaaaataaaacatatatgacacttatataaaaaacccaagaataaccctcaacccaaccgaaccctcaaccccctcaccacatagtacgagctgacccagccccctcacccccactccgactacgagacgaccccctcctccgacggagacaactccgacggagacccacagccccgatccgaccgagagaactcccaccgcctcgacccacataaccttcaatctcaaacttcaactcacaacaccatcggacccccacccatcgga

SEQ ID NO: 296370 - DNA, 9756 bp, Cannabis indica
tgcctggatttctggaaattctcaactgggtaagcgtagttttttatttttcgtttttcattttggttgatctggtaatgggttctaggttgtgctggagatctatctctactcgtttcatagtagccatcatgaccaacttattttttctctttctcctctgcaaaatttttaaatgtttgaaatttatggaattttagctttgaaacttcttttggtgttatggttttgtgatttatatagctggagttcaatttgcaattttattttgtttctctgtttttatgtgtcccgttaaggttatataaatgggacatgaaaaaaatcatacatgtataataattaacatactaagtgaatgtaatgtggaatttggatttatgttgttattgatctagtgttgttactaagtgaatgggttgatcccaagttcttcggacattttaaatagttggtttattccttcatatataacatgattgagtttttggtgtaatttggttaggttgattaaaactttcaaattttgtatcatgaagaaaacataacactaatttgctgtttttatgagctatgtaaagctgtaaaagtttgattgtgttgcactgattgtctaaatggggctggtatattattgcggtttgatgtctgacctgttggagggtccacatcatgataagttgcttcatctaaattttgatactattgttggttgtaaatacagactgtggtcagccggtaaacatttgtatgaacggaatggtagaatgcagtgtttgccgtacaaaactggtgtctccaagttcaaaaactatagccagggcatatgaccggcatagaactgatgtatcttcaaagactcgaatccttaacatccttttggttgttggagactgcatgttggttggtctacaggtgatgaaacaatctcacataatacagtaatacctttgtagacaatgtttgatttttacattgcatattatgactcgattttaatcattttcatttaaattggatattctgaaactttttatgttttgttgctgctgttttaactgatttagacccaaaacaataaatctatttctattattaaattgtgttagttcttttctacatccaaatgtttttgtcggtttctcactcacatgtctctctgtgcagcctatattggtgtatatgtctaaagtggatgggaaattcaatttcagtccaattagtgttaactttttaacagagttaactaaagttgtttttgctattgtgatgcttattcttcaggtaattttataattttcttttatcagcaaatttaattgctttttatcttttttttttttacacgaaaaagaacgattgctttcatggttgacttgcactaatgttttccttcattgtgtacttttgtttttcagtctcggcataagaaagtcggggagaaatctcttctctctttgtcaacacttgtacaggttagcagatagctattataaagaacttgactgcacatgggtattgtagcaaagttagccttgtttggtgaggccataacatgtgttctgggaacttcattctagtctcctcatgtgggattatgtcactgtctataatttaaactaattaagtgttccatacctattacattatgctatattttcaagagttggttgcatctatgttttctctatatttgtttttgtttatgctgaggggttgctggttagaaatgtattaatctaagctgtaatgttctccagtctccatttatttatttataactataaggaacatgcatcgtgatctctttttacctcttgctttttctccctttgtgcaggcagctcgaaacaatgtgctccttgcagttcctgctttcctttatgctattaataattatttaaagttcactatgcaggtttaattctatctagaatctataattgttattttcaggcgtcatattaaatactgcggttttgtaactctagttgtatttatttttgtgcagctttactttaacccagcaactgtgaagatgcttagcaacctcaaggtaccttaagttatgatatctttaaaaacatatgtttttatgctaattaaattgtcacttgtgctgtattgtttttatctagaagtgtctttgggccttgacttttgatatactaggcattttttttttgaaaaaagaggagagatcattgtcttagactgatcaccctctgcaatagattaatgtcctcacttaaggcggaggaaagccgcttaaacaagagacagagaaaaaataaaaagcagaaaagaataaaacaaacaaaaacaaaatcaaaacgaaaacgaaatacagaaaatacaaggaattgcaatgcagaagcaaggatacaacaagactctccattctctgctcaggtctagaaaggacaagtcttcgaaatgctttgctctaaaaacccatgttgctgtccaaaacttaattttgtcccacactacttctgctgagttctctatatcttcaaaaattcgggtgtttctctccatccaaatagcccagagtgttgctaggacagccgtcttccaaaggacatccttacgtttgcttccttgtagcttactcactatcatttgtgaaacatttctaggtaaaacccaaagcagtccgaactccttcagcaagtttgcccataagctggaagaaaaattacaatgcaaaaataggtgatcgacttcttttccactactcttgcagcatacacatcaccctgaagatatgaatataaaaggtcgccttcgttgtaaaacgtcatgcacgtttactttcccgagcacaactagccaggcaaagattttgacctttgacggggctgtgcttttccataaagatttggaccaagggggtctagctacactttgcttggaagtaaaccaaacgaatgccgatttgcttgaaaagattctgttggcatcaggtttccatattctgccatcaacattaacgttcagtagtttaacctgttccagctgttgtaacatccctataaggctaggcatttccctttccaataaattccttctgaacttgaagtcccagcttaccacactttctcccgctgcaccttccacaactacaagatcttttatacttatatttttagctctcgagatcagggctaagtccgggtaagtgtgtagtaacggtggaccgtttagccactcatcttcccagaaacgaactttgtctccatttccaaccttaaactttactaggcttaaaaattcatcataaagatctgcaatgtccttccatggtcccctcggggacattcgatcccccttttttgaatcccagaaattatttgccatcccataacgactcaagatcaccctatgccacaaagattcagcttctagaggaaatcgccatagccatttcatcaacaagcttttgtttcttaatgccaatcttccaatgcctaagccgccctccaaccttggtttacttaccaagtcccaagcaaccaagtgatcgccacccgctatgtctcctccttcccaaaggaaatctctcatcattttctccaaggaattgattactgaagagggtgccttaaataaagacaagaagtaaattgggagagaagataggactgattgaataagtgtatatctacctcccctagataaaaaagcgcatttccacccatctagtcttttagcacacttttccaacacaggatcccagaaaactttcttcctaggtgaccctgccaatggcattccaagatacttcattggccaacatcccacctcgcaaccaatttgagcggcacattgtgagatcacttgttcgtccgtacaaagacccaacaattctctttaatggttaaagaaactttgacagttaattttacatcaaaacaattttttattggtaatcaaatgtgagtttatacttgtagggtgtcagtcacacttgctacattcaggattttaattaagccagctttttctttgtgtcgatatttttattcttttctttgtcatccttaataacttttactgggttgctaacatttgcaggttttggtcatcgctgttttattgaaaatgataatgaagcggcggttttctattattcaggttaatttgccgaataaatgttgtttgcaaatccaacatattttgactttctggaggtgttaaagtcaacactaaatatatatattcatattcgcttttctattctggaacagtgggaggcacttgcccttttgctcattggaattagtgtgaaccagctgaaatctttacctgagggccctaccgcttttggtcttccaatatcaacgggcgcttacttatatacattgatttttgtacgtatctatatgatctgcatttgcatcattgttcagtatggctagcatgtatctgtggtattatgtagattacgatttgaataattcctaatgctgcaacattgattaaactgtagaagggtctctttctctttttcgattttgataatcaactgaaactaattataaataactgcaccaaattgtaagctaggaggacctgttttatagaatacacacgcaagcaaaactttgtaaactgccagagcactctttttattttttctttctaattaaataaaaaaatacacgactaacttcaaaaagaaaataaatattcaagtgttttaaattataatttgcgaaatgcagttgttcaagtgtcatgctggttaatattgttataagctcatctgcatatatatttcaaaagactgccatgcttgaatggtttgtatataagtcaaagaggatttactgaacttatgatatacgaaaatttgtagttttagtgcttattgtatctttaatagcaatcacagcttctctgctagaactgcctttctatcctaacactagattcttttaacctgaatttgaaatttatctcagatctaccaaatttatggtaagtataaaatgcatcttgtcttgcttcagatgattttatttttaagtagcattctatcaagatgtgatctatatatttgatatgaaacaaccaacagcatatttgatctgcttgcaaagcagtgtataaaattttggtgacattttatgattatctgttatgatttactacttactagaaggtcttattgaaaacgaatatactgatgcaggtcactgttccatcactggcatctgtttataacgagtatgctttgaagagccaatttgacacaagtatttaccttcaggtaagtttctacttgctagtagtgctgctctagtgttcctgtatttactatgatcgcattgaggagcttatttgtacttcatatcattgtagtaaaagaaattagactgaaggtagaaattggataagtttggttaagactaggcctttcactcttacgttcagcagtacttgttcttatacctaggtcaaatattctaatggtttgttggcctattcatgtttaaatacactgaatattttcagaggtgaagatttttgttttttttttttttgcagaacttgttcttgtatggttatggtgccatattcaacttgctagcaattcttggaatggctttatacaatggtaaaatcttcacaaaaattatatcactttagctgacaacttgctaaatttgcttctaatttagtttatttagaacaagctttacagttatcaagtttaattatttatatgttgagctcacattttatcttgttttgatgttttaaggtcctggtagcttggacctgctgcaagggcattcaagggcaactgttcttttaatttgcaataatgcagcccaaggaatattgtcatcattctttttcaaatatgcaggtgatcactgagttgctttaatctttgtttctttttttcaccattgttaattgcacccccttttctatattcccttagttgtatttaatgtcaactgaatagtaagtcatttatgattcagactttctgactctcattcctctcttactttaatattagcaacaatatgaagctgaatattgtatacacctccttttcttcctaagagtatgcacatttgactttaacctttccatgtatgtacaaggtatcgcttagtacaatcggtagggcttgaataccagatgcttttaaggttaaggacaacatgaacataaataaaccaaacactcctaaacattcaatatattcaaattcccaaagtttgccagatatttctctaagtcttgacattgtgaatataggtgacttttttcaatataactggccagatatatcgcgtttcagtttttgttgagggtttatactttataccttatgttttggtccatttacctaactagaccctacatctctagatatttcattttagacctctagttaaagattataataaaatccctaagggtgtgtttggttgggggtaaggaaatggaaagaatcaattttcattttattttatgtttggttgcattctaaaagcattagaattgtcattctaatagaataggttttccactattttggtgggaatgactatcctattgaaaaataggaggaaaggtcattccaattatagatgaaatttatttattttttaataatttctttatcaatttatttgtgcatactaaattttattctatttcattcctgtttccattccattttttacttttctgttttaattcctcccaaccaaatatatcctaagatcaataaattttcaaatattaccaaaatacctttagttgtaataagggttaatatcgttgttggacacctgtattttattactcgtttggaccttacattttaagaattctatcaaacactgtattcattaacataattttatttaagaaagaagaaagagaaagcactatccttgaacgatttgttgacaaactgattttcaatctgtaaagtcgttgttgtcctttgtctaaaagttttctgttatgcttacagatactattttgaagaaatattcatcaactgttgccacaatcttcacgggtatagggtctgctttgatgtttggtcataagcttactatgaacttcatcctaggaatatctattgttttcatatccatgcatcaggtaagtttgggagaagctaagcataatatatttatatatgtatatttatttttgctttccgaagttggtttatgcctgaacattttttctgtacagttcttttcacctctttccaaggctaaagaagagccacaaaatggcagcttggaaatgatagacagtcagaacaaccagaggtatgtttatgttcacacctttgtctatattatatgattgtgaattgttttaattggcaaaagcctgtcctttgtctatattatatcattttaattttcaaatagatgttattttactgagatttttttcttaaataccagaaggtttgcaaactttcttagtgtcctaaccaccgacaatattttgggaactgaaaattatagcaattacaatgtataaataatatttggctgttattagtataataccctccatggagacagtcaaataagtcccaatcgtttgctcgtcacttgagcatgaacatatttacttttttttttctttttgatagaatgagcataataacttagtatataatgttaaaataatgtactctccatgcaaagtagataatgaaccaacttccatcagagaaagtctaataatcccatcccccccaccctccagctcgtttcccccctttctgttggggtgtttgagaaacatttgattggttttagaaaccactttcttttgggtgaattcacataaatttaccaacattatgttgattttgtatttttcaaatttgagttaaaaaatgaacttctgatttagtaactgaatgactgattatatctgacatggcgtctgcttatgttaataaatttgcaggacaaaggaagcacggtttctaaatatggcagctggggcaaatgaagatgtaagaatctttggccaaagttcatttaaatttctccgaaatgatcttacactggaatttatttattttatatgcatttttcaggctagtcatcgggttgagtatgaggagaaagcaccgcttcttccactatagggctggtatgttttcagtacgtacttgtgttacggtggttccttggaacttctcatgaataacgaactcaaaaaaacactagttttatttgtgtgtcttgtcgatttgtttgatgatgacccttactcctttcgatttcaggaatggagtatgcattggttttgttagtcacattggagattttgagaagataacaccagttttttttttgttttagaaaaatcagtagaatgaagtgctagacaaaagttcattactttggggaagccctttcttcagctcgtagggacggtatccatgcccgccttggttggttcaggctcccgtggtcacggacaaaaagtatcaggcccttaaagcaattcaggtttctgccagacaaaatcctataatcataaactgaataatatcaattttttaattcatatccccacttcttatacgaagaaattcctttttctatgtttatgagaatactttgctattagttttcctatacatggatacaactaccttgtaatctctcgtgtcaagaaaagcaaaatttttttttactgtttttgaatcttaaaaagttgaattcccagagtttctctatttcaaattatgaatgtcagtttatcaattattttaatttatcatataacttgtagtttcaaaaattctaatgtaatttgttaatttctcttgagtaatgataaaattaacttaatcaactaactaaagatttcagcaaaaaagaaaaaaaaaaaaatcaagcaataatgaatcaatatgattttctttaaatgaaactcataattagtggaatctttcaatctcacattttttttatgtcaagcaattttaaatttgatttatgtcaagcaattttaaatttgattttagatcatctctcaagtgtagaatctaaactctacactaagtaatggttataggcattaacaatttgtaattaacacaaaattgcttaaacaaatagcaataacaattataagaataacctaaaaattttaattgataatgtgcactctcttaaggttaatgtcttgaaaagtttgtaaagaaattactatttataaataagagttgcatattttcatatatgtttgaatgttaaattattaatatttgatattgaataatttcttagaggtgagcaaaaaatccaagaaactgaacaaactgagtacattgatcgttcgaacactaaaaacacaaacactgaaaaaatcgcctttgcacggtcagttttagtgtcaatggcaaaccgaccgattaaaccgagaaccgaccgaacatatatattatacactataaagatataatagaattatttttgtacatatttaatatacaattttattaaacaagttttacttcttatttttttttatttaaagtctcaattattcatcgctttattttattataatttgatgtatttacgtattatatacacacattcataaaataatacgagtttttttaatataactcattaccatattagtagcacaaataatttgagcaaattttttgatacaatactctaatttttttttttagtttttaaataattatagcaaatt

SEQ ID NO: 296371 - DNA, 5409 bp, Cannabis indica
atgataaaatattattagtagatcataaagtttaattatacatgtttgatgtgattattgaaaaagtacaatttatttaggcaatttctatattttatacagatgttttagtgaaaaagaatgatatgttatatctaagatgagaatcatagtaattattaataaaattcagatttaacaatctcatctaaaaaaagcatttatttgatattctaagtatactaaaatcaaaagcgagaacatagatacacacctccaccatagctgctttgacctttaaaaaaaatgccatctttcaccttgaaaattatcatcagaatagttagatgaagatactatctgtactgcactcaaaaaaacttatcactgaactactcagccccttttattcacaatacatgttatatcatatgctaaaaacattactaaaatgaataaataatcattttagtaagtattgaattgggcttttggtgatagtttaagaaaagaatgtatgtgacccaatgggctagtcacataagattgtagagtgtgtccaaggagaccatctatttatttagaaaaataagaccatcccattatggtctccattatacaccaaacaaatgtggttgtttaacattgctatatatgtttatactagtccacaaaattaattccaacataatattgtcttttatcattgaacttttacatagatcaaactaataattaaattgctaaaagaaattctcaagatcatcttttgtgtctcatttttttaatcatttactcttaattgtttttcattattatattgtcatcattttaagtaatgtgtcttccataaaaaattataataagtacaatgccaatagtaatgaatcacgcaaatgcttatcaaaaggattgaccaaagttgaatcccaattttacagaacattggtgggttgtgagatgtcttcgtaccactgagagaatgcaaatcatttttgaaacaaaactcatcaaactctcttaacaaatccagtgaccccttgacaaaattacttcgctaaagtctctcacaaaaaaaaaaattaaaaggtagacatagtttttctaagcaactgatcaagttttgaatatataaatacgtaatacaaattttgtaaggaaagaagctagaacaatgaaattgtacttctcaaaatttgtggagtacaagagaaatgagagaaagaggcacatattacaacaccaaagacatccaaaatctttttcttaagaagcaactaaccaaaatataaagaaaatatcaaataaaagaaatggaagaaggcggttatactgataaactgtggaaagaaaagcggtgcaagagcaggaagtagagaagggagatgtcaaaaacaaagtctaagtcattgttgtcaaaatgatggaatgctgttattgttttggtaaatgactgtttcagtgcttaggatgagtacggagatccatccactcaatcgcatggcttaatattccaagaaaagtttgccagtctttagtctttagcctttagctttttgttatctgtatgatataaacgatttgttttagtggacgtttgactggacagtaaaattagtcactctttaatatgtgtaggattattaatttacagtttgaatttacctgagtttttgtggattatttaccagcgagcaaagaataaggagctggccaagcaaaaagccaagcaattgcaggaggaagaggaggagcgaagtaagaagcaggcagccagggctcgtgcaaagctggaagaattggataggcgaacaaaagcagtagaagagtcaactcagaacctggaaaatgcttctagtggtactgtccagaataagcaagaacaatctcagccttctggtgaaacctttatagctgacaagagctatgggccaccaaagacagctttgggctctaaatcaaatgtagttgctcaagttaacgagagctacccaagtggagctgaaaaagcctctttaccgtgcgaactacctttagaggctccgaagggtgtgtctggggaacctccaaggatgcatgctcaatctaagtcctcgcagcatgaggttaatggtgcttttgctgctcatcacagtaatgttcctcaaggtcttgaaagtaatgtatctaaacagaagcatacaggttttaagcaaaagcatgccaccacactggaggtgccaaaaactcgggcagctgccgagagtaatgatacatctctttgtgttgtaaccaatgatgttctcccgggtggtgggtcaactgtccctgtaaatgcaagtgccagtagtgattcctctctacatccacgaaagaagaatagtaagaatggaaagaacaagcacaagttagaagatgtttcagttgtgtctacttcagcaccattgggatcaaaagagaaccctgcaaatttgtctcttggaagttctcagccgaaggcatctgaatctcagttggatcctagtgcagttcagttgcagtccgtttctagagatgtagatcggcctttagagcaacacccatcttcaccaaatgaggactctcatagtcatggaagagttaacagccaattgaaacctcaacagtcacgaaggatgcctagaaatcctcaaggtaatagacctgcagaaaagcttcatggcagtgatgcagttgtctgggcacccattcggtcacagaacaaagctgagattactgatgaacccagccctaaaaatgcagttgatatagttggtccttttgtcaagtctgatccccaagtacagaataatttgaaaaataaaagggcagaaatggagaggtatgtcccaaaacctgtagcaaaagaaatggcacagcatggaggtagtcacattgtgacttctgaagtcaatcagactactgtcgatgaatctactgcaagagcaaatactgaaagtactcacagtactggaatggttgctgggaaattgggtttctctgtggatcctcgtaatgggattggcaggcataataaacaggggaaatcacagggatcatggcggcaacgggtatcaacagaatcaaccagtactcaaattttgcaagatgcgccatcatatactacaagtcatatccagaagaagccaaaatcaaatgaacatcagcatcatcaaaacactgatgcaagctctgtgcaagagcaacaaaagtgtactggtgaatggggcactaatgatggctggggcatttttaatgaccctagccctgttgaacctgtctcagtgtctaccgttatagatcagggagttgcagttagaggaaagcgacatggttttaagggacacaaaggcatggggaataattgtgatcttgatcaaaatcaaaagaaaagcaataatagggagaatgacaaaaattacactcaatcttcaaccactgagatgagtaaggtggaggtgtctgctcctgctaaagaaaatcgaggtattggggaacattcagtgtctcattggcaaccaaaggctcaggcagtttcaactggtcatcatcagcggggtgtcagacataatattagtcaaaatgctggtgctgaagttgcttggactaacaaatcacaatccaatcgacatgatggagtgttgccaccaccgactcaggacaaagttactaataattcttcaggccagattcatcgtgatcaaccagtttctgaaaaaaacaatgctgaggatgcatcacatgctaggctacaagagcctagaagagagaggaagtctgcttcattcaagggaaacccccccatttcaaacaaaggtcctgcttatccagttgaaccaccttcagtgaaagtggatgttcaacaggaacaacacatgtcgtcaggattccgcaaaagtggaaaccagaacaggcgattcagcaaagctcaagagactcgtggagattggaattattctggacaagataacaagcaaaataatccacctccaaacagggaaaaaccaaggcaaaattcacattatgagtatcaaccagttgggccctacaacaagtctagcagttctgatggacctaaagatggtaccgacaattcaggtgctagggtccgggggagggggggccagaatcattcaagacgtggtgggggtggaaactttaatggacgacaaagtggagttcaagttgatgccggttatgagtagtagtgtacctttatggacagcaaagtggagttcatgtagacactggttatggttagtggattatacaagtaaaatctcaactctcaaggccttgttttgttgataaaacctgacttttgtggtttgtagtggcggcgttttgatcaattttaccaggtacttacgaaacgatatatttgctggaattttctgatgtttatatttgtaaaaagcagaagggtggtctgacaaaatcctatgaaactgaaacaggggtgtggagaaggtatgctgatcggcggcaacaacaacaacaacaacaaaacggagagagtattctgagtgatttagagtttgggggtatttggatgtggaatattttttaatttaatttttaacagatgtatcttaaatgaaacattgtagttggtcccggcttgtttcctgtggaacccttgtatttagcgacagtatattcctcttttaaaatgttaaaacgctgtagggaggaagggagggggaatgaattagaaaaagtttgtttttttggttctcaatctgatttctgttcaagatggatgtgcagaacctaaacatttgttttttttttcatttgtgtaccagtttcctgctctgtctgagcctaaaaatcctgtaaaaggattgtcttataatgtgtatattatgctgtccaattcttataattttatactttggaggtattaggagctgtagttttattcctatacattttagttggtctggtccagacagttttaatagcatcctaacaagattgaccatgaatggcttggctttattcttatcatgctataaagtactaggaaagcaccaaaatacttaatgtgaacttgaacactaccaaattaagcttcaaatcagtaatcttttctttacacaagaagatagaatgcaaagccaagtccggctatacatgtcgtttactcattgtcaattaaagggattttacaaaaaaaatatggcttttatgtatgggagtttattattttttttttctataatattttttatttgaaagttgattttttatgggtttttatgttttagaagtctctttccattattttttctatattttttatgggtttttatgttgcagcgctagttgcaataggggtgtctatacgattttttgttgcaatttaggttgcagcgctagttgcaataggggtttgtatgtagaatttcgtaaaaatgacaaaaaaaa

SEQ ID NO: 296372 - DNA, 5524 bp, Cannabis indica
taaaatttaaaatgcacaaaaaaaaaattattaaattttttctcattatacattagaatagtctttcctttcgattttaaaatggattaatcattcaatcaaaatagtggaaagaccattcaattagaatgttatattccaatactttaatatacaactaaacaaatatattttcattccattctattttattatctctaagcatcgtatactaatataggaggatttggtatttaatctctagaagtgtcctttttgcaaaagaaattcttaaataaataagtctccactagtttttccgaaactaaaaataaatttaaaaaattttcaattcaacaaaattttaaagatcaaatttaatccattttttaaaaatatttttctcattttatttttgtgaaaaacttattattattcaaaattaaaacttatgccaaatttatgatatgtggtatgcataagaatttattaatcatatttaattggaattatttcacaaatacacaaaaacaacaaaaaattacaaaaataagattgtacgaaattttaaatatttttacgatttttatgattttatttatggaaaatacggtatttttatgttgtactcttgttaatttgctgttaattttctttatttgtatattatttttggttgttgttattgtttggatgttattttcccgttacttttatgtaatttttttattattttcgtgttgtttttataaaaaataaccataataatatataaaaaaaaaaattaaatgtaaaaatgtatttttttttacaaaaaattatacttcattggattatccctatttaagttggggtactagcttaatacaattcattaatttttttttttttggttataaaccattaaaagggagagcaaggcccatggcccacggagtgatctttagagactcagaagggaatagacacaaagcttacctaagaaatgggcccaataacgaggttatcatatcatctggggcacttggaagcccacaacttctgatgctcagtggagtgggcccagcacagcatcttcgggcccataacatcaccctggtgttggatcagcccatgattggccaaggaatgtcagacaatcccatgaatgcaatctttgtcccatctccttccccagtggaggtttcactcattgaagtagttggcatcaccagctttggtagctacattgaagccgccggtggtgagaacttcgctggtggtaccggaagagattatgggatgttttctcctaaggtatcacaaatttataccaagataaaataaataaacaataactttttatatgatttatattaaaagtacatttttgttagaacatttgaggtatacatatttccataatagtactatttttgaaacatataatccttggaagaaattgtaaaaaaaaatgttcaaacaacataggaaatagtcattttgaaaaatacctaatttttattggataagttgaagaatacctcttgtatgtatttattaatcaaaaatacgcttatattatatttcattaaaaagtactcactattatgagtaagttgcccaatataccctcacgatccacttaagtctaacacataatttacattaacttaaggggtataatggaaacatcatcaataaaagtgggtacattataaagaatatagaaataaagataaaaattaaaacaaataaagtaaaataggtataaaatgtaatttcttcaattatttttattggattaggtccattcaacaatccaaatatactgttgactagtaaaccatcaaattacgtaaaaatggtataagtctaatagtgaaaataagtggcattgttaaaacaagtgatattttgtttgatatttgcagatagggcaactttcaactgtgccaccaaaacaaagaaccccagaagctttagccgaagctatacaactaatggatagtcttgtggatgcagcctttatgggaggcttcattcttgaaaaaatcatgggcccagtatcgaccgggcacttggagctccgaacccgaaacccgaatgataacccgagtgtgacatttaactattttaaagagcccttagacttacaaagatgtgtacaaggcattcaaatcatagaaaagataatagactcaaaatcattttctagtttcagatacgattacatgtcagtgcctacattgctgaacatgaccgccagttcacctataaatctgttgcctaaacatgccaactcatcaacttctttggagcagttttgtaaggacacagtgatgaccatatggcattaccatggaggttgccaagttggtagggttgttgatacagattataaggttcttggagttgatgccctaagagttattgatggttctacttttaattactctcctggaaccaatcctcaggctactgttatgatgcttggaaggtaaatagacacattttattttattttatttaagaaaaaatatgatgaaaaatatatttttccaattaattcatttgtgacggttttgggttttttttttatgacaaattatgctttgtattaataatgcttttatattgtaggtacatgggaatgaagatattaagtgagagacttgctatggaggagtcaaagtgatcattcaatatgttttctatttgatctattaagcttcaagattacagtacttatatatttaacttgaatggttccaacaaaaaaattggtacccttttacataacaaaatatgtttagttttaccgtctaatgtatccattatatatgatagctagtatatttgctactaccaaatatatttgatgagaatattaatactttttgtacgattacattacaaaatggaacaagtcaaagtatttgttacggtgcattgattaataatttctagtctataagtcaatattagtatgataagactagaaaaatcttattaattgatacaagtattttgccaagtgtttaaactttagaatttgcctgagcattcaaagaatgagactctaacctatttaacctattgaatgaatgaattttctcatattcatatggtgctagagttctagtatgtacacattaattactcattgatggggtaaatccaaataatatattgactttggactcattggattttctgcttaacttgaattttctcatattttctgcttcttttccttggatgactcattggattcatcttttattttcccatgtggctcatttcttatgcttgtgttttcaatattttctttgactttgctagagctaggtttatttctcgagccatcttttaatagcttaagttcagatcaagcctctttattttagacgtatataagtgtcctgacgttgaattcacttattgatcttactgagcatacttgcatattatcctaaagctcacttcctggtgttattcccgcttgtagggtagttaggtcagtgctattattcaaatatttaaccttggctgtcgtggtgttgaaacaactcaagaaggcctttaaggattcattgggttgttattttataaatttgttaaagatgatgcctcacgtcttctatttctagcgacataaaattatttcttaaagtcctaagacaaccgttcccaagaggtaataaaatattcgatgaacttgttaaaccaactgctcgcagctccgatgacgaatgttgggaatagaatgcattgcaagttatttcctactttgctagctcgtattattatgttgaaattttttatatgaggcattgggtcaattgtcccatcataaggagtcacatgtggatttttaaatctttttgaaaattgtgaaaattttaggatggaaaggctcatggttgtcattagaatcatactctgggagcttctcgtattccttgtcttggtattttctaaactagtcctccaactgaatgacccttcgttgaataaagttatcagtaggttggttgacctaatcatatgtttggcgagagtttttatttaatctctctctaagatctgatgcaatactatttgctcgcgtttctttggcttgatttgttttgagtttgtgttccttggggctcttttacagatcgatgaattatctcttcttccatgactagttcatcatgctgagtattttccatgatgaggaagttttgttatattagggagatgtgttttgagtttttaattttaaacaaaaggctctcaattaaagtaccaaattgttaacatatataaaaattcgttaacaataatgaagtcttttaaataaaactaaagcattaattaggtcaaatttaaataaaataaaaaggaattttacgtagttttgtagttaaatctacatactacacgagtcaatattgtttctaattatatttttataatatttctgaatacaagagaatatctctagattttttttttaatctctcagtgtttttgcttctaaaaaaatagactgccctcttcataggtctttgttcctatttataggattctttaagatgacacttattccttcttgaccttatctaggtatctgtctatgaaatatggatgatcctcacttttcatatttacaacacgtgggataaataaaataactgataataattgctttttaatcttatctaaaagtaacaaattttcgctgaagtggtgtgatcagagttgtctcacatccttttgtaattgagatgaacatcacgagataacttgatacctcccccgtcgtatcattagaaaacgatccaaagtaattttctcttgattggttttctcgcatttgatggaagatggtgaggcagattctatttaattagaccatggcccttagtctttcactatactcatgtgcgtcaatgagttgcaatcacttaaggaactccttatctaccatttcctcttaactcatcatttaatatttttttttgcaagcctcgttcattttggttgggttctgaaattaactaatgatattgttatcttcgctaatcagtgtatgcgtaatcttatcacttttcattgacagctataatataatataatgtgggacaatacctcattgattgccgcaccttttgagataagataacttttatatttataaattcccttaattttttagaccagtatcaatgtgtcatgtccatatttatgattggaaatatggacataacaattggaaatcataataatcttcatttttatcattattatttctttaagctttaattactattttgttctatttctttttttttcaatattttaattaaataaaaaaataataaatgaattagtaattgataatcactctctctcggaacgatactatactttattattactaggtgaaagttaacacgtgcaatgcatgtgtctagttctccatgttacagtttatttatagttttaattataacaaaaattcatataatttaaatttcacatattataaatttttttaacactgcttgtcata

SEQ ID NO: 296373 - DNA, 7198 bp, Cannabis indica
cctacacagtctcagaatcatcccacttgaccttccccaggcggtatgggattgcacagcttacccggtatttccctttacggatcacgggactactgactgtcacattatataattcattgtaataattttatggaatatcgctaacttatcacaagatatcacctctaagtggtgttagatgtcattggtgccttaaatcaatgttaaatatatgaatagaaaatttaatggtaaatgcacaaatgtacccttatcttatttggcatccaagagaaattttagtcatttttttcatagtcatatacttgtagttatttaagtttaagacatccaacaaaattttaagaaattcaaaaaaatttagcacgctaaaaatagggttcaagtagtcagtttcacgcgtgtttattttatttttatatgcgtgtgtaatagacaatttgaacactctttctatattataaattattttaaattcattaaaaattttgtaaaatatcctaatttttttactgaaaatgtcttaaaaaacttttatatacgatgagtgctaattacaacatcttagtcaattctatgttcgaaattacatgctggaatctttttttcattttttttttcatagcagtatttgttataacttgccgtcataatatcacacatgtaaaattttgaaaagtatgaatagtttatagtaccgaaaataaagttcttgatatttcagtctactacgcttgttcgaaaaattagaaaatttagcagtctaaaatagtatcctaatgccaaaataaataggtgtgtgtcatggtaaaaggataattgaatgcaagtaattgggaggttgatgctgtcataaattttccaacctccatagccaaaagggtaccgttattgtctgatcacgactttcgaaaagatgaccactatttaatgcccatatccagagaggtcccatttgcgttttcagtctaagaaaatgtcagcattgaaattggctgaaactgaaagacagaaaaatagctttgatcaaccaatggggtttgtgggttggtcaataatatcaccaacatccactttactcaacgagtaacgacaattgggtcttacgacactcccaaagcttcctcattttcctaaaattctatttcggttgatcttggaaaaagggtatctttctctctctgtctcactcactcactctttctgggtttgtttctgtctccttgagttgcacgctaactgtttgatcatttgtttctgtgatctgaagatgggaaataagcgttttatggttccagcagaggatttggactggtctactgtgaaatataatctggaagaagctaaaggtgaattatgtttttggggttgactttgttttagtaattagtggttttggtgatgaaaagtttgaagctttttgatggaactgaattgggtttgtgtgtttttgttgttgcagctcctcatttgactggatttggcttgaagttttttgttaggtttattgaaacgccttttataggttcctttattgtatctttcttgaagaagcagaatggaattgttgaggtgatattgttgattttgtttgaagagaagaggctaaaacaatttgtttatgggtttaattttgttgtgtaatttccagttgttgcaggagactgtgataccagaaccacctatgttcagacctgaatatcctccccaaggttttctttctttcttctttttattgtttgaaagtccattctttgtagaaacttctctgtttcctctgtttatttatggacatttaataacgaattggctgagctactaccttatgattttgattagctggtctggttggttattaaatgaaaggaccattttctgtacttgtcattatttcattttcaatacattaaaaaaagttaggaatcatcttgattgaacatgaacattggaattcaaatcaaacacaacatgattattattatgtcaaaaatccaaacataaacatgtggctcaccatgacacatgtaaatccatttaataaatgcttaagtatgcttttttaattgctatttaaaatgtttaaagtgagtatgcttgtatcatgctgacatgacactacctttctacttaaatgtatcatgtgtcactttcgagttaaatgtatgtctcattattattgaatgttggtttgtcatctgaatgtgttctatctaaaaaaattgtgtgacataatttcaaatagtgaaagtgtttggtaaagatcaaacataatatgtgtaaatgaatgcttattcctgtggttgagaaactaacaaattattatccataaatatgacacaattatgatgatggctttagaatcagaaccggctgttgtcatttttgatgaagatgggaaacctgaagagagagtttcgtcaaccttggaatgccttccacagtatgatcctgctaaatgttggaatggggatacaaatcaaactttccgctattggaagatacgtgactatgctcatgcttatcgctcaaggattacaacaccatctacagtgagttggtgttacttcgctaaaaagaatgtatcattatttatattgctactgaattccaatatcacatgcttttaggttgcagagcatgtaatctcggttcttgaggagtttaacagcaagaaacctgcaatgcctctgttgatttcttttgatgcagaggaagtcaggaagcaagctgcagcatcgacaaaaagatttgaggaaggtattttggatcatattatttttgcttgaacaatttctgtttctgcttcagttacatctcccgaagaacattttgagtcatatttgatttgattgaggccagggattcttaccaacagaggtgtatagacaaatcttaaaagggaaacaaaatccagttatagtaacctatgcctaaagcaattagtaaaaacttttttcatggaggattttttttttcttttttaaatgtctcgccgaagatttggttggctaaatccattaataagttaagagacaccttttgattttggttgtgcaggcaatccattatctatcttggatggaatttttatggcagttaaggatgatatagactgttatcctcatccatcaaatggtactactctcccccatctggctttccgatgattttatttctttcactatttaataacagccagttaaccttctatggtgactgacagggggatcaacatggatgcacgaggttcgccctgtcaataaggatgcagttagtgtttcaaaactacgtagatgcggtgtaatttttgtaggaaaggcaaacatgcatgaattgggcatgggtacaactggaaacaatccaaattatgggtaaatttatttcttagcactcatctttagatgtgaacatgaatttttagtgtttgatatgaacataggctgtctccaatgccaccccatgataaaattattgcacatgcatcaatgaattcaatctggtgttagacaaaacaagagagcttctaaatctcatgcgcttatgatcatctctacagttttgctctatgattttgtaacaaggaaatcgataattttttatgaatcttttttgtcatgatagacttgattctttcttccttcaatctttactgaatcaatttttcttttaatttttttatggatctagaacaacaagaaatcctcatgcagtagataggtacaccggtggatcttcctcgggcccagcagcaattgtagcttctggaatatgctctgctgcgcttggaacagatggtggaggttgtgcaaatcttaatgaaggggctattaaaactacattgtgtatagtaatcttctagacttaattcagcttaaaaatgcaggttcagtccgaataccctgttctctttgtggtgtagtgggattgaagtcaacatatgcacgtgtagacatggaagggtaggctctttcgtctataatactattgacagtgttaggtagaaatgtgctaagttcattattcattttctttttcttgatagctctttatgcggtggtgggactgtggaaattatcggaccaattgcttcatcggtggaggatctcatgctagtgtaagattgttttgcattaatttcagtgcgaattacaccaagagcacatcttaggattctctaaaagaaaattacgccttagaatcccactattctaacatgttgtgattgaatctatatttcattaggtattcggcaatgttgggttcctctcttgctgatagatttagcttgaatccggttacatttctcttatcttttgagtgattactaattataataattgcctcattgaaaattacgcaaactaaaattattttttcgctcttatattgttgtggatagtccccaccttgtgtgccaaacttgttagcatatgacacttctgatatcttgggatctttaaaactcggaaaatacacagaggtaagttgtaaactattcagtatttttttttcgtctttcatattctgattagttatgaagtttccatggcatgaacattgtattctcattttcctgcagtggtttaatgatgtatattcaactaatatatctgacaaatgtgatgaagttcttgatcttttgacaaaatcatacaattgtaatgtaagtcatcaccattaattttaattttcaacattcagtgcaatctgtttattaaccccaaacattcccaggtggtagaaattgtggtgcctgacttgcatgagatgcgcactgctcatgttgttacgattggatctgagtgtgcatgttcactaaatccagattgtgttgacgggtatgttcttagtaatttttttgttgttgtttctctttacattttgaaatttgtttgtaaacgaaacttatctgcaatttaatctgttccctcaggaaacttgagagattgacatatgatactcgaatcagtatggctctttttagatcttttactgcagcagattatgtggcggcccagtgtctcaggtaaggaaaaatcagaactaaacgattcacaactgagagaaaccaaaagtagtttttattttatttgaaaaactgatcataggtgttgactgacagaaaatcaatttcgtattcatgaatttaacaggattactccaattcgattaattctttaataggatttttatggggtggcagaaactgtatacacaaagtgtttcatatgattgagaaagtgagaaattaaacactgtactatacagcattgtagagtcaatgtttagagactaatgaaaggaagtgaagaagggtaatgtttacaacgacagacggagatcaaaatatttttacgaataattagctcgttaaaaccattaatggaaaaattgagtgcgggattttttctttaccttctacatctgcccctgaacacggtcacttccggaactcagactaaaaactaagcctataaatataaaccgatttaatagtatactcttagctactccgccattttaattgtataacacagactattgtagaaacttgaaatacaaagattcagaatgtactttggaaagaaaagttaaatgttgtttttattgttgccttgaatgtaattgggtttgtttatctcttttaatattttaatttcctactagatttgattgcatgtttgagtagtatggttacactttaaaattaatatcgaacttgattcttcaggagaagagtgatgaatcatctcatggagatattcaaaaacgttgacatcatagttaccccaacaactgggtgtgtattatcaactctattaacattattattgagtgaatgatttgattcgatagatgaaagattccacggtctttaccgttactgtatgcaagtaactatatatgtcatttcggtttattgtaagcaaaatgacatcctttttctttcttgaaattgaaacagcatgacagcacctatcataccaccaggtgctattcaagatggagaatcaaacatgcatgttacaggtacgttggtaacgaaaaaaacagaacgttcttctcttttttaacgagaaattcgaatactaatctaatcttatgcatttcttatgttcaggttaccttatgaagtttgtcgccattgcaaatcttctcggtcttcctgccatttctgtgcccgtgagtgatgtccacttttctcaacaaattccaatattaatcgtttgaaaaagcatttctctttccataataaatagcaagtataaaaaatagtgagtaaaaacagaactttcacagttcatctcaggaaaagtagagttagattctctgaggttaatcgagtagaaaggaaagtaatttttgggttctgaatctgtataaaactattctttggattcaactaaaggaactgggaatttctcttacatcatcagggtcattcttaacatagtattttgcaaattcgaaatcaacaaaacaatcatcatacaccattatcaccacaagaataattgtgtttaatattcctcatagtttcttattgactggttttcaatcttctgagtcaaattgtgttctattttcaggtgggttatgataaagaaggtcttccgataggtttgcaactgatcggtcgtccatgggccgaagctacgcttctgcgtgtcgcttctgcagtggaggtatatcatcaatactcagaacttgtatatataattgttaagacaattgagcaacataattaatattcacaaattatctcaaaagagaattataatgttaatgatctgaaagtgtgaatcttctcttgatttttcaggaactctgcccctcaaagaagaagcctgcatcattttttgatgttttgcagagatgaatttgctgctattttttaacttaattatggggtttctttccatgatgttaacatgttttgaaaatttacataataaaccaagaatttgaaaaagaaaaatcataaaaatacatcaacactgataaattttctttttttatgctctgaacttttttatttacaagaatatagtaaattatttttttagttattttatagtttatttttaattgtactatagttatcgtgagattttttttattgttttatagttgatttatagttttcgtgaagttgatttattattttatttaaattatttttttttttactttt

SEQ ID NO: 296374 - DNA, 10781 bp, Cannabis indica
atcattatgtggcgcaggaaacataaacctgctacttcaaggaacatccctgatccatatttgaatgtggatgatccagagggtgcaagtggccatcttggggtccctgtgttttcctataaagatcttactgaagccactaataactttgatgctgaaaaagaacttggagatggaggctttggagctgtataccatggtaacaaacatcatttcattcttcaccaataaaacttcatatactgtgtattaaatttttctaaaataaagtgttacaccttaatattagtctgactacttgattaggattatagatgccagagttgtcaaattcttaacgactgagatagatgttttaaagtgaactatgctaatagtcttaaggtgttagttgaagaaacagtttgggatgagttagtataaatagaggctgttaagagtaaaacattgctctagggagatacgaattggatcaatagtgtatcataaagttgatgtatatttttcttttattttgtaatctaggcgtgctcaaagacgggagagaagtagcagtgaagcgattatacgagcacaactacaaaagagtagaacaattcgtaaacgagataaaaatcctcacactcctgcgccacaaaaacttggtatccctctatggttgcacttcacaccgcagcagagaactcctcctagtctacgagtacatccccaatggcacagttgcagaccatctccacggagaccaagccataacaagccctctaacctggtcaatccgcttaagcatcgccattgaaacagccagtgcattagcctacctccacgcctcagacatagtccaccgcgatgtcaagaccaacaacattctcttagacaacaatttcagtgtcaaagttgcggatttcggcctatcaaggcttttccccaacgatgtaacacatgtttcaactgcaccacaaggaacccctggctacgttgatccagagtatcatcagtgttatcagctgactagtaagagcgatgtttatagctttggagttgttctagttgagctcttatcatctatgcctgctgttgatataacaagacatagacatgagattaatctctctaacttagctatatccaagattcaaaaaagggcttataatgagttgattgatcaacaacttgggtttgcttcagatattgaagttagaactatgaccattgctgtagcagagttggcttttgagtgtttacaacaagataaggaaatgaggcctacaatggatgaagttttggagagactaaggagaattgaagatgggaaaattgagactcaaccaccaccgccacaaccttccccggaatgtggcgatgaagtggggttgttaaaaaatatgaaacatgatcagcattcgccatcatcgccgaatgctgtcactgaagcttggccaagtactacttctactacgcctaatttcagtgcctaaagagtaaagattctatttttaatattttttttcactcttacttctgctgaaatttgaataggacagtataattaatcataatttgtggtacctaaaaatgtgataagtgagtaagagtagtaaggaaggtagtgtgatgggttcaaatttgtttttgtttttcccatcaacttgttttgttttgtttttgttgtttatgattcatgattaaataattcaaactaaatttaaatttgtagaaaagatatgagagttgtatgtatatatataaagggattgatttattagggttacttttgttttgaaaatagtttattgctacgaataataatgatatatgtttttggtattattactttgtgtccatactccatagagatataattaatgaacaagaggaaaaaaagaggaccatgcctattcataattacaagtataacagctctatttgaatttgtatttctagaagagctataacgatattgtttcatgggatcaaatttaattttggaggtttaatgatgaataacaagcatgcttcatttaagcactagtaagtgacaagtgtaattaatgaaatgagattgtgtatacaatttcttttgaattgtccacttatttgaagagaaagagtaataataaatagtgaatcttagtggttagggaaggatgggaaaaaagagaaggcatagattcgaatccaatatttttatattattagtaaattgtaatagtatagatttttcttttaatatctaataaaaaatattgtaaattcaaataataataataacatgaatagttaaataatttaaaagtagaagttgagaaagaaaaagaaaataaaaatgtaaatagtagtcttacctagaatagtaactttggaaagaaaataaatctttgttatttcatcatcaaatgaccaccgtaccaacatttccaataaaaatttaccaaatatacctaaagtaattttgttcattgtgtttattgaacaaaaaatattaaactttggcccaaaaaataaaattaaactaaccaaccaaacacttttcagttagaaattaattaaagtttgtcatttactaaaccttcttccggaaaaatcaaagtagcattgactattcaattttattattgagtattgttatttgtttaaaggtggtgatttataattgattagcatactatatgaaattcaatacttaattatatcaataactatacaacacatgacacattaaatctcttttaaaagtgtcagtgtcggccgtgaaatttagtaggtcataggaaaaaaaatatttttaggttctcatttaaaaaattaatatggtatttttcaaaattgataaaaaaaatgtataattttaaaaggggataaatttttttttgaacccgtgagctaggtgagccctagacacaggcctagcccgcttatactaaaagctagtcctgagaagtggcaccctaatctatgtttgaaataaaaagacaaactatttggttactgaatttcattacctaaataaaaagagtattgttatttagagtaccgatttgtgattcgttatcaatattctataaaaattattatattaatgtggtatttggttgaaagtaatgaaatagactagaagggaaatgagacaaatttattttattattttatttagttgtattttaaattattgaaatggaatgagttttctattattttggtagaataacactattctattataacttttaaccaattataaatcgtcatttatagaaagtgttggacactaataggaaattgagagagtcaaacagaaactattaggctagtctagtcaagactattactagacaaagtaattaacctctttttcacaacctcccatagattttagatcaccacccttagaatttttctcggaaaatgaaaaataaacccacttttattttctctctctttctctttcactttctcttttctcctcctaagccctaatctatctttgaaacatattttcatgaaataaaaaaaatgcattcgagtcctaaaaacaacaacaacaacaacagatccatttttgaaaagaaacaatcaacaacaaaaaaaaaacccataagtactctctctcctcatcctcaaactcaatcattatcatcatcaaattcaccattcaaattcaaattcaacctcaatttcacaactataaaacaaaaccctaaccacaccactcacctcaaaaccatggctgctcttcaaagattcaagctcctcgcaactcagtgcggcgtcacacaaagccccacacgcagccctagaacttctccggtcatccacctccgtcgccggaaaactaccctccgtatgcttctcggccgatcaaaaagcaccgtcaattaccgtacttctcctcctcgacaacgagactccaattccaattccaattccacctcctccgtcatcgaccggtttcgattcctcagggctgctgctgcggcggctccggcgccggagaaagctactccggtgaagaggaacagtcttaaggagcttttcgggtcttcttctccggttgaattggaagaagaagaagttaaaggtatttataaggagaacagagtgtcggttatggttgtcgggtcgacccggttacaatccgggtcgagttctcctagacccgcggggtggtcgggtttccgttataggtcgttattgaggaggacgtggcgccctatgctggtttctatccctgagtaaattaattaagttaattaattaatattagaaaattgttaaattaatttctttttttttttttttttttacattttttgatcctattttaaggattaattcctagaattttactctagattttagctaaggaatgaaaaatcatatcgatttgacacccaaaaaagagaaggaaaaaatcgttatataaggaaaaaaaaaaattagcttaatttggttttgacgtgtgatattttttttttatggtaagtttttatttctaaaaatccattaaattctctaagtattaattcattagtgttgatataattcaaatatatattttttttcctttcttgtttaatctgctgttaaatggtaagaaaataatttaaaataaaaaacgattgccataggggatagggattataaaatattgaatttttataataaattacaaaataaattccttattaatatttctctttttggcaatgattaacaatataatataatatttgttgttatttgatccaataattttttatgtcggtcacatccagcaaaataatattttatatgatgttaaaaaaataagtgctgaaaattacgatgtaattaaatttattagttattgaaaataattatactataattgtataatttaaaagaaaagaagagttattatactatgtaattactaattttttttattttaaacattaactactaaaatttattatttttttataattataatatattttaaaatataataagtaattatacaattatttctaaacacacattataactaatatcatccaaagttaagaaaatatatacatatatttatgtaccatttttatcaaatcaaagttaaaagtaaataattaaaaaactatgattgagatgatcatatgcccaaaatacaaaacaaagaaaaagttaagcttacactttttgagttggaagctaagtatagtgaaaacgtgtataagtgaatttgatatatgtgagttcaaattaaaaatgtcacatatttgtattataatattgaatcaaattaaagttcaattttgtgattaagaaattaataaaagagtcttagaaaaataagaaagtagtagtaaatagatcatataggagtaggagtaggaacaaagcaattctttttactcaaaaaagtaaaagtggaatttggaccagacagctcatggaagaccatataacatgcaaataaagctttcatttttatgccccaaaagcataagaattcccttccaatatttaaattttagcaaggatacaaaagaaaaagaaaagaaacttacttttgaatatcctagtgtttaaaacataagatgttacacactaatataaattggatttttcttagtccattacatgaagatatcactcactaaacatagtcaacaaaaatgagctataaaagtaagaatgaaaattctaataacacatctaactaagggcattaatattggggcactagtagtgtttagcacttctagatatgtcgcgtttcgattggataatgatattccctaaaggttattatattagattatataggatctgatacttaatttgaccaattagcgatattaacacataggagagtgttaagtattactggtgtcttttaacatttctctctaactaaaggtctaatgaaatcttaataaaatataaaaaagaatgtgaatagtgctagatgagtgaaaaattttattatctctatagtttggagtgtttttatttttttggccttggagaaattacaattcaaatttctttttgaaaagaatcaatttgttctataaataataatgtacttatttaaaatataaaaattgtaggaaaattcagaatgcattcctcttaaactagtgcagatgcgcccttatcagtttttgtatgcaagagacttttttgtctgatttttttcatgatcgtgtatattatagttatttaaaacattttgcaaacatatgaaaaatttagaaaaattgaacgcactgaaaacaaggttcaaactatttattgcaagtgtgactcttttattttatatgcacgtgaaatagattgtttgaacattacaatctatattgtaaattatttcaaatttctcaaaattttctaaaatgttttaaacaattctagcgtacacaactataaaaaaaattagactattttaattgctcaaacagataagaatgaatcagtgcatattataaaggttcattattatatttttgaaataatataactgcaattctttcgaatctttgataaatagatctcaattatatatattttcttttatttattgtatagacactagatggataaggtctaaaagatgataagaatattatttttaggcccaagagatggaaagtgacattactcaaagaaagatgaagaagatgagaatggtccaactccaacttaatcataaatcaatttcatgtgtcatttcattccctttgaaaaataaaaatacatttatattatttgcttgcttgcacattacttaacaaagaattgttcaaactatattcaatcaattcaacacaaaaagtttcctcacaaaaaaaaaatgcaattacaaattacttattcacctttcaaataaatctgactcaattcttagtactagaaattcactaaatatgataagaacatcaattagtgtcatgctttgttagcacctctcattaaattggtgttgttcttgtatttaattgggattgagattggcctaaaactgatttgttattttctttcaccatctctccattcccatccgatgtttttttcgggtaatcttgtgaattattttcgtcgggaggaacaagcccttgcaagaatctatgtatcatctcataactcgtaaaggttatgatggcggacggggttgttctcaatagattggtagcgcagcctcggtagaagccgggaataccttcttttctaaacaccttcttaacacaatctataacccctgcatatcgcacctcagtatttcgggaatgcccttgttcttgcaacctcgagcgcacaaccttttggcaccgtagaaaaacaaaacataagaacattgtttgtaaagaaaattctcagttcgaagagaggggttatgaccgaacatacctcgtgagggtatgtcaataccgatgcaactactttcgatattgatgaggcaattgcaaagctgccactgtttagcttatcaacagttgtattatctgagaattttcatatttaaaatcagcaagctttagaaaacaaacgttaatttagtagaatcataaacataattactttttttagctatgtaatacttgatctgctcgtatgctggaaactgaatcgcgacatggcttactcccaccaatgagggcaggactccactgttttcaaaccaataagatatagtgtcatgatttcttagaagagaaaaattgaaaaggaacataactgttacaatcattagctcatataaaagttcccatcaaagaaatacaagaactaacctatataatccccgaaagccctcctcgtgtgcaatcctagttaaagcggaaaatatgcttttgtatggaattacatcaggcctcattccctgtgtctatatgaaaatgaaaaagaaaaataaatgtacagagtgacataaaattttatatctgaatcgattagttaagcacgaaaccaagaatctgtagacactgttgttatagcaatgaaattgagctaacagtaataataccgaaaagggcaacttgtgcccttttggacgaggtatgtatgcaaatcaattagtaatccctgtctcttttttcatacaccacacataaagattatgctttgcctaacatcatttactattttgtatatgaaaatacttggaatgaacaggcctataatctggtaatggcataccaaacataatatgatcaatcgtgaaaggaaaaattttggcattctctgtatattgtatgccgatgaatcaggttaaaaatgtaagactgcgaaacttacttgaagcctagtctttacaacccacaatggatttgttgaaatagctgtggcggcccctgcaccagcagccgctaccatgtttgcgcctattgtgaggtgatggctgtcgtctgctacagctacaaacacaatagtttgttaaaagaaataaagccaacagacccaacaaaggcagttataaacggctcaaaaccgagacaaaagatcaaacgagtaaataacaccattaagaaaccaaccatgtgaatgaagaaggtgctttagtcgctcatatacagtgaaataaacctgcatatgaattaaaagaaaaaaatttgtcaatgggaatatacaatgcgctaatacgaaaggatgaaacaataaaaacaaatgatatcagaaagaaaaagtttcagaaaaacattctattgaatgtgaattttcaatattttccacgcaacatgataaaaatggttttactataaaatcaaggaggaaaaacaaaactcaccgcccaattcggaagtaaggctagtattgttggtgaaaggccgcgatacaacccccgcaaaccttcagtttttattatgttctctaaactggagacaataatactacctgtgcaaaaaccaaaacagaagaagaaacattggtaactcactatgaatttaacaataagcaactaacactgctaacttgacttcaaattatgctagtatctaccacatatgtccaagttcaataactaaaatctaagcttataagatggtattcaaatatagtaatccttaacacaatcataaacataattctaataggtccattcctcttggaaagttgtatgtagcaaaactaatttgaaccatacaatatcggttttcgatgattcgaaaagagccatgtattgtatcattaacacagtactgaatacagtcatacacaaagcaatccattgtatgaacagattatattcaaaattagtaattgtcattatgcatactctactctaactatagcttaatttgttgtaaaggacataagaactagtttacctttatggccagagggaactccatgcacctgcaaccttgtcttaatcacatccaaagggcacacaaatgtagcagcaatagcacctaaaaaggaaaaaatcctcaaaagatcaaaatctcaaacaccatttcaaaaattaaaaacagaacctttacaagaacaaaaaatctgtatacaaccgatgcaaaattcaacgagattataatttaaacagaaggggggaacactaaccagcggaggctccagagccagcatgaactatgaaatctctaaaggtttgcccatctgatgatccgccatgtccacccatctcagaagctattattcacaatgttttaacaaaacccaagtaagatatcatggtgaatcgtcgtgtatatatacatacgcatgaaattgcatctgggtctgttacattgacctcaaagactggattttgaaaaggtaaaagcgagaaagagagtgtcttttggttttgggggacttgggtttcttcgtagaaggggttttaggcggtgagtttggctttaggatgaattgggtcagaagatcaagacgtgtttgatacttttcttatgttgagtttgagtttgagagtctatgaatcgaaaacgaaactgggtttggtttttgtgaatgaatttgtaggtttctaatctcaaaattccaaatatagaaaagtgtttgggttccactgtttcatctcatctctctcaccactcaatttagtacccacacatttttttttctttcttttttagttatcttttgttttctttctaatttgttttttaaacttttaatttattatacatgtaaaaatctatcatcttacacttagtccttttcacattttcaaaccaatccaatcatgtttagacaattttgtccatttgatatggtcaattttgtataatgtaatcaatttataatgttttgggaattttatgacaatgtataatgtaattgttatttttggtaaataataaatttgtgagaaattcaaaaaatgtaatatcataataaatcattgaatatgtattatgatattcttaattattttttaatgtaaattatgaattatcactaacataggataggagctaaaatatatgttcattaattgaatgaaaaaaccaaagcaaaatcaaatcattttgttcttgttttgattgaatatatatatatgataaatcatttaataggagataatgccttttttcttgagaggggagatattgattataattatgcatagattgctcatttatatgtactttgctttttggctattatttttattttatttttcatttattagatttattgtaaatattttttctttaacgttaaacaattaataagttgggttggcattttgtgatgaggtgatgagcagtttcaaggcccatggctagtttcataatggattaagttgaaaaatctaacttttattaattaattaatcaaattta

SEQ ID NO: 296375 - DNA, 2834 bp, Cannabis indica
ttttttttttttgaatttttggttatagtcaatatttatgcaactgtctaactgtctaatgttgaaatgcaaggaagtaacattgttttcttttaaaattttatgtgtagctataccacagatacccgaatttacatgtttatgcatatggaccccttccttgtgtggattcaattgtagcagatgcttgctcaccatttgttacaaggtaaatgtaaattgattgttgaataaattttagtagattatgccatactgctatactaaataaatagttctccagcgtttgtatcttctcctccccttttgaatgttgagtgtgatttttgccttttcacagcattgttttgaacaatgaattctcttcacgcctttcagttgggtctgtccttcgacttcgagcagctgctttaactgcactttcacaagattccacaactgatacagccatgatttttaggctagcacgccgcttcctctatgtgagtaactacgaaagaactgaagtagtggaaccagcttcaaatggatattctgggacaaaacgatccgaaaatcaaaatgaacacacatatggaaatcaggagatatttgattcaagaggtattttcttctcatttatcttttccacacacacatattgatcttttaacaaacacagattgttctttgtaggacgcgagaaacgtgatcacaacttttccctcttcaatgagaccgataccaaggattttgtggttgaaagtgaacaaaatgaattcagcaacccttttgtcagggaaatcaatagaattaatgatcctgtatctgagttcatggaatccgttcgatcatctgaaagtgcatcagctgggaatccacccgagatgtatttgccaggacgtctaattcacgtggtgccacaaactagtagtttccatatgtctctgtggaaaggccagggaatccaagagagagaaaaatgttacaaagcttatgttgccaatagagagagcttcaaagatattgttgtatcaccatcaatgtttcttgatcatctcccttggaggtatatcttttaatcaatactactaagtatacattaagtagagtgaaactttttcctaatgaaaatatttttgtagatgtgattatgctctgcgaaaggtattagaaactcagtgcactgcgaatcacaacgagtctcatcatcaaattgttgatgtgtattaaggtgagttcagaactccttaattagaatctaaaatatagaaccttgtgtatgatatgcaatgcattttgtgtcattaggtgcttttgaggattgtaagtatatccaatcttctgaactgtagtcgtttcaagcttgaaacttcagcaagcattgaatgcgactacgaactttcggtgaaagatgctctattgacatcttcgccgtgagttgtttgatataccatatcatacaaataccatattaatagaaatatcagatactcaaaattattataaacaactctgttggtagcaataaaaatgtgcataatgagaatgtgcagactatcaacaagtacccactagactacacagcctaggattactgatttgttccttaatattgtcttatgatattgtatataccataatatatttttataatcctatttcctgatttattcctcaatgcaatctggtattgtttttcctatgttgagaatcattttgttaacaaacatattgatgagatttaatcgtgaaatgcttagtacttttgtgatgtgtagtatcgttattagtggaattcaatattggatccgcatatttacttttataaaaattataaattactaactaattataggacgtcacctcatagtggtactagacagtaaacaccttggtatcctgtaataatgctctgtttaatttgtgtgcaaaaatagtatagtttacagaaacgctattctttagaataattgttgatttattttatttttttcaggaaggttgttggttaatgaacacatttctttcaccaaaaatacataaactatttttcataagaaataaataaacataataatcccattctcaatcttcatattttttccccaaataattctaactttataatataattgatactagtcgattcccaaatgatctgaaagaaaatttcaataggtaacctttatgtcaccaccccttgttgttgctttatgaaattaataagtgagacatgtaaaacaccacaaatttatagtttaagaacacatatccatactagttatgtattataataaatttaattttatttataaattattatatcatattatattttattttataaatgtactagtgaacaaatagaataaacagatttttttcctcaattattatcttctcaaacttttttattgcaaaaataccctttgaattatacaaatcacatgaggtatgatggcactagaagggtctacttagcaattttaaattacattaaatttaatttattgatattaaacatacaaaaattcgttctaagaatgcgcatgtatattctcataattcattatcagactgttattttatgcatttattttttgtttgaactcttgaactaagccagattaatatcttattagatttagcgctatatcaacaaattgtttaaataaatgagcaaaatgtaactggaatgagatatttgcaggaattttcatagttcagagaggaaatatttgcaaacgaaataaaaattcaaaggcaaaattctacaaatgtcatagtttcggaaggaggagggggagaatcatatttatttattcatacatatatatatttatatagaacac

SEQ ID NO: 296376 - DNA, 5956 bp, Cannabis indica
aaaaaataaatatctcttcacttttcattttttgactattttcgggatagctttaagagcacgtgtctctcgcatttagcggatccaaatgttcatgggtacatgaggggagccaattgggtcggttcgtgtcaatcatgtccttgaggtaatttgtagctgaggagctctttgcgccttagcaactggcggagtcgggagcttagtacgcccaaagtgctccattggtaggaggtgcaatgttccaaagtgctccatttgtgccgaagtgctccatttgtgccaaagtgttcccttttcactagtgtactcccttttagccaaagtgctccctttttggccaaagtgctcctttttggcctaagtgctcccttcttggccaaagtgctcccttctttgccagaatgctccttgttttggacttccatatctagtagaaatatttatgcacaattatcttgaattttttgagagataacatttgccaaagtgctccttttggtagacttccatatcaagaagattattgagctagagaaatctttaaaagataagggtagtgagaagccgaaagctcttcaagaggcaattgaggaaggtgaaatgaaagaaaatgaagtttctcagttatgcttttatagaatttggtagaagaacaagaacataaatacctcgttctttgagccccatatcaaggaaagtattaaactatacaagcagatggaagctgatgaaaatactaagcgagttgggaagtctattgaagaagtagaagctgagggggcttgggaggtcacaaaagaggatgaaactgatgatgatttacctaaatctcttagaaaggaggtttacttagttttagtttttttatatagtaatggcttttaagccaagacagtttattcaactttattttttgtaacgaatcatttttcagttagacgaccagctgtttatttgataacttatgctactttaatatacatattttcttcattttttgtgggaaaatttatccaaatttcacttatcacaaattaattatgaaccattgtccatatgtagacttaatttaagattacaaaatatttttattaaaattctatctcggaatttattactcattaatccatcaagtaaagagtgaacttaaatattttaaacaaccatttctttaattattttaaatatttttaatcaattatgtgcgagtagttagtcgtctattcgcgctttagcttatatattatctatcaaaactcattgttgagtttcgtttataatatctgctacgtatgtgagtcgctattaattcatgttgtattggctagtttgcgagattattttcataatcttattttttttacaataagtgctatatcattcttgcttaaagaagatataaaattttgattatctatagttttggaccagctttgaccgaatgctttatctttgcaaaaaatttattttttagaatttttaagccttattttttcagacatctatattattatagttattagaatgtttagttattatataattatatgctccgaagtaattttaaagaaaattttatgattacttgagacaaataaagagactggaattccattaatatacatcttaaatttacataattttaaagtaatcgacaactataaacaagccaattattgatactatggtctcaaatatttgcagttccaagtattttttaccagggagccattcgaccatgctaatttataaacccttggtgctataacatcttcaattacatatggaccttcccaatttggattaaatactctcgatgtaggatctattgtatttacgaatactcgtcttaacaccaaatctccaatgttaaagagccttgaccttactcttttattgaagtgtcttgtgatcctttattgatatgcaacatttctcacttaaaattcatctctcatttcatctagcaatttcaaggattatttgagtaattcttggttcttatcttgattataaaactctcgccaatgtgatgagatgttaacatttactagaagcattgcttttgagccaaaacctagtgagaaaggagtatcacccgttgctatttcttcaatggttcgatgagcccaaagtacatgtggtaactcatctacccaccttcattttagtgaatcgagtttcttctttatagtatccttaagggtcttgttgactacttctacttgtccattagctcgaggccgcaagactgatgaaaaactcttaatgattgtgttcctctcgtagaactcagtgaataagtcactatcaaattgcgtccaatcatcagatactatcttaatgggaataccaaatcggtacattatgtgtttgacaacaaagtctaagactttttttgaggtgatcgtgactaagtgctcaacctcgatccattttgtgaagacattgactgctacaacttcatacttttctcctccttgccctgtgggtaataactcgattaaatctattccctaaatgttgaatgggtaaggtgaggtcatcatacaaagctatgttggcagaatccttggaatgtgcgagaatctctggcatttctcacatttctttacgagctcatgtgcatctttattgattgttggccaataatatccatgacaaattattttctttgaaaaactttgccaacctacgtggtcccctaaaaagccttcgtggatttcttttatgatattcctggcttctgccagtaacacgcatcgaagtaatggcatttagtaccctcttcgatatagtttttcttcaaaaattatgtatctgggtatcttgtacatgagttttctcgcctcatttttgtctaatagaagtttgtcgtttaatagataattcatgattgatgtcatccaagttgaatttgtattaatcatttctatgtctgcttctcccatttcgcaaatactgggttcatgtaacatttcaatgagaactaagttgaggtcgttgaattgtgatgcaaatttggccaatgaatcagcgttggaattttgttctcttggatttgttcaattttgaaataattgaatttttccaagtttttttttttgaactttttccaaatatttggccattctgattcccttttcttaatattctccaagtacatgattcactaacaattgggaatcactaaggcaatgtactgccttagcataaactacttcttccattcttaaacctactaaaagcacttcaaattcagcctcgttgtttgaagctaggaattgaaaccttaagacataatgaaacttaaagttttctgtcaagatcaggattatgcctgccctcgagccattatcgtttgatgagccatcaataaataatttccagatttttttatttgggattttcgatatttcttcgtaagtatttattccttcaattaaaaaatctaacactgatttccctttgatggctgctcctgggtgataagtaatgtcaaactgtctccattctattgaacattttatcaatcgacctgaggcgtcaggtttttacaatacttgccttagtggatgattagtcaatacatggactggatgcacttgaaattaaggtctcagctttctcaaggcatgaattagacttagtgcgagtttctcaaggcatgaattagacttagtgcgagttttaagatgaacttatttagtgctgccattttcccgattaatgactgaatctcttttggtttctttggtgaaggcatatcgagcaaaacctttatttttttaggttagcttcacttcctctcgcattcactatgaaaccaagaaactttccaaaagaaaccctaaatgaacatttcttcgggtttagtttaattttgtatttccttaggctcaagaaacactttgcaaggtcaaccatgtgatcatggattttaactaatttaactagcatgtcttccacatataacttcatgttacgaccaatctggtactcaagcattccattcacaaggcattggtaggtggctcctacatatttttatgttaagtggcatgactttataacaatagagccccaaattttttatgaagctcgtatgttcttgatcagtgacttgcatcttaatgtggttatatccagaataggcatccataaaggacatgagttcatgtctagcaatggcatcgacaagttgatcaattcttggcagtgaaaacaatcttttggccacgccctgttaaagtcagagaagtcaatgcatgttcttaaggtgccatttggctttggaccaggattgggtttgaaacccattgtggattaaattattcttacacaaaatcattggttataacttatcaacctcttctttcaatactcattgcctttttgaattgagaaggcgtcttttttgttattttagaggatattgagggtcgatattgaggtgatggaaaatgacattcgggtcaatcccaaccatgtttaaatggttccaagtaaatcggtcatggttttccattaagaagtgaattaattactactttaactctttccctaccctttcccaatttttacaatcttggtagggtgatttggatcgagtaacacttcttccgattcttctactggcctgagttgggattgttcagcatcaacttcctcggttatcattaccattgtttgaagaactttagttctctctttcaactctatgttgtaacactctctcgtcattaactgatctcctctcacagtctaattcctgtttgagaaatttcaatgataaacgttttatcgagctaactgcccctagcccagttagtgttgggtgacatattatcatattgtagactgaaggatgatccactaccagaaattcttgtagttgggtaattgataatggcgagccccccattgtcaaagggagatcaactgttacgagacttgcgacactgtctcttgtgaatccgcataatgaccatgcatggtttcagttaaattttttctaatcccattttccttagggtttctttgtatagaatatttaccgagcttctattgtcaactaagacccgctttacccttttatttgccagttcaatagttattacgagcgaatctgtatgtggaaatctcacatgtgtcacatcgtcttcattaaaaataattggtggctcttcagttcttactcgctttggcactttagttgtgaaggctaaggatcgattttttacttgattgatataccgcttctgggcagtatttcttatttttgctagacggggccttctagaaattactaagatatcctcaccatcaattggtgctggctagatgttttgatttggattctttattgggttgatttttttcatttcccttatttctcacgtactgtctaaagtatcctcgagagatgaggctttcaatctcatctttaagttgtcaacattcctcggtcgtgtggctgatatctttgtggaatctgcaatacttattttgatctcatttgttcctcacatttctcatatgttctgacttgcgaaaagcgaccctatttgaatttatgagaaatatgttttcacaagtctcgttcaattctgtgtaaacagtatagattggtatgtattcctcctattttttatgcttatttttatccttggatgactccttggattcatcttttctttttccatgtggctcattgcttatgcttgtgtttgcaacatttgtttcagtcttgctcgagctaggtttattccctgagccatcttttagcaactttagtttggatcgagcttcttcctttcagacgtatataaattccttgtcatttaattcatttattgatcttactgggcactactacaaaaattatatttggcaacacctaatcaacaatagttaataaaaaagtgttgtgaatttatttctttatatagtt

SEQ ID NO: 296377 - DNA, 1912 bp, Cannabis indica
acctcataacatctcttgttttttggaagtattgtatttggtcatcgaacgttaatctctggatctatatataataataaaaacagataaatagccattatctttgtttcattattattaagtaattaataaatgtaatgtgataaagttagagtttaattagtacaaagtataagcctgtgtcgttcaatattccagctccacccgaagcataattgactcccttaagaacagcatcgtcgtttggtgacagggaaagatatggcggcggtgatgaaatcccaagcttctcagctcaaataatatttttttttttttatcaaaaaatcaaatgtaaaaaataattaaagtatagacacgtgcattattgctgttaaataagataaatgatcaattgaaattaagatatattaatgtaaaaataatgtatatcaccaatagttctgccattagtgaacctgccagtaggttggccaccaggataatcaactccataccaaggatagttggatttggcaagagagtactgcaaaaaattgttgtttcccacttcagtcaaggaatcaccaaacacaaatgtaactggtgttgctgctaatgccatgctatacttattatcaatcatatggaatgagaaaacaacggtcccaactagagctaccattctcattattactactactcccatcattttcaatttcactgaactgacagtaattagtattacctcatatatagcaagatttggggggtcgttggctaattcttcaagtctctacatgttaggtgattgaattcttaaccatagggacatatactattgttgtcaaattgtattaggcaaaaaagggtaccttaatttttcttgttttgggcatgttgttttactttggaagtttctttttggtggttagtggtttgtctgtcgaggagttggccaactcgtgtgtaatttagtcagcagtgttagtttaatttgttggaatgaatggtggaaccatgaatggcttttaattttgatgttataatatatcttgctcaactttgttatttactgatcaaatactaacttgccttaattaacctcattcaataggattatatatttcgttttctcttctttcattaggtgatgattttggttaagtttgttttttgacaaaagatttggttaagcttaatcaatctactatatatgcaagatagcggctttgtaaaattgcaaagaatatttagttgttttttctcttttatagttaggccacctaatacataaacatggtgtatagcgtggacacctaaaaaaagatcacacggactaaatagttttgggtggttttacttcttaaaaataagtgtacgatgcatcctttttgtgtttttaatattcatataattttaattttaattttaattttaattttaattttaattttaatttatatatatttatttatagaatacatagtagtcatttaaaataattcatataaacttttcaaaaatttagaataatttattatgcaaaaagtagggttcaaataataactaatttcatatgtgcataaaatagaggcataacaaactatttgaattttattttcggcatattaaattactatgtttctctttttttgaaaattgcagtttaaaatatcaggtagatgggttttatgttataaataaaacttaatttaatttaatattattgttagactataatatataatatgaaatacaacatatataaacgatgtgtaatacggaataaactgtaaatatatcgaaatgtatatacaatgaaaggatcgaaataccttcagccattgatgtttgagcttcaatccctacgataacttcagtattggagttcgggcttcctcgccctctcaactctctttagatagaattt

SEQ ID NO: 296378 - DNA, 2075 bp, Cannabis indica
agggtggtataaaataacaccatatgtgtttttttagaataaaatgtcaaatttccctttcataattatacataattgaaaatttcttatacaactaaattattgtacacaaattttgtgattacgtgttataacaaatatgcgacacaagtagtgtcttctcatcttaaaaaatatatttatataaaagtaataatatatactcaaaatatgcattaatacaacattatgtaagatcaatgatatgatattatttatgtaaatattacatatttacataagaataataatgtcaattagcaaagtgtgtgtaattctctattaagtgcacatatgataattattgatctcgcttttagctaataatattgaatctttaaaataatgacattaaatcattaaagcgatgaatttttaaataagaataataattaaataatatatgagtaaataagaacacaagaaattttatagtggttcaaccctgtgattattgtaatcccctattttttttatattactttcaagattattaagatcacaagaagttgatcatgtgagtttcttaataatcttgataaaaacttacaagtattttaacagcgtaagtgctctttagaaaatatgaactcggatctctaaacaatgaaaaggctccactatatagagaaaatacaataaatattgttactaaaaattgatatccgcatttttacaaggcatgacacgtggaatggtaggaagaaactcatgtacatcacctcgtagttggaatcctatgatatggttgggaggtcttcctgaactaagagtcgttcgaataagaggatgtgcggaaggctactagcgttggcatgtgcttcccaagagaattggatttagaagggtcaggaagagaggctctaccatctaaagtatcagaccacttcttggaattcacaactgtgccatcacagtcagagttatcctctatagtgttctccatgggaacttgttgtaagggtttcacattcagaacaagctctgtcaggtcgataatagaagaagacaagtcttttgcatttagagccttaggagcagccccttagttcaaagctggaggtgatggcttctgagatccactcccagaactctcgtccttcttgcccttgaccttgccttcacttgcaatttcacgaaccttctctaatctagagttgatgtttcccaagaatctattgagcaaactcatttgtaatgtagtcggctggtttgcaaagaacaaacaaataacacattatgaaaggtcatgtcagaatatgattattgtaacaagctatcagataatacattagaaggatttaagtcatttatctaagcataattgactttccccctagcaaaaagagaaatgtcttcacgacctaacttagtctcatcctggaagaatcctagaaagtaaatcttactaagcatgtccactctaacatgatggtgcgctggtggaacaaaatgattaggaatcattatgatgtaatctacgttatctatattattactacacgaatacctattctgatctaaattcaagaagtacggatcaaatcctccttggtcaatactgtctaaatctgctaacgtgggaaccctaattatatggaagggggtctcaccactaccggaagtgctttctcccagtgcaccctcatttagagctacatccttgaatcaaatagtgagctcctcagcctcactcaagttctctgggaattgtctcgtgcaatctactagccactgctcatcagccttcatggtgtttagggcctcctcagtagttatgactgtaatggcctctttcacctcgtttggatcccccaggagagcctcatggatggtttccttcacgaaaaggtgttccacgtcttgatgggaagcgatgcccacctcttgaagatttttaatggtcactaacttttccacttataaatccttgggtagtagggacttatagaaattaacactcacttgttatattgaagtctaaactgttgggttttatgccctaaataaaattccatttcaatgtaatccagatt

SEQ ID NO: 296379 - DNA, 2010 bp, Cannabis indica
tacccttttgatacccataacataattgatcacttaattttgtattgcactttataataacatatacattatacatatatgtgcccacataggattttaatccaataaatcgtcccagtgattatggcgggagttttaggtatctatgatctcatcatagctattaatgttatcatcaatactagtattaatcccaaagctaaatcgtattatctctttgatggctatgcccatctctcttccggtctcgctagtggtcttgttggcctctctactagtatggctattggaattgtgggtgatgtcggtgatggtatatatattctcttctcctttctacttcctatgtttcgagcatagacatcataaagttttggtttgtagtttatgtcaaatgtcaaattggttgagtttaattctatgcctcaagcatgaatatgatgttgatacttagttttcaattaaaaggaggattttgttgttaatgatggtttataatatcattagtatttttttttctttaattttagccacactgagcaactacatgaacttgaactgatatgattaatggttttggaagttcatagttggtgtttttttctttttttagatattttgtttaaaaggaccgctgatatgcaacttcctaaaattttattagtagtagtgttagaaaaataaatcaatttgcatttatagatagacaatgattgatactaatggtcttccacccatctaaagctaaattgttttaagagtattgatattcggcagtagtggtgcctagcacttctagacatatcgccttgcgattggctagcgatattaaattatatgaagactcgatatttaattggactaatagagatattgacacataggagggtgctagacaccactagtgcctcttagcatttatcttattttaagcacctgcattaagttaatttttcattaattaaattgtaggggtgtaatttatgatttctttactttttcttcattggttgttgcatcattcatatcaaatattctataactctaaattacaaacattgtatggtttatattgtttttttattaagtataattggattttgagctgagatgcgttatttatttttgttataatactttaatactcataaaatatgtaattagaagattcatttcatacacaaaataacacatattattagaagtattataaccataaatctaaagtccttgatgattcaaagaggagaaagaacatgaatagcggaagcgtaccttaatttcttgatagagataattaatttagtgatgtcacatttttgggtaatgatcttccaagaatacaagatttagggttttctttagttttctctcttgatgggggaagatgaaaatagagttgctcttgtttcttagggaccactaccaatttataacatcatagctaggttattaatcataagtatttctaatttaacccgtcaataaattagaaatatcgcttaaggtatctacacatttaccccatgatattttaatactcatgactacaattactaaaatgataactttatttgggtcaaactttatatagcaatataccaatacatataagcccatattgaggattttaatctaacaatctctcacttggaatacatatatcttttgatagtatataaccttataagtgcttaactattgttatcataattataggtgtttcaaaacaatctcgtctattgattatactaacataggatcaaagcggctttcgcaacatttagcatagctaaacccattaatagtcacgtatatcaatataactaaatgacataaatcaataatggatgtgtaacaagaaaattacatgcaaatattgttgggttttatgcctaaataaaactacatttcaatataattagatttacttattaataaagatctgaaataacatttaatgttgcatggctcacatgatttatttcatgattatttacataatgtatg

SEQ ID NO: 296380 - DNA, 3252 bp, Cannabis indica
attttatattctgcctgttcagttttgctgtagcagattactttctgctgctgcaaacgcttacagtttttatattttcgtatatacaactgacatttgcaaaaactcggtttttcagttcagtaagttttgatttattttaaatattgtactcagttgagcatgattaaaaaagtatgttaggaagcatattagcgttttgatattagaataagaatagatctaagtttccatgtatgtggtagttagattacaacttggatcgttgcctgatcatgctgacttatgaattagaaggcttttcctatagaatgggcgactggcataatataggaagtcagggtaatgtggtcaaggctagtggcgatgggagaaattaggatttcccttgttcttgtagtcgaattagaagctataggagggttgttggcggaagttatgttgattcgccacagaatctgtaagattgggagtagaggtttgtagaaatactagctaaagcttagagacaaggtgagaaaatttagaggttttggcagcagagttcttttgttgcacctcttcctctgatgcctgttttttcatgtgtaggtgtttccaataggaaggcttatactgttaaacagattaagttattatataaaaaaatcttgagcaaaaaaaatttcatggagatcataggggtggttttggagacccctatactttcttgaaatatcctatttataagagacgtcattagggtgagtgtaacagaaaagcatgctttcgatgtggcgtaatcagacattataagagaaattttctacaattaaagatagaaggtttatgttttcagtatggacttattggtcatttaaaggagacttattctcagctacagaagaaagaagtaaggcccacttcagtttgggtggtttttattactcaggtcgttatagtggctgattcaacttttgtgaaaggccagcttcttatttctaactcctctcaatatgtattagttgaatttagggctatacattcatatatggtagctagagtggttgttggattggatagaccttgtgattattataatttagggtttgagaccctatcacctagtgaagaattcattatctccaaaaggtaagttaggtctattctgattgagggttgagattggtaaaaggagtgttgatcttgttaagttagtttaatgaactttaatattattccaggaattaatagattgcacgcttaagtaagcgatcaatgttgcctagaagagaaaagtattaactttttggtgggtagatgaaagaactttgggctttaaggaatcagtttggaactcttaaatcttgattattttaatattgaagactggaaacttattcagaatagtgcttaggattttctagcagttgtgattgactctagcaaacccaaaacagttaggcttattggacgtcagagtagtaaaagaacttttagatgtgttcttcccagaaagttattggaattaccacttgaattagttatcaattgggttctgggagtgaaaccagatttcaaagttccatattggatagttctagcaaaacttaatgagctgaaagttcaatttgagggtttgaataagaggataattaagaataagtatctcttgccaagaatcaaaaatttgtttgatcggttcaagataagacaatcttttctaagattgattttcactcaagttattatttgttgaaaatacaagaagtatacattccgaagattatattttatattagatatggttactaagattttggttgtattcttcaaactaactaatgcttcgataaatattatgaatctcataggttgagtattcaagggtttccttggtaattgtgctataagaattcatcaacggtatctttatataccttcatttagattcaaagcatgaacaacatctatcgatgattcttcagagagtatgaaaatataagctttaggccaagtttaagaagtataaatttcggttattatcaatgacgttcccagggcattttggtaatcgaagtggagttatgatagattcggaaaatattatttcagttaaggattaactgaaaccgaagacaattagaaactttctaaatttagctatgtaaaatcgttgaactgaaggaagtctttttgagattctcacgcctttagtaggagctagccaaggaaagccaagaatttggataaatcgacaagtgtggaattagattataggaagtgaagcagtgattgattatagtctaatgttaatcttgtcttcatacatgtaagattgttagttgttatgatgcctctgacagggtctggagtgtgtgttggtgaagacattacttaggcccttcattaattgaaggactatgagcaaatttatccaaaaaaatgagttaggattcactattgttatggttgagcaaagggtttggtagttttatttctacaaaaagaagtgtaggatctacgcagattattagaaactcaagcatttctttgcttaaaaagatttcatcataagataaaggctatcgtagttagctaaaaactatggttgtcgaattctttactatcctgggaaggctgaagtagtaggtgatggcctgagctagaaagatcttgaacaaatttatagtattacaatgatctctcctgagatagaagttgataaggtaaagtgaggataagaaaagtattgaatttatggtcaggaagttcaacaatttaacatttcaatttgaattgtaaaaaggattaaaagttaggggtgtgcataaatcgatccaatccaatgagaaccgaccgatccaattacaaccgaccgccaaatattggatatccaattgtgatcggatcggattggatgttatttttaaatatccaattggatcagatcggatggtggatggggtgtctaaaaatccaatacatccaacatccaatcgaactaattagtattttcatttagtttggatgaataattagattttatattgttatacgtcaaatctatatgtatatatgaaaattaacattaaagttttacttttcttttcttggattggatggatccagtccaatccaatacatactggatctaaaatattggatggatccgatccaatccaaaaaatactaggtttaaaatattagataaacccaaattaaataaataaatatatatgaaatacatccaatggatagaaccgatccaat

SEQ ID NO: 296381 - DNA, 1837 bp, Cannabis indica
caaaaacacagtcaaaatgaagccaattcttaagatacgttccacggccagcctggagcttggtttccataacaaaaaacaaagtgggccgatgttgcttgaccaacagggagagatttctgaatgcttgaggctccccaaatctcgagcattccaactgaggagactcattttcctcggcggggttacagagcaacacctgtcgtttgttcattgtcagatagagaagggacaaccacgtcttcactcgaagaagctcgagccctcttaagcatactcctaatagaaccaccaacatgggcagtttgtcgagtgaatgggcgtttagaccctgaaatggcagcagtggtgggagtagtaatgggttccttgatggtgaggcttttatttctagttgcattgctggcaattgggtggggagagtgggattcaggaatggaaatacccttgcccttgtcaatgtgtgttatagtcgaagtgaccataatgggttgtgggataactggttggcttgcttagtgcatgttggattgttgtagaggtgggtcagatgagctaatgggatgattgttgttaaaagcaagggtaaaaattcaggttccatatttagaaattgatcaaccgcctgttggaggccctgattcgagttggtgttacgagggaaatattcttcaataagcctggaatttgaaagttcaaaagggttcttcttaaggttactttttgcaggggctcggagataatccttataacccaactcaagaggaattggaaaattatcacatcggagcagatacttcccacacttgttgtaagtgtgatcctgtaaaccacaaaaatgcagaagttttggagcctttcaaacttgaagttgatctgtttggtgtgagccaaggttcgaaagcagatgttcatacctcttctcaaaggtttagtgacatccaaaaaaacacaaatgcgtagatagggaccaaagctttccaaaagcgacagaggatggatttcaataagatcacccagttcatcagcaatgaattgggccagttggaggcttttatgcccaaaagggatgttatgcgcttgcacccaaaaggggacatagcgaagttgatctagtgtgagagtatcgagtccgtcagggttggcaaagatcatcaggaacttatcaaagtgccacgactgatcctccaagacccgacggcagtccccttcacactggaaggtagcgaggaacataccagagagatattcagagatttcaacaggaaatctaagagtccaagcctcagtcatggccttttcgatccaagtaggcttgacagatttgggtgctaggactttaaaaaccaggcagaacaagatagaatcatcagcatgattgagagatatatgatcaaactcgtggattaggttttcttcatcagtaagggaagtgagagtttgggaggcgttagatgaagaagtcaggggattgtgaatactaagacgatggagatgagtatgcgggggttgaggattttgtggttggatacaatagcttaaataggaaaagaaaatagacgaaagacataagaaatacttggagattaagggtcgccttggagattgagaagatcgcttcagcatctcttcagatcctcgtagagctagttggtagaggtcaggaggggaaatgattattcgtttgcaacacctggagaagtgagatatggcagttgtgtgactgttctgggtgtggtggaaggggaaatgatcatgaaaaaaattgggtttgtattaattttgatagaacttgagccgtcaaaattaaatggagttgtgagagagagagagagag

SEQ ID NO: 296382 - DNA, 964 bp, Cannabis indica
ttataactctttgcagttttctcatgacggagaagaacgagtggtaataggttcccttgatcttaaccaatgtatgagacttccagatgaaatagcaggaagaagaccagaggtattagactagatattattagtatatgaatttagttttcatttttcaggcatgttaattttgcaatagaattttttgctcaactttaagttgtctgtcgttgttgtttattgtgaaacatacatttcattgctttaacttattttcgactactctagtggttatcgagttggaagggtagttgttggagtggtctactctcatcattttcgaactcaaatctacaatgtttttcatcaaaaaattcagaatgttgatttttatgttgcattatgaagttgtctaacaaaattaatgtagtcccttcatatttctgttcttctaggagattttattttaaaaatgagatgaaaattttcattttcttgaccattctgacttgtacacaaagacaacaaaatgcaaattcagcttcagttgttaatcaataaaagccattgattcaaaagcatgtgaggggttcattttgacaggggattggagccgattttgcaagggcgtatctaagcaacgtctgtgtagcatcagaactgcatagaaacggtttaggctatgcagttgtagcaaagtctaagttagttgctcaagaatggggtaagtctgaattcattgacatatcttgtatattctgatgttttacttacaagaaggaaatagttcttgttcttatatattatttatcctttgtgttgagaattatggggttccatctcaaaatcaattggcaatgagtggagtagtccatgttcttatatattatatatggctcaattctctaccatttattctatgtgggacaatgtccacaacactttgttcaactgaattctgtgatattcttaggtatatctg

SEQ ID NO: 296383 - DNA, 1318 bp, Cannabis indica
tttttttttttttttgggattgtgtctttgagtctccctttcgcaaatggtgtagcctatacagctagctagctatattagatgtttatctccgatattttttataacaaaaatagtcaaattttaaatttaataaaatttttctttgaaaaagtaataacaataataatgtgtcttaggctcgagaaccaaacaacaatatgtctttctctagtgggtcattttctcatatgagatatataatgatgatgatgacattaactaaaggaccaacattctcatgggttttgttcgcaaccttttccatataattttactacactatgtattaattatttcttgttttgtatatacttattaattatttatgttattaggaataaaaatgacaaaataagatgagtaaatatttttatatgtaagccaagataaaaaataaaataaaaacaatattggcatgagaaggtaccaaaaagaaaaagtgaaaaagcattaaaattatttattatgggtggtgtggtgttagtgtagatggccattggggttttgggaggccttttagggcaatgcatatatatggacccatgtgtagaaaacgacctgaaattattattgaaagcatacataacactttgtgaaataacacaaaatggccttactcatcattttgggaggctataaatatattattattatacataaatatcgataagaggtagaagaagaagaagaagaagggagaataggtggtccttcatggttgagctgagggtccacgtggcacagccggcaagggatggcccaggccacgtgggagctagtggtccaaaaggatcaaaccttattctatgcatgccacgtgttcttaaaggataggttacagcctgtatgaacttcaattactagagctttgcctagcttggactacgtactacaaacactcattttatttatttatttatttaagtttttaaatgaattagtaaaagagaaaagttggtaaggactaggagagagtgctttgcagcctcgttaggtggatcttcttgttttatggtaaagacatatgacaatacataattctttttaaacctttggatggacttctttcactggtcttcaactgttattttttttttttttaattctaatggtcaattgtactagacaattctcaatcaccaaaaataatctctagttcttatgtagagaaaaaaaaaaaaaaccctttgaaaattataggatgatgtcaatctttaaaaaagctaacactatgtcctatacatacatattagggatatatatatatcaataattc

SEQ ID NO: 296384 - DNA, 1465 bp, Cannabis indica
aaaaaatgatataaaatccaattcaatataatttgacttaatacgacgttctaaacgagacttaatcttattattgtttacgacaagaggtaatttgtaggcattaaatggtaatttgaagtgttaatctctcactgcttatatgttttcctttgtcttaataatttaaataataatttatgggagtaatcaaattactagtttttccaaacacgtccttcacacgatccagagggattacttcttgttctattattctagtaataaatgaaaaaaaattgtatagtggaaaatctttttgttaatgatagtaattaattagtaagtgttgatggttgtgtttataaaaaattctatttagtaatttgttgtctaatactcatttttagatgaagtaaggttccctctcttgaaaatttaaattatttatttggtggctgttataattttgtttctcatttctcttatagtgtaagtggaaaccgaaggaaaactctttccttcgattctaaaaataatttcttttcttttttctttttctttgtattttttacatttttgttctacttttatgtttattcttttactaaggtcattaggggataaagattataggttttgcttttatgtttgttttctcgtatattgtgttgtattttatgtaggaaagctttcagttgtccacgcaaaagcagtagcaagttagtttaggggcgctagattggtctttgggcctcgatattcctctgagcactatagaatcagattgtcttattgtggtgatggctttttttagaagatcttttatgtgcaatgatttcgaatttttgttggatgatatctatgtttactatctaggttttatggggcgtttttaatttatgttcgtcgttcggtcaatatggctgctcatgggttttagctatatacacttaaaatagatagtaaactagttggaatggatgattttccaacttatctttacgatctactacattttatcaatgaaatgttattttattttatttttttagaaaaaaaaagaagagaggggaaaattgtgtatttgacctaaggttgagggtatatttgcaagaggagttggcgaaaaacagaagaagtaaagtacgcttgagtgttgatacgacatcgttttagtgcaattccctttccctctccaaaagactgattttcatttgcacaggcagggagaaagagagagagggagaagagctcgaactcgagccgaagagagaaacaatggggacttcagttcagataacgccgctttgcggtgtctacagcgagagcccattgtcgtacttggtttcaatcgacggtttcaatctcctcatcgactgtggctggaacgaccatttcgaaccttctattcttcaacctctctccaagtctctctctctctctctctctatactatttacatatacatatatacatatatatg

SEQ ID NO: 296385 - DNA, 7430 bp, Cannabis indica
ttttcggtagcccatctcgaaagaactccatggttatgcgtgcttgacttagggtaatttcaggatggattacctctagggaagtttttccaggaagcatgcgagtgagaacaaagcatgctagaaacactcgtgttggtctgtagggtcagtcatcattccatgaatcagccagagtgacatattcgtgtataagagccatgattctgtaggtgtaaggggccaatggaggcttgaagcggagacgttacatgatacatgtctcgttcaaaattaaaagtaatttttgttatattattttatataatataatatttagattaaataattaagtatgacaaattattaattttgtcaaattgtaacatgcattataaaattataaaatgagtagatattaatcacaaactgtaacttgatctctgccacaagtttaatggacttggacacagctttctgagttgtttgaagtttttagaggcagaggattctcgtggtaacattgccctcccatatggctctttgatgaaaaggaacccactgcctaaaccaagaatggatcgttcttagaacaacaccaatagaaatgtagcttggcccttgcttactcgccttgttccataaaccaggtgcttagccaaccccttcctgcacccaactcacaatccatatccaacaaactgactataccactcccaacacaaccacgttcacacccaattctcctcttactaccgcacctggttggattacaaataacactaaaaatgactcatcccaaataaccacacataccactaaaactgttgacttgatttctaataaaagctctattttcctccacttcagctccctctgtttcttgtgtgaaactacaaacactcgcacctacaaaaggaaaatcatccaaaatggagattctcttcactcaattttaaaaagatgttgtctccaacctttcaatgaagccattgctacaaaaactattggttcatctctcatggaaaacattaatgttgaaccaacctctaccaatgatcctattcatgttaaattcgctatcatatctgaaccttttaataatgaagtccctgagtttgctgctgttcttgtgcctgaatttttatctccacatgctgcaacagatgatgcgaatggtttggtgggtgttgctccgcaaccataccactcgccatgaatgttattggttggaatgctcagggattggagaaaccgagcgaattccagtaactgcactttctcaactctcagcaagcttcccaaattttatttcttatggaaactaagttgaaggttgggtctatcaatcatgtttgcaatgttttaaattttcttaatgggataaaagttcttaggagagggctcgaggatggtcttatgttgttatggaaagataatattgatgtaacacttctatccttttcaatggatcatattttttgctatattcattgtgataatgagattaaatggcacttttctagtttttatggggcacccgaaacacatttacgagctgaaacatggaaagtcttgagatgtttagcaaatgtttctcctcaagatccatggttggtcttggaagacttcaatgaaatttattcccataatcttaagcttggggtatttctagagatggtagtcttattgataatttccatgcatgtactaagtatggaaacttatctaggtgatcatgatggagatgactttactttgactaacaaagatcctggtgatgccaatatcaaagaatgtcttgattatagttttatcaatccatcatggaattaccattacccatttacaacactttgcatcatttggatttctactcttctaaccatagagctcttaagattattttctcggatatgccttctaacaatcatgccttgcctaagtacaaatcttgcttcaagtatgaagccttttggctgaaagatacaaaatgttctgttattattgtttgacattggcaaaactctagacatgattctcctaaatatgttgttaataatatccagcattgttttacctctctttaatcttgtcatgctaataaatatggcaatatgagaaagaatatcactaaggttgaggattgggttgctagcctcagggattccaatgacatttctgctggttatttttctaatctgaacacatttcggatggcttgctagaacaagaagagacttactggcagcaacactcttgcatctctcgattataatcgggtgatgccaataccaaatatttttactcttaagcctttggacgaaaagctaacaactgcattaagaaactttaaactactcatgggactttcacaactgatcagaccaaaattgcaaatattgttcaagattactatgcttctatttttggcacttctggtattaatgaagctgctcttgctgatactttcgctattattcccaccaccatcacgcctgctatgaataatattatacagaaaccatatacttctgaggatgttcttcaggctctttttgccagcacaaaaatgtgcgggcaaaagtaatatttcttgtaatttattaatcattggtctatggtgggctctttagtgactaagggagttcttgatattcttaacaaggctggaacccttctggcatcaataataccttgctaacccttattttaaaagtcaaagaatcctacagcagtggcttaatttaggccaattagcctctataatgtgctatacaaacttgtctccaaagctattgtccttcagattaaaccgtttctggctcatgtcatatctaaataccaaagtgcctttatctccaacaaatttaccaaagtggctttatctccaacaaaatgattactgacaacattctagtggcctacaaacttctccactatttgagacataaaactaggggtcgaattggctacactacctttaagattgatatgagcaaagcctttgacagggttgaatggcaatttgttaagcaggtcatgctgaaaatgggttttggtcaacagttggttgatattattatgcattgcatcagcttcactagcttttcttttcttcttaatggtgcagttactggccatctcaaacctcaacgaggcattaggcagggggacacccctctctccctactttttcctcatatgtgcggaagctttttcaaggctactcaaaaaccaagaagatcagggtatgcttactggccttgttgttacctgacacgcccctaaagtctctcatcttctttttgttgacgataacttgctagtttaatgaacggatgctcactctcaggctgtcattaaaaatatcttggatttatatagtaaggcatcgagttaactcatcaatgctgacaaatttgttatgtccttctcgcctaatacttatcttgcagatcaacaagcttttcatcaaattttgggtatgccgattcaatcatgtcatgagcattatttgggccttccttcctacacagactacaatgagagtgaggcctttagctctattaaatattgcatttggaaacttcttaattcttggcaagaaaagttttttctgtggggggggggggtaaggaagttctcttgaagcggttgtgcaatcaatccccacttatgccatgagttaatttcatcttcctggcttcctgccaagttttgcaacagtttggaaagtctaatggtgagattttggtggggcttcatattaaatgatcattctatacattggaaaagatggaatgctctttgctacagtaagcaagttgggggtcttggattcacatcttttattgataatcaagccttacttgctaaacaagcgtggcgtctgatggaaaatactaattcacttcttttttgtgttcttcatcaccaatattttcagcacaattgtttctttaaagctcgattgggtaacaatccctcttacacttggtggagtataatttggggctgagagttgcttactaaaggcttgatcttgataattggttaaggtacttcagtatcatatattaatgacccttggcttccaggcagcaccaattttgagcctatctgaaccttatctgctggttaagaccttagagtttctaatttaattatacctaatcgaacttgggacatgattgatttgcaacgaaactttactaactttgatattgatcaaatcttgcaactaccgttgagccttttccctttggaggatcattatttggtatttctctcccacgggagcttattcggtcaagacgtgataccacttggctaccaatttattggatctccacactccctcatcttcacaagatagttctcattggtagaaccgtttttggcatatgaacctccattgtaaaatcaaactttttgactggaaagttatccacaatgccctgccgcttgcagccaatcttcataagaaacatatcatacctgattcatcttgttctcacagcaacaacactagtgaagacctgaatcatgctttcttcaatagtaaaaaggccaagcaacgtttggtgattgctacatttctaggtagatcttgataaagcttcagcaactactagcagatacttcattcattctctttgtggattgtttgatgataagcaaatggagacaattttatgtgttatgtggtacatattgtatgacaggaagaacaattaccatggctccaaaactatgtcagctgatattattcttgagaaggctatttcttatccccatgaatatcacgaggcaaacaactcatctatgagtaccatttactgtctttctcaagatgcaccacagtgacaacccccctttacaacaccgttaaacttaatgttgatgcctccatcatttcggaagggaaggttatgggaattggcggtattattcgtgattcacagggactcatggttgctaccatcttgaaacctctacaagggctctcgagtgtcaaagaaattgaagccaaagctatatcctcttgccttcaattggtgcatgatctcagtgttcctattctttttattgaaactgactctctaattgttgcaaacaatgtgaacactttccatgatcaacccaacaggtttaatgatttgatttaggatattatatatcaattgtccttttttcctagtgcatctttaagtcatgttcctcggcgtgttaatactacagctcacgaccttgctagatttgctctacaggtggatactgattaagtttggagggccattattcttagtcctatacatgctattgttgtaaatgaacttattcattaatatacaatagctgttttctctgaaaaaatactttaatttgatgatcacatataattccttaaatttgatgatcacatgaatatgtaactcacatttctttttcacctttaaattagtaaaagatgttattaattatttataaatatgaatggatgatagctattgaaaatataaatgttagagacttgatttgttcatttataagttgtataaatggttcaaaattaagtgagagtggtttggagcactttggagaagaatcgaccaaagctagaaaaaaaaagtaactagtaaccagttattgtttattgttttttcagcatatcagttttatatgtttttaaaacattaaaagcttctctaacagctcaaaacacatccaaatcatccagttaataccataaactttcatttgatgattggttacaactaagggctttatagtggtcattcatgttcatatgagagtgaaaactttataaatagtgaccatttattcacttggaaacatatagttgaaaccactagttgtgtgaacatattaggcttgaaaatctttataagtattttttgagtttctttaagtgtccatgtgagggaagaaattacatttaggactaagttccgtaaattttggtcaagcctatcgtatgttcttgagtgtttttttttccatgtaatcttgatgaagtactttatttgtattttatgtatttgattgtaatagtccatttttcctcttgtaatgagaaaatctccaacaatttcatcttaaatttagtcaaagtttaatacgagggaccaatgatctaacccaaatcatttctaataaaaatttcaatgtaaatatttaagtcctacaaattcaacccatatattaccccctataagaggtacttattgaatgcatttctactctttgtcttttagtgaagtgattaagttcctcatttaaatatttatgcacacacatgggaggattagagaattggtggtaaattaattgttggtagtttggtagaaagaaaccaaaccaaaggttggatggggtccttgtggatttggattattaaaatttaagtttgaaatttgaaaaaaaaaggacaaaagaggtgtgaaacattggagggccatgggttgtgggtgtgtcatatatataggcagagattgtggggtctttctaaggcagcagtacgtgagtgttgtcttgcgagagatttgccattataccaatctactactacttcaaacccaatcaccatacatttttagccgttacaaggacccattttccatgatttcctttgtttaaaaataaattattattattattattattattattattattattattagggtaaatactattttgaaccttgtattttgcaaaagttactgattggaccctctattttgttaaatgacaaaatgaaccctgtattttctaaaatggtaaaaataagatactgaacttatttttcaacaattttttttagtataaccaatttgaaaacaattcttaatacgaacagatatagaatatgtaaatacttttgtcataacacttttacttttagatcagattattattaaattttattttgacaaaaaatcactttaaggtcctatttgtaccattttaaaaatacatggtccattttatcatttaacaaaacagagagtccaaataataatttttacaaaacacaagatccaaaatgatattttatcattgttgttatttatttttctatataaaactaaaaactacataattcacatctcaaaacttaattacggagttagagattggaaacagaattaatgagcttgcttatgtatgtaccacatacaaggacacatatttattcaagttcggacaaagttacaatatattttttttttgaaagaaagttttaggctgcatttggaagtaactttgtaattattaggtagggtaattattaggatggtaattacacagtgtagtaattacactatattttaaaatgcaaggtgtgtttggatatgaagtggtaattacatatgaattcttaatagcttgtttggcaaaatagttagtaattacatgggaaa

SEQ ID NO: 296386 - DNA, 1840 bp, Cannabis indica
ttattttgtttcgttgttgattcatatttgttctttgatggcttgccatcaaatcgttgttagtagttacgaataacaagttctttgcgactgaatctaagtttttttttttgaaacccgactgaattagttgctagtagtgcagttacgtatcttaaacaatagttgactactcaagttacgagattaaatgaacgtgctgcaacggtttctaccgttgtgtcttcttagcattggattaaacataatgtaggtattcttactgttaattgtgatgctataatttttttaatttgatttaattttagtttttttatcaaacgatttaaaaattaaacggctaattatttgactcgtttttctaattctaatctcagtcgtgtctccaacgtacccaattaaattgtaggctattattttagttgattaccattaatcaataaaattccattatttattaaaaaacctaaaaatgattttaaaaaaagtatatttgaaaaagaaaaatggttcattgtgatgtaaatgtaatgtagacacgttaagaattagtttgttgatagaacatggcattgggcattggcaatggcatgcatgccctagtccctacaccatttcctctatcaaaaaatatctttttctttagtcactctcaagtttcaacacaataactaaaccatgaccaaaactaaaactcaccaccaccccctattttaatctatgtctctctctctctctttcttcaccactttttttcttattattattatttttattatttcattttactattctataaaataatattccaaagtaacatatcacacatacacacacacccttcttcttcttctccccatactttatatatatatatctttatttctctctctcaaatcatcacaatccaaaaaatcatattaattacactttcccacttcaaagtttcaatctttatagcaaaagagagcatagcagagcagccatggactggttttcatggctgtccaaaacagggcttgaaccaacactagtctaccagtacggactagcctttgctcaaaacgagcttgaagaagaagacatagtctacttcaaccatgaatttcttcaaagcatgggaatctccatagccaaacacaggcttgagatcttaaagctctcaaggaaagaaatcaacaagcttaataatggaacaagacccatgactaccagacttcttgtggccattaatagaactaagagatgtttggctaagtgtataaagatgttaacaacaactcataaagaagattcatcctcatcttcagctcttatggttcttccaaggcctacttatggaacaagattcagaggagctatgcttaagaggaataagaaattcatttctgccaaacaggggagattgcttcaactcacaaatgggtctccatctccaatggttaggtatgggagtatgactagaattgaaagcttttcaagcccagttgtgtatgatctcaaaaaagagcagaaaattcatgaacaagaagaagaagaagaagaagatcaagatggttattggtctactggtgttgaagagatcaggtgggatactatgtttcaggatttgaaacccacatgaatttttttctttcattgttttgattttgatgataaacataaaagaattattgttaatttaatggtgtgagatgggtttttgtgttcttccaccataggtaaatggattttgtgttcttctttctttgagtattttaatttttatttggttaaatttgtctctgattttttttttttgagtattttaatttaatattttttaacattttgttcttgg

SEQ ID NO: 296387 - DNA, 4439 bp, Cannabis indica
atgcaatgggaagccactgcttttggacgccctgttcttgccatagttcttgttgcttctctggctctttttcctgtgttcttaatcccttctggcccatctatgtggttggctggaatgatttttggatatggtctagggtttgttataattatggtaggaacaactattggaatggtcctgccatatttaattggtcttctatttcgtgaacgaatccatgtgagactttttatcttttgactgtttatgaagttttagttgtcccagagttgaaatttgttaattcatctcctattttcatctgttgtttcattatgtagcaatggctgaatagatggccacagaaggctgaaatgcttagacttgctggagaagggagctggttccatcaattccgagtagtagctatctttagggtctcaccatttccatacacaatcttcaattatgcaattgttgtaacaagtatgcgattttggccttatttatggggatccatcgctggaatggtaccagaggctttcatttacatttacaggtgagctgtactaatttgatacagttagtattaactgtctttaaatggttttcacttaatagaattatccttgctccatttcttatgtaatgctcaactcagataatgactagtttgtatactagtttaatgctaacaggttttaatatactaaaaaattaaagaagagtttatttttaagattgccttgttgaattaggattttactttctgtatcagcttgcgtctgtcaccattgaacatgtgcgtttgtatgtaattcttcttcctatatcttgttaactttttctttactactgtgcagtggtcggttaataaggacattagcaaatgttcagtatggaaactatcacatgactacagtggagattgtatacaatattatttcatttatcattgccattattacaacagttgctttcaccgtttatgcaaaaagagctctcaatgaactcgaaatggcagatactaatggagaagtatctgtgggcaaccacggtagtttcgagatggagaagcttccacttgaaagacctaagcatatgggactttcatatatgtcatctgctgagaaataacttagatagcctaaaagaatcagaaattttagaggtattagattctttaacaatctatctttctttcttttttagttttaaaggtagttttgatctttgtaattacaagagaaggggaacaaaatatagggaaagaaaaaaaaaaattaactgtttgtataaaatggaaaagatttataagaacatcggtgtctagtaacgtttgttatgcagaaaaaggtggcaccaattcctgattatcatattgtttgctttatgttttggtagtttttatgttttgagaaagttgacgctgattgaaagctagaatagtataatgtaattttattttcatatacaaactcaagaatttgtgaaaactacacagattgaagcagctgctctttttaatcacttaattgccaccaattcctcacttatgcacataatctgtaagaaaaaaattaggatgatgaaaaaggcggcttggatttgtgactcagttcagtcatatatgtttttgaggttccttcttcatcaacagcagttgattgttctgcaatttgaactatttcggctgattcctgttctgtaatttgaacaatctcagataattctgtatccattttttgtatctctgttcgtctagaattattcggcatgttttcacgtccgcttttaactccttctatccatccttttatggtgccctcgtgctcgcccaacatcccttccttgaacatgctacccatctgcatccgtgccacaagtctgttatacatccaaggaagcaagaaacaattctattctctttgctactactgatgttaacagttctatctgtttgcaaggtggtcgtgatttctgctagttttgtgtgaaatgactgataacggatatgtaaaaagaaagcctttaaaactttgaactgaagtagcatgtttagattatcaaacctgagtaacgagtgtgtacaaaggtaatgtgctgtaactgcagagcacttgaacaataacactgcacaaaacaggagcaataagcaaaaggagaacacaactcatgaaaagttattggcttatgtcaatatcactaccctacgaaaagtcgagggatgacaaagcccactttctccataacgcaggagtcaaaaccataagtacactgcaagaaagtcaatgtggatgtcaactatcttactcttaaatgtataaattctatgtaaatattgtcatgtatgtgttaattaactagttgagaaattgttatacccaaatccagaagaagaaagcaatctcaaatgagttttgaaacagaatgaagtggatcaagatcaggacaaaagcgggtttgtgaaaccagaagtgttcatctgaaggcctgactcttaaagtttcattatcatttgttttctttcttcctgttttctgctgggattcctgatcctcttccttcttctccacaacttcctgagctaagcgggtgattatgtgctctaacttcgtgccgacaagaagcaaaagctgtggtttgaacaaaatatttaacataagaacttttgtgttaattgattttcccttaaggatggtagagctatcataaaaatgtgtaatctagaagaaaactaaaccacttacaatcaatggcaaaaatgataaccaaaagtatgagtgccatcctgcatttaacaattcaagcatgagaaagaaaccttgaaagattttcaatacatgaatgaggtgtgtaattgagaggttaaaagacttgttaccatccatattcattagaagaaagatcacaacgaaaagccataggtaccagctgttgtcagatgatgaaaaaaaaaattacaatcaataaatgttgaaattattttaacaatgataaactaaaataatagttggtttttatcacctaatgccaacaattttcctgaaatcaacttcaagtgttctcaacatgtacttgtggaaattgaaggtaggattgttaggacagtgctccttttttataagaattgtgaagatacatgcagtggacacaaggtagagataagttgttgaaaaatcattattaaataacaaaggaatttatagattgaagcttcttaaccttgatgaatccttggcgtagtgcaatgtagtcagattttgtgactgaaccataaaattgtttgaaaaatgataactgcaaataaaacattaaattaaaaattgtaagcatttgttatctaaattttcctaatcagcttatttctctttctgtcaaaataagcatatagatactcaacaaagtgtgactaggaagtggagtattgctagcttgtatataagaatggtgaattgggaagaaagaacacaagtaatttactcacaatccagctcactattgctactctattccaatatccagatgcattttctaggaactcgcggtgatgcttagcttgcgttttgtcaacatctgttcgaactgcagatgaaatgaatgatatttattaggcaattcacaagtcaaaaactagtttttatatagcttattcttttatatgcagataggtagttagtagagagattcaggtttggtttatatgaattacggttttgagatgccttaatgtctctcctgatggaatcctcccattgcttccaatgacttatctgcatggaatggaatcctcacaattcataacagaaaaggtttatgtagagtatgaagtatgaagtttctctcaaaaagtgttatcatttcattacctttgctcctcctaaaatcattgttgtaacacaaaacaccacatgaactacagctaatacaaagatgaagatgtgtaggtgatgtaatgcttccaatgacaacatttgaacctttccctgaaacaggaaaagaatggatcaattgggataagagagatatttattcagacacttacaacttacaagcattgtgaattataaagataggaatactgaaatctaatatcagtaccttctcacaatgccccaaaccgccttcagacaaaagccggcgtccatgatgactatcttcagatgtaggcctcttgcaaggaagcatgtcgttcgcaacatgggatgggatgcatattttgcttattagattttgaaagacagttaagagaagcgaaatgaagccgagaagcatcagttctgttattcagcaacaagagcgagcttaaacatttcaatcaagcaacggactcaacaagaaatgcagagacaataaaagaaaacttagtccatgtttggcatcataactaaaaaactgtttttgttttaaaaacagaaaattgtttttgaaaataaattggcttgtttggccttgtt

SEQ ID NO: 296388 - DNA, 5523 bp, Cannabis indica
taaattattcatttgaaattaataagatatcttatttcttcttttataaattttgtaaatgtgctagcattactcatgtattaagttgttgcaaagtgttgtacatactaaattttcaatgacaaaataaaacctgatatgcttttccatcacattttatcgtataaagtgaaatagttggaattattgttgctataatttttttgttgtttcgccaactattagcaatgaaaaaagaaagaaagaaaaaagtaacctctaaagacttgtaagattggttgaatttgatttgatgttgtcgccttcatatccaggccaaatattgttgatgcaagtgttcttatccataacactatccacaaacaacacaacacattcttaatggagggaactaacggctagtattggaaaatggctgcagcaattcccactattctctcatctctttctctaccaactcaagaaccaaccaaaaacatctccaatccagctcctggaccaaccagtatagtttccttgttaaaatcttgttctaatatcagagacttcactccacttcatgcacacatgatcaccacaaacctcattcatgatcctatcacggccagccatgtcttacgttttttcctctcaattgaaaatttgtgttatgctcatcgtgtctttagtcacacccaagggccagagaccattatttggaatacccttattcagaattacctcaaaaatgattctccgaaacaagttttctcgacttactctgacatggttactcatggggtggcattagatgtatccacttttcacttcttaattcatgcttgctgtaaaactttggcctttcaaaaaggaattgaggtacatggcagagttctgaagtctgggatgggaaggaataagtcattgaataacaatttgatggctttgtattcaaaatgtggaaagcttgatgaagtccggcaggtgttcaagaaaatgcctcatagagatgtcatcagttggaataccatgatttcatgttatgtacagatgggaatgccagaaaaggctttgaatctgtttcaagatatgcaatttgatggagttgctgccgacaatataaccatgatcagcttactttcagcttgttcgaaactgagagatttggaaactggagagaagctgcacctctatattagagaaatggtttggagattggtggaaatttgttgaactgcctggtgaatatgtatatagaatgtgggagaatggataaagcacatgagattgtgactagaagcaagactggtaatgatgttgctttgtggactagtttggttggagggtatatgaagtccatgaaaatacatgcagctaggtgtgtgtttgaccatataactgagaagaacataatttcatggatgaccatgatttccggttatgtccagggaggtcactacaacgaaagtctacagttattcagagaaatgaggcttcaaaatgtgatggtagatgaagttcttctcgtgacagtactttcggcatgtactcatgtggaagattacaaattaggaaaatctatacaaagcttggcggtgaggtgtgggataatggctgaaggacttcttggaaatgctctgattcacttttatgcaaaatttggtgaaccaaaagaggctcagttgatctttgagcagttgcctaacaaaagtactgcctcctggaactcgatgctggatgcattttgcagaaatggagagctcgaaaatgcaacactcttctttggtaagattccgaacaaggatatcatttcatggaacaccatgatcaactgctcctctaaatacaatcgatctggagaagtgttcaggctcttccaggaaatgcagtgttctgcgactatcaggccggacaagcttactttgatcagcttgctatcatcctgtgccagtgttggagcactgagtcatggcatttggacccatgtctacattcagaagaataatatcaagatagataacatgttgggaactgctttaatagacatgtacggcaaatgtgggtgcattaaaaaagctcaagaattattctctgctttgactgacaaaaatgtatacgtgtggactgccatgatagcagcacattccatggaggggcgaaccagtaaggctatagatctttacatggagatggaagctgcaggaataaagccagatcatatcactttcatagcccttttatctgcttgtagtcacggaggcttagtcaatgaagggctctcatatttcaaccaaatgagtaaatttcacaacattacacctaatgtacagcatttcggttgcatagttgatctcctaagccgagcagggcaactaaatgaggctctgaaatttatcgaaatgatgcctgttaaaccagacatctccatatggagctctttgctgagagcatgtaaaagccatcaaaatgtccacttagcagagtatgcatatcaacagctcatagaattggaccctctaaatgttgcagcttatgttcttctttccaatacttacgcaaaagctggtagatgggatgacgcaagccgtacgagaaagaagcttttcgatttaggagttaagaagacgccgggatgtagtctgatagaagacgagggagttatgcatgaatttacaactgcagatttctcaagcccccactcatcaaaaatctactccttgctggataagatgaaaggcaggtttgaaaaactaggactgcaagaaacatctgctcatcatagcgaaaggttagctgtggcttttggtttaataagcaactctagaacaacccttattcgtgttgtgaataatttgaggatgtgtgaagattgccactcggccatgaaacttttatctcaggccttcaacagagaaattgtcattagggataactatagatttcaccgttttgttaatggaagttgttcttgtaaagactattggtaaatcaaaactgtagatagtattagcagtaagatcatcattgctaaaaataacttgcataaatgcagaaattgaaaaagaacaaagaagtagtatactataatcttttttgttttccttttcatcaaatatgtaatagtacttcttaatacatggtcaggtttacatggtagagcctgtaatagatcaaaagcgtaatattaaaataaaaggtgggaaggccaaaaaactaggcctttttacccttatacagagaaagcaatatagggaaatgataccttaactaacatatgaaatgtctaattaaaaagaaaagaaaaaagagcgtagctgaattcaacccatcacccacaaagaccatgaccatggagctgaaacgtaattagtaaacgcaacaatgtacaaaaacgatcatctatggctgccaaaagatgcacataaacagctcctatatagacagatgatcagtgacgtctatcctttgtttttttcctgtcaattgtttatcaatcagaggcttggaaggctaattaaagaaataaaaagtctttatgaagcatcaatgaggcttgtttcaaaaaagctccttgccaccataatcatatgggttctcagagtttttattattggatttttccaattcctcgtcaatcaaaatctccaatgaacggcattccaaactgcagaacgctttctcacccctgcaggaaagatcatactattaaaagcaaaaccatttatagctttggataaacacacaatagccaagtttaatggatcctaacctgtatatgtagatgtccttgtctgctgccaatttcttcttgcaatggttacaaatgctcaaaaagttatcagatgggaaaggaacagatatcttaggatcttttatgagctcacggagtccaatatccttgttatactctttcataacagagttactcgagtcattagaatgagcttccaaaatgcaatcaccatatatcctagttgtcttggggttgggaccatgtgtgattacacacgtgtaatcctcagaaagctcaatttcactggctgaaagagagccaaactcattgccagaacctatggatccagggattgtactcagctttgagccaggaaataggtttgacttaggacttccttcaacaaactgggaagaaccaactcccttggtaacatctctctccaaacaaaatttcaaagaggtagaattgggcttgttagacttgttcaaggaagggtgattggaaattgtcctacaggaatctagtgaacaagaccgtatttttccaaatgggtcaggctctaaagggctatccccaatttcaaaaagaacattagagctgcccttctggagaggagacttggtttttgaacgatggaaacttggatagtttttaggcagagactttggtgactcgaaataattggtatttgtttgaccatttggggttttgattctcaattttggtccaaaaagaatgttcttactctcagatgaccggataactttaccgggatttttcatatcatcagcaagagaatctacaatgcttaggcctactttatggttagtgcctccccagtttctatgttggccatcttgagacgatttaattgacctaaatgggttacctagacttgaaagcagcctaaaatctagaggagaagttggactcctgactgaatcactatctgctaaaaccttggggcttaaacccacaagcagaccaggaacactataaaaagagttgcttttcatattattccaaatgtcagttttgggaaaggagtcagaaccagaatcagaaactggttgaggacccatttggtgttgatccttctgaattgacctgcttctcttcctcagcattatctcaagaactataacaaacccaaaaaggaaataacctcttcggaaccagagcttgctccctttctgtagcaaaaacacagaaagatttcagttcagtgatcaaacattgactaaaacgaaaggaaagagtagatgaccaaagaaaacaaaacacatttccttaagaccaaaagaagaaacacatgagacatgtataaaacctcttacatgtatcaaagatcaggacgccccatcaagataataaaaatgagatttttgttttcattattactgcattaatgaatggtcaggtaaaacaacactaatactaatgcgtgtatacacacacacacacatatatatatatatatatatcaaaatgcacgcaatacgtatgggaaaatggatatgaatccgggaaagatcatttcaatattattactcataagaaaattgaaggaaaaaaaataaaaaatcgttttgaaaaaacaaaacaaaatgacttgatcatcgggttattcattttttcccccttttaatgaactgttgaaaaagaaacccagatgaaaaaaaaaaataacttgttaaataaagaaaagtttgaagaagcagaggaagataataaataataataataataataataataataataataataataataataataataaacttccaaggtaaagttgaact

SEQ ID NO: 296389 - DNA, 2752 bp, Cannabis indica
gtgtattgaaataactattccacatgtttgggtaccgaaccaaatatgatacacattcatgccaaattttgacataggtgtcctcccactttttttttaaaaaaatcaaaacaaataatatgttggttagcaaatttgaatagtgcgtgcctttagatgagtgttggacctttagatgagtgttgataaaatattcgatccaatttaattggtacaattcaatttaattcaaatttgcaaaaatataaatatccacacctatgtgatttggattgattagaaaatttaaaatctgcacttgtacagattgaatattaattgatatataaaaagtataatcaatctaattcaatccatacatatatttatatatatatattttttaaaattatatatgccattaatattataatgcaaaaaaaagagtaatttaagaatttaatatatatggtataaatatattttaaaacatagactaaatttatattctattattatacatagaaaaaatataatttaaaacaaaatcaatcattatttctttctacatatgctcatatctttttgtagaagccactcaaagggctgctactagtatggtaaatttgctccattcatttgagattacttttagccaagagatcaatgttgagaagtcaaatattttttcagtccaaacacaaatcatactctttgtaataatattttctcaactcttggcatgatggaagctacataagaaagcctttatttaggcttaccaaatattattgggcataatatgaactttatacttggctttctcaaaaataaagttaccaatcggttaaacaattggcatggcaagtttctctctcggacaggtaaggagattctcctcaaaatcattgtttaatcacttccaacttatgccataagtatctttttagtccctaaatagacaagttaatggcccgcttttggtgaaaaacgagttcaagtaaggaaaatggtgttacatggatgtctaaggatcgtatggccactcataaatattcaggaggcatggggttttagcatttgaataagtttaatcttgcgatgcttgttaagtaaggttagcgtcttttatgtaatctcaaatctcttgcaagttgagtctacaaagcacggtacttccctcactctgattacctcaccgctgatctaggtcgtaatccaagcttcatctggtttagtattgagtgctcaagaattagtaaaactcagggctcatcgtactattcgatcaggtacgtccacaagtatcttgaaccatccttggctcacgcacagggctaatctttttgtgacttcttcaaatcatgggctacaaaaccagcatgttttatcgcctatttgccactgatttccgtagctaggatctgtgatactgatctaatacttggaattcctttgagttcgaatgttgaaaatgactgctggtctttgtttggtgagaactacaacaacttctcagtaaaaagtgcatattagctgttgcaagttcaaaaaaatagcacgactaggagtatataattttggtttttgaaaaaatttgtggcaacttaaaattccaccaaaggttaaaaatttcatttggcgagcagtgactgaccgcctctctacatgtctcaattttatcaaaaaacatgtgagtatctcccatctttgttctacctgtcattcttagctaggctaaaaccacttcacatgctcttctcgaatgcccttttgctgttgtttgttggttaagatttggtgcttttagcactaactctccactcacgtttagttcttggatggagaagcttttctcaacaatggctattgaaactatatgcatatattgcaattatagtgtgttgggcttcgtgtggaaagctagaaataaaaaaaagtttggaaatagaattgttcttctgttaacggagttcttgtatcggcaactacaactcttgatcattggagaaatgctcaagataaatcttatcatctttgtttcttggaaacatggatgatcaagctgagctttggactaaactgaacatggatattatcaagatcaatgtcaatgctgccttgtttgagaaggaaaactcatatggctttggggttgtggctcgtgacagtctcggtagacctatacacataaaggtcaagtaccatggaggtctttacccagctgaagtagttgaagccatgggtatcaaagaagctctaagttgaataaaagcagtggaaaggtgtagagatcgatattgatagcatgcttgttgtttaagctattgtcttctgtctttggtttgattattaatgattgtaaagttctatttttctctctactaaacattcatttacgttttgttagacaatctgcaaaccgaaatgcttactatgttgctatcctgctaggtactctcggtatctatctggtcgtagcattcttgggtattagatcccatctaatcttcagattcttttgtattcaaaatgctaatttaacgaagttgctatttcatttcaaaaaaaaaaaaaaatcataacatgtgttactcaatatcttctaaggagttctcctatattttaaaatttgatgttgatggtgtcattaacaaattcgatgtaattgattaaatgtataatatacaaaaaaatatgtctttagtgataatcttttaaccataatatataaaattatgaatgatgatttgtaattaattataatattttt

SEQ ID NO: 296390 - DNA, 6550 bp, Cannabis indica
caaaccaattattgtaaaaaaaaaaaaacacattcatatataagtaaatgtatgtgcccgattttggatctgtatcagttggtttctttttattttttattttttttttggctttttaactattttattcggttttctgggttggttcgtgttcccttcaatttttgggtttgtttgtattaagttttcagttttcttcaagttgatccttctctgttacgacaaagtgtgttctatgaactcactaatagattctttgaatgcatctctcactcactgaagagaagagtgctactgtctccttgccactcacgtcctgtgcacgtacttctggctcgagttcttactgagagaaccgtgtataaactaaattttattgatcagatgccaggccattgaaaggggagatttctagttacatttactaaacacaagggtgatatgttccatatagcttttggatgcgaaggggatataattcgggtgttgaataaggaaccatggtccttttaaaatcacttaattgtattgtactcaccaaatgctctacaaaatgtctccaaggaagatttagtttatactcctttctgggctcaaatctacagactgccttttcttagcaagtctgcagtccttgctgaagctttacgaaatataataggtgaatttttggaagtttatgaagactcaactactgagggttggcgaccctttctgcgtattcgtttaaagatcgatacttccaaaccactttttcgagggagaatgatccgtttgccaaatattcgtgatgacttttgggttgattttcactatgagcgcctacctgaattacgctttgaatgtggccgatttgggcatccttttgagcattgtatttcctttttggaacgtatggacaatggtaatgatgatgatgtgcaatatggttcatggatgaagggtgccaaactccccaacaatgcatatgatcgttacaggaacgattttttaacgggaaatgcatggccttcgctaactaggctttcacgtaaatctctcacatccaccttgccaaagttacataatcgtggtcagccacaaccctctgtcctttttgctgctgaaatatctaatccacaacttctctcaaccaattatggttataattccttcagtatatcatcaacccacatcatggaacctcttcaacctcctcatcgagtaacaaacaaccataatatcaggccatcccatccaactccacccactatccaccaaccagaaactcattttccacaaacaacaagcactatgatgacaatttgtcctctgcatatgtaccaaatttgaagtcccaataccagaacttttttgctacatatccaccacaaaactagtctgcatcctgataccaacaacacccacaaccacgtcaccatttccccgtccttgccacttatgacctcaacctcccctataatatcaacacatcatctgccaatatcctctacatcccacaccagtagttttgcacaagaaaatattaacccaaatgctgcttccaagagacaaaatgacagtattactatgtgcaaatttctgaaacgatgccgaggaccttttggtgaagccacttcttctttgtcagtagaagatggttcaaaacactttgtttctgctgataatgtagatctggtttgttctcatgactcttcagtggtggttggttcccaaccccgccaatcgccatgaaaattttaagttggaatgcacggggtttggggaacccaagtgtgttcaggcatctgaagttgcttgtcaagcaatacttaccccatgtattgtttcttatggaaacaaaacttactaataactcagttacttgctttagacagatacttaatttttttcatggcctggaagtccctcgtgttggtttaaaaggtggtttgatgctgttatagaaagatgatatagatggcagtgttcttagctatggtcctgcctatattgactgattcatggttgctgatactagtacatccttccatttttctggtttttatggggcactagaggttcatatcagattagattcttggctcctcttaaaacacttggcagatgtctccccatctctaccttggttagctatcggggattttatgagatcttatccaatgacaataagttaggggacctttgcggaatgaatcacaaatgtcagcttttagatcaacacttgatcattgttttctgcaagaattaccgtttgagggtgaactttcacatggaataagaatagaacgagtgcacatacagttaaggaaagattagattggtgttttgtcaatcaacaatggctgcaagttcttaacacaccagaaattcatcacttggactattataactccgaccaccgtgttatttccaccaccattaccccagttctgaattcagcttagcatgaaagaagacgaactagattttgctttgaaaagctctggctttctgacttagagagcaaggaaataatttcacaatattgggatatatctcctattggtaacctaatttctggtgtgcttaatagcttggacaatgatgcaaaatctatacaaaagtgccatatagggaaatatggtaaaatgaagtcaacaatttcagatgctcaatcaaaggtagaagatctccataactcagttccttgcacagccaaccaagctgctgctattaaacattcagaagtaattttggacgatcttcttcaacacgaggaaatttattgccagcagcgatcgagagtggattggctgtcatttaggtgattgaaacacaaagtttttccatgccaaagccttgcaagatgttcaaacaacaaaataaagttcttatgtactgatactggtgaaaaaatgacttcgaaatctgatttagctgccattattgatgattattttgctcagattttcacagcctcttcaattgatgaagcagctcttaattctacaatcaataccattcctactaccattacttcagatatgaacatgattctcttgttgccattttctacatctgaagctatgggaccagataagagcctagttttatcaatagaattgggctatcgctggggatttggtcactagagttgttttgggagttcttaatgatggtattaatcttacagagctgaatagaactattatcactctaattccaaaaattaaggaactaaaacaaatgagtgattaccgtccaataagcctttgtaatgtgatctcgtagctaatttctaaagtcttagtttcaaggtttaaacatgtatggcatgctgtcatttcagagacgcaaactgctttcctttcaaatcgtctcattcaagattacattttggtagcttttgagttggtcaatgggattaaatcaagagttagtgatcggaacgggaatgttgcgatgaaattaaatatgagcaaggtttttgatcgggttgaatggcgttttctagaagcagtaatgaggaaaatgggatttgatgaacattggatttctcttgtcatgggtttcctaaccactaccagcttcactttttagttgaatggggaattatctgcttctctacttccaactaatgggtcttagacaaggttgtcctctctatctgtaattgtttctcatatgttcagaagggttatcgaggctgcttcaaaatgaagagagaataggtttatcacacgacttctctctcacccgtcatggccctccaacctcgcatccactctttgtggatgacagtttgcttttctgtcgtgtaaacgagccctcttatctcgcaataaaaaaggtgttggatatttatcatcgagctttggaacaagttctcaatccaaataaatgtgtaatgtctttttcccctgccactactttggcggcgcaaattttctttcatagacatcttttgatgccaattatcgagtgccatgagaagtattagggtttaccttcatacactggtagaaataaaaagtagcttttagtggtgtaaaagagaagatttggcgattaatgaacaattggaatgagaaaatttttttggcaggtggaaaggaagtacttttaaaagcagcggtgcaatccatcccaacttatgttatgagttattttcggcttccaatcaccttttacaagcaacttgaatcattaatggccaatttctggtggggttcaaatgctaaggattcgaaaaatacattagcaaaattggaatttgctttgtaaaacaaaagaaagtggcggtatgggattccgctcttttgagcattttaaccaagctttactagctaagaaagcttggcgaattttgcaaacgcccaactctttacttagcaggttgctgaaagcttgttatttttcgacaaatagcttccttgatgcccaactaggacacactccttctttgacttggcaaggattattatggggtcgagatttattacaacttattttgcgctggaaggttggtgaacgtagataaattaggtgtgggtttgatccttggattcctggctgcaattcctttcacccaattctttatactactgatggtgttgtggcatgcttaattatagatgaatgtcagtggaacttggaactactaaatcaattttcccctttggatgtggaacgaattatgaccctgcctttgagttctttcccaagtgaagattcactaatttggcattatgatgaatctagggtatatacagtcaaaacaggataccacttggctgcttctcttgatgaaatgattcacctttttccctcatctttatcagacacacggtggtcatttctgtggtctttaaaacttcctccaaaggtaaaattttttacttggtgtgttgttcgtgatgccctccttgtagcgaaaaatctagttcagaggaaagttataaatgactcaacttgttctatttgtaaacgagcttgggaatcggtgggtcatgctatgttcgaatatatgaatgcactgtttggcgatcaaacggaaaggtttttgattggtcccatgctaattccatgaaataaggtaattatcttctgcacttatctaaaatttatgacaaaccagtcttcgaactgattatttgcacaatgtggtttatttggtctgaacgcaatactgttgttcatggtggaaatgcacgaacaacctcagttcttgctgctgctaattacctgtataactatcgccaagtgcagcaaacgtataacatagctaatcaagttcctaaagagggtactcagtcaattgtttctctaattatatggtagcctcttgcattagatgagttgaaactcaatttcgatgctgctgttgatagtagcagaattaaaataggtgtttgcacccttgttcgtaatgcccatggtgatgtgctagctgccatgtagaagcctattgttggtaattttaaatctcatgaaatggaagctacaatgatatttcatagtttaaattgggttcatccaattagagttaccaatttctatagtggaaactgatgctctagtggtctccaatgctttaatgaaacattgttttgctatctctatctttaaagatttaattgttgatgtttctagtcttttgtcctttctccctagagttgctattgtgcatgtcaatcagaatgaaaattttgctgctcatgttttggctaagtatgctttagggttggaagaagctagttgttggtcgaagaattttcctccccaattatactatgttattgtaaatgaactcttttaatttatgataatgggtattttctctacaaaaaaaaaaaaaaaacaaaacaaaacaaaacaaattattgtcacatttttttttttttgtagaatgggcatttatagcaaagatactcaatgtttaaagtttgtagcattttactaataaaattttatttttgactgaaaaatactcaaagttactcaaatgtagcatttgaatatccaaattgtttttgaaacgaaaatataccccacattgttaaaaatgttgcacttttactactccaataaataatatacaatagcctaaaaagtgtctgcaagggtttctagtgtgggattatttttaataatttaatatatgtgggcttataaattaagataatttatttgaactaatattttaaattaagttaaataagtgatctaaataaatgagtccaataaatattttatttggtatggactttattatgtgtaatactcaatagtaaatctaattaggattgatgtaactctaattagttttctatataaaaaatataagggtttggtccccaagactaatctcaaccactatttgttcccatcaattgagtgagaacctatagagagaagattagtctgtagaaagtgatatatataagaatattttattttgagaaatatatttttatttaaggaaataaataaataattgattttgtgataaatgaatattttatattcattgaatttggacaaaatcaattacgtaatattctatata

SEQ ID NO: 296391 - DNA, 2777 bp, Cannabis indica
agccatgcagtagcgataagagcgaagaagctaaatctgttaccgtcaaatctaacggcgccgttatcatcagcagtctgatctgcgacgtcatcatcgtctggtgccggagcgtcggcatcggcatcgtcgtcaggtgacggcgccgccttcttgcctttcttcttagaagatttaggtgcgtcagctgccttttccggtgccggagctggagctggagtctctgctttctcgtgcttgaaaagctccttaggcattaataccttatcgatagtgtagatcactactggttgttcgtcgatgagtgtgccggtgattttggccgtgacgagcttcgttttgagagtcacttgctctccgtcgttctggactgtgaaatcgaacttgctagctccgtctgtagcgagagtgttcatgagtccgttgtttgatttcaacatcgacatggattggtaaacaggtactccgtggtactctaacaacgaattcttccctgatttggttagattcttgaatttaggcaaaaaagctttgaacgcatcatccaaaggacaaaacacagttaaaccaccagcgagggcatcttcgtaaatttccatagcgtcgttagcaagtaaagcatcagagaaagctttacagccgtgagccgacataatgccggtaatattaatctcagccggagctggagtcggcgccgcagccgcagccgaaggcaaaacaccgctgatctgaatcaccgatatattgtaaggaatttcctcaacagatttcacaaaatgcgcagcaaaagctccgttgttatcttcaggagcgaatccaacctttccaccgtgtagatctgtaatattaacgaatccagtagatccaggagcggaaccggtagcttgaaacatagtagcagcaagagcagtaccgttagtgatctggtgaagcttcttggcaccgaaataatcgagaagaacatgaatggagagaatattcttcacagtatagatattcggatgcttcgagagaatatcgcccatggcggcgttatcaacggcgcagacagtaatcgtcgtccgctggttgatttctgaggcgagatgagttagggttaggtaatggttgaatgaagaaaactccggatgcttagcgagaatcttcgtgatgttgtgagcatcgacaccggtgccggagaagatgaagaagacggccatagctaggaccagtgtcccggcggttaaggccggacggagctgcattgtgtctgagaatttagagagagaaagtgaaaggagtttttagagagagaaagagagaggagtgagaagtgagagagaaaaggtgtttatatataggtgagtttcagtgaaagagagagtgagaagaagaagaagaacaaatatgaggaatttacataaaggggcttgaattttgagaaaattacggttcgagccattttttttgttccgctttgtgggtcccaattttctcgctctttgctttggtcttttgtattttttttttcttttcttaaattttgggtcttaatgtcggagaagctaaagaaaagaatgctataaatgaattaattaaataaattttaaacattttatcacattaatatttctcttttaagtttaattttattacattcacatttgtttttttttttaatttgtatatttagtttaactctttaataaaaataaaaatttaatcacttagaccaattaaaaattatcatgtggttattaatttaataattaaaatttaattattattattattatcaaaaattaaatataagtatttatttataaccaacagttaaatttaaatatttacgctacaaattatatttttttttaaatattttactttattttatttaaggtaaataaaatttctattattaggtgtattagactcaaacataattcattacatgaagatattgttttcaggttaactaaaacatttataataattaggaaaataaattctaacaatatcttctgcaacatatggtttggcaaaacatgtccttcggttagacgatgagctatcctggttcgaggaggtgtctccgctgattgtggattgctgttttgtttaatcatgtgtgattatgatcaccgcgtaaaaaaaaaattaaaacaaaaaaaccataattattcaaactagattcaaaaaaaaaaataaacaatgacaaactaggctcatttggaaaatgaaaataaaagaatcataaagtatgaatttatttattaattataaatattttctcaagaaaatatatgataattagtgtagtttattttatcattagcaaataaattacacaaaattaagaaaaagtaataaatttatttagccttccctaaatttttaaaaatatgtaatgttaagaaaaatgtgaatataaatgttaaaaaaaattaagaagtagccaaaagaagcatcatgaccaatattttcatttcaattatttcttttttgggtaaaattcatgatcaatatttatatatctatatattttattcaatatacttttggagtaacttttccttgcaataattaatgtgaacatcttaactttttggttaattgtaattatagtgctaaaccacaagtaagttacctagtataatggcaaggatatgtaccttattctataaagaagttattttgaggggaaaaagtaaaagggaaaaaaacaaaaaaatacaaaaaaggaaaaaaaattcaaaaaatactttgagccggcccattaaacatttatacagtccaca

SEQ ID NO: 296392 - DNA, 7552 bp, Cannabis indica
gctcaaataagacagacatatataactaatagtctaattttaacaaaagaacaactcaattttgaaaaaggcagactcacattttgaattcggaccaaagccaggtctaaacacatacactagagcgaccaactaaaactcatgtacgtcggggtctcatcaaatccgaaaaaatgttctcaggaaagataacagagcacggattggatgttcctttgaaactggatttcccttccttcagtttactacaaaagcttcctttagctgataaataatcagaagatgccattgtcattacacgccaaacccgtacaactccatcttcaccgccacttgcaagaaactgaccatctggactaaacttcatcgaacaaatgaagccctcatgagcacggatttcttgtccaatgacaggggccgtgaactctaagcacatcttcttgttatgaatcaccttcagctttgatgctttagtagtttgcattactgattttgaggcatcacacgccactctactgactcttcccttgctcttatttacaaaacgcttccaccaactcttcacttttttggtatcatcattaagagtatgacattctacatgaacttcagcttctttaggtggagactctacagctaaaactatactatgatcttctttttggtgtagcacattagacaaagaatttgcttcaccactctcttcccctctacaacaatccaaagtttcctcaatgtgactaacagaaaacatagaaccacgagaaacagttccaccacactcaactagtctgtccctcgccattatcttagatgagctatcgacctcaatttccacctctcgagaactattacttttagaagtaaattcagctaaacccatctgtgttagaaagattttccttctttcctcaacactactcggctcactaaaccaaatttcatactccaagttactactactcaactcttcctgagccacgcttgactcttcagatgacaaaaactcctgcgagtcgaagaacatatcattttctccttcataagagctcagcatgtcttgatcttaagctaagtattacacatcaaaaaccaattctgctaacactctttccagtcaatctcaaagaataatagttgaaagttgaaaccctttgtagtcaccaaagccacaactcacggaccgagttttgctccctgattatgcaaaaataaaggggaccaaagccaagtaagccaactaaatttcaaaataaaatataagagaacgggtaagtactaggaaccaactaccaaactaaagagacaaccaatgacaacgtattattacacgttcaaaaggctctattatagatcccaatacttaaatatcaaagaaagggaaaaataaaaatcaagtcacacccaaaagaaccggatatgctagaataatcaaatgtaggaaacagagaccaaagctacaaggttcgaagagtgtacctcgagctaaatgccaaagcaagagctaatatacaataatatcaccgacccaccaaaatttgtggcaaatgttaatgcaatacgtagaaagaccagtttcacactttgcttgctcaaatagtcaaatattaaaatatggccaagctctgttcaagtactttgtactgaacccaatacaggtaatgagagagggtgaccagtttataagagaaaatggcggaagaaggaaaggagagagtttttgatagaggccaaacaaaggtgtggaggagtatggacttagactctgcaacaggtgtcggctgcgggataagacgagagcctcgagatctgggttttggtgtttgagttgagaattggtttttaatttaaagtgcacgagcgacaaatacgattacaaacggcggggctcgagaaacaagaagctagtactgtgctccatcaaccaaccaaaccactccaataagaagtctttttctttctcactgccttttctcgttttgttgtttcatcaaacacttggcaatttctgtataaacaaaataattgaaccaataattttagaggcaattgatgatgctactggttctttactgaaaatccagtatcttaaatgaatatcaaataaaaggagttttcagaaaatttttaataaacatctcagtgaggtttgagttcataatctcatattatgcaaaaataaaaatgtcaaatttctaacctaaaaaaaagcctatttcaaatttctgttaagagcaactattggtattaatcaatataacgtaacaggtctaagaatttaatacaggacattaatcagtgcagttggtttccttcctctgtaacttaaaagcaaagctcaactagtgaaactttccaaaagcattaatggcgaatcacaaaacataaaaaagaaaatgaaccatacaggtacactacacaggctgctgcatgaagaactgtgatgctcctacgagtagctacagccatgcccctagtcttccctactattataaacacagctagagagagagagagctgatcctaatacccactagagaaagtgatttctcataacgctagctaagacttaaaaccgacaggtatctacgactcactacacggtacaccagcttgcattgcattgggtttcctgtccaaacaacaaacaaaccctctttctctctctctcaacaaagatcaacttctcatgtgtcagtttcttgggctttgtgtagcttgctttctatgttttgtgccatcaaattagatgggctataatggtaataggtagttggtacttggctgatgagtttgttcttttattttattaaatagttaaattaaataattaaatagcgtttggcttgaactttcttttttaattctgaattttgttctaaacgacaaaattcgaatttagaaaagagaagtccgaaaactattttctctactctcaatttgaatttgcttctggttcagttaattaggatgagtcggaaaaaagggcattatttctcattttggtaaatgggcttcagctattatatggtgaagtttttgtttaaaattaagtttatgaatcaggaagcaaaaaaagaaacctcacgtgaacacttacatttattattatttcttatgctttgaaggctctctaatccaagagtttgtgttttcattttcatctcatattaaactaagcatctatttatactttacttaataaaagtaaaaaacaaaatggactactcgttatgaaatatgatcatcatttcatcagtagattaagataccaccctgatcatcttgatgagcacatttttttttttttacaaacagagaaaaaaacatacaaaaatgcaaaatagagataaatatatgtaaatctttatctcagtcactgtgttctactctaaaagattctaaaaggcttatctttggtgggatcaaagacccttttctgaagacagagcagaagatgagttgtacaggaccataacaggatcacacagaagcgtgtgcttctgtgtttgatggacactgtcggataaaccaagctcttttcttacaataaggtaattaaaaaaacaagtgaaaatgagtgatgggattacatggtccaacaggtattttctatcaactgggcaccctctcagttggatccttactgagacatttttctattcgttttggaaggttccaaaacgcagtgtcgctttcaagcgcatggagaggggactacgatatataatgggttgttcggccaatagccaatggccatgggccatagccactactactactacaaaaatgacccctaattgtaaaccattttgatttgatttaacattatttgggccgggaaacatctgtctttgtctccagattgtgacaccaaaatcccattgttgctttttcttatccttcctaatattgttttgagctttttcttatccttcctaatattgttttgagcgagtggtgtcttgcctagcaccatctcgacatatcgcattgcgatttgctagcgatactccctaaaagctattatattaaattatatgaaactcggtacttaattgaaccaatagcgatattaatacgtaagagggtgtttggcactactgatacccctttaacatttttctattgttttcgttcttccctttaacatttctctattgttttcgttcttcttttattagtttgtattattttggttgaacccaatcaaactttttaaatatattaatttcttatgagattgtaatcattaatcatcaataaacttcttttgattaagtgacagagttttaagtggagtagcttatttgtcaggtttatagttttttttttttttagataagttttgtttggatcatttcggggtggttcaagttttggttccttaattattattttaatgtttaattttctgttatattcaaactaatcatcgatgatctttctttctattgtgacgactaacttattgtatataaatatatataaaaagtacaattgttttcccgaaaaaatatagatatgtatttctaagttgaccaaaacactttatattaattctttctataacagtatttttgtctaaaaaaatgtctctttcctataagaacatacacgcaaattatgaattgttaatttctcttacgctacgttaatttaattttctggttaatgatgatagtaataaagaaaaggaaattatgtaaatactaaataatacgggtagcaatttatgatgttgtgtcaaattcgtgtttgtcttatatagattgacatgtttaattgatcaatactaacctcactcatcatgttctcgtgttgatttattgtgtttctatgtcgactattagtatattatacaatcgatattaatcaagagataattggtaatacatatttaatttttatatattttgaattatattaatattttttactcaataatatactaataaaataaaaatatcaagttgcaaataaataatattaattaattaaaataaattattacaatttatcaatacaataaattaaattcttaatatctagtataaattatctaccttatattattgtaagcaatttttttctaatgtatataaatttttaaaataaataataatttaactataaataataatttaataaataataatttaactataaattaataattttaataatatattaaatataaatggctcaattcgtatcaatttcgtgtcacatgcgttaactactctaacccaactcaaataataatcgtgtcattcggattcaacccaatttcgatcaacgtctaatttttataaccctaacctgcaataatttgtatcaagctcgtgtcgtgttgtattgtcatgacttgaattgtcacccctactaaatagtacaaaccgattgagtaggtcgtatgtgctagatcaaacgagataataaacataacaataaatgatagtgaatgtgaatttgttattgatcattaaagcaatttctttaaatactatacaagtattgttgataaatacagttagctaaaacaaaggatacagttgtataataacaaaattaagctaactaataactaaccaaatacctaaccgtcttaatttctaacaacccctcaaactgagttgggataatgagaccaagctcagtttgtcttgaagaagagtgaatcaagcattagagaggggtttggtaaggatgtttgctatttgatcttgtgcaagaatatgcttgacatgtaattgcttattaaggatccattcacgcacaaaataaaggtcccagttcgttgtgtttggtcctagaatgtagaagtgggttgttgtgtaaggccaagttctccaagaaaagactaaatccatactagctcaacctgtagcattagccaagctcctatacttagcctctgtactagattggtaaacaatctttttttttcctttaagccataggagatgatgtttaaaccaagataaatacaaaaccctgatgttgagcggctatcatcagaattgcatgcccaattagtatcacaaaatcctagttgaagagtaggacaaggtttatataagcagatcatgatccaatgtccctttgagatacctaagtatcttttgaacaaccttccagtgtggttctaaatgtttctacataaactgagctgccaggatataaaatttctggcttggtgatcactgcatactgtaacgcaccaacaacacttctataatggtgaggattaggcaggggatcaccattatgggttgaaaatttctctctaccagtcataggagagattattagcacattccattttatctttacagtgaagatcaagaatgtactttctttaagataaatacaatccctcttttgaatgatgtacctcaattcccgaaaattaatttataagaccaaggtctttgagagcaaatgtagcgtgaaatataaaaataagactagatatagatactagagaactccttataacaagtatgtcatcaacataaacaagtacaaaaagagtgcaagtgaaagtatgttataaaaagaaagattgatcaactttggcacacacaaaatcaaaggactatagatctttactcaacttgtcaaaccatgcccttggggcttatctcaggccatacaaggctttatttaatctacatactaactttggtgatgtagaatccataaaacctagtggttgtaacataaatacttcttcatgaaaatcctcatttataaaggcattattgacatctaattgtctaattctccatccctttgaaataacaattgtaaggacaatatggatggttataggtttgactattgcactaaaagtctcagtaaaatcaaatccatattgttggagatagcccttttgtaattaacctttctttatatgtgaaaatggagccatcaatattgagtttaagcttgtaaattttcatcctattgattttctccaaggaggcaatggaaccaagatccaggttttattctttatgaaggctatgatctcattattcatagcattgtcccattgaggagagtttagggcttctccaagagtgagaggttcttgaaaagtgattaaaacctttgttttataagcaccaactttgtccttagtaaccatagggtgatcgttaactggtggaggagggatggtgatattttggggtggaggaggaatgatggtaggggaacttgattttttgtagacattaggtaagttggaagatgaacattaatggtacgtttactatacagtaatcagaatcggaataaattaatggagaaatgtaaaggaataaatgaaaaataatcggaatcaatatttgtaatatgttgtttactaaaattttttagaaatggaatagttgtgatttatcttgtttactttattaggaaacgtaatcggaatgtttaaattgactaaattgccattttgagttaaactatattatatggtagttattttgcaagacatattttaaaggacaaaattgtcattatatatttaatattaaaa

SEQ ID NO: 296393 - DNA, 5750 bp, Cannabis indica
caaaggaaagggtgatctcttaacaaaagccaaaacatttgcaaagaatgatacagaaagcttctatgagattgtttgcactgaggctgacatcattgcaaatgaacagagtgaattgataacagtcatggatcagatgattacttctcagaggcacaagagtgttagtggtgagattctatctgctagaaaaattctcgacatgcacctttcctttaaacccaccaagtactactgggaagaggaattggtgcctgatgttatgcagcattcagaagacttgatttctaaaaacaaggtatcaatagaatcactggttcacttttggaatttttggaaagacaagattgttggcattttcgaattccttagatgtcttgagacccaagaagttaatgagtttagaaattatggagagttctgtttgaatttcttaggtgtttggagggagtttgataatttgaaaccggtatatttttttcttaaccctgaggccgattgggcaagaaatgtggctaaaagaccaaacagtggaaagttggtatccattgatttacaccagtttgtttctgctgctcagagatattggtgttctgagattctttctgttggtgtcaaggttttggacagactccaagctctttgtaactttacaatcgagaattgtgatgtaactttctgcaaaagcaggacccttactctaatttacgaggttggaacatttcttctggatgcgaaaattctgaagctgggtcatcacgagtctgagaatctgttgaagtgcattagattttctactgaaagcatggttcgttacattttccctgaatggccgaaaccatcgagcaaaaacatagttttactcagaagaacagacactactaagagtatgttgaatagagaagctgacagtctaagtaataaacccacccacggacaagttggaagaattgccatgattatttttggatctgggaaggtgaataaagaactctgtaagaagattttaacaatattgaaccgcgatgaaatgtggaaaccatggaaggtattctttgaagttctaggcaatgttaggggatcagattttccagacaaccctgtatctcccaacaatggagaaaaatcaacacaagatcgccctgcgaacgcatctgagataggagtttgggagatgtgtcttgtttgtaggttcaaagaagctttagaaagtacttacaataccaattggaggatagctgactacatatctcccaattgtttcttgtatctccttgagtaccttctgatttggttgtcttcctccaatggatattttttatccgctaaatctatgtttgttgaatttcttatgttctatgagaagtttgccagcctcattcaatcgtcttcttataaagtcaatccgaaacccatacttgcattcttatgcaatgtagtgcaaggattgctcaacaataagatggatacacttcagtggatcgaaatttcaccacagcagcgatggagcactactctggcttgttactagacttgttgtgctgacatgtttgatttgtgtcaactttggctggggtattgatttactgtcaatttgttgaagattacctcataactgaacgtctaccaccctcatttcgtgctgccctcaagcgagtaaagagaaacaacagccaaactttcaatgtgaatttgatcgctgaagctcttaagaacatcaacaatcctatggtgatcgtgaatttacaaggacattgcccgttcaaatcatgtccagatgctatgtatgtaagtatgagttccaatccctccaataatgaaatattaagaatgttgtttccggataaagttaaggtttcaatgagctcggttggagttggatctgatggtaaggatgaggtgctgtcgtcgtccaaggcttgtcaagctagtattgcttcagcaccaagtagcagtcaagattctgagagcgaaaacaaggaaagtaacaagtccaagtcttccgaggatgaggtgctgtcgttgtcaaaggcttctgaggacgaggctctgtcatccaaggcttctcaagctactattgctgcaacagaagtagaagtaccaccggcaccagcagctactgaagcagcaccaagtagcagtaaaaatgtggaaagcaaaaaacagggaggtaacaagtccaagagaaacaagaagaaaccaaaaggaaagaagaaataggctaagtaagtatccaatgcacttgtagttccaaattcttatgatgaagctctattgtactacataccttattgtgaatactgttgtggaacattttttcttttgttagaagttgtgttctaaaggctcttgttatatttgaaaattggtataattaatttggtgtcagtatattatataaataatgtttatttattgataacattaagtactaaacgtcatcttattaacttgccatattaataagtaatttgaatgctatttttgtaattgacatttgacaataaaaataattatgttgaatagatctccttataagctcaagtataacaaaacaggaatttgggctaatatgtttcaatacagattctctgccaagcctcttactagaaatcggttgcaactgaaaaccataaaagcagttacaatagatttcaaaaaatgactgcaacaagaaaattttgctcaaccagaatttggaccaagttttattcttgtgtgatacatcatagtagaaagaagtagagagaaaagctcttgagttgtattcatacacagaaagaaaaaggaaaagagttagttagctagagagaaatcaagacagattatcaatcgtgttgtgatttgaaatttggtgcaagttttgtaaaacctgtttggattaatgaagatcaagcactttgaggtagcttgacggagacgtagcccattttttctgaggtgaattccgagatcaaattatgaggttttcttctcttgtgcactgtttgtttttcctctcaaactctaaccctaatttctattgtgtataagtttttgtgttcttggtactgtgtttgtgatttctgtgtgtgtttgatttgagagatttaagacaatctctcaaatcttggaaccctagtttttctctcatttgacagagacaaagtctcgaggtgtttctcaaatcttcaggctaagagatcaatctgttttgctagggtttgcctcgtgtgagagggttttggtggtttttaattataccaagtgttgtggatgcataacacatttttgaaaaaatatcatataatccttttgtgtactaatttttttatcttggagttagaagctacaaattctaatagtggtatcagagccagttattccacaagaattcaagatacgcattaatacaattaacaagcaagattagaagaaatcaatattcaagaacaagaagcaattgatcctcaagattaagaggaggttaaccctcaagcacaagaaagattggattaggaagatggccttgatcttgatgatctggtggatgtgccactgagtgatcaaccataaatctctaaacctatccctgatttgaattctgacaaatttaatattagtattaaaattgacattgataaatttaatggttcaagtacttacaaaatatgaaggagaaaaattagatctctgttagcacagcacaagctgctaagagtgctggaagaacctattgaatggccaacaggaagaatacctaaaagctacaacttgaatcataatcttcgatctaagtgatgaaatcattagattaatggataaagaagagagacaaacaaagatttggagaaaactggaagagcaattataacagaagtccctaactaataagatttttctcaagtagagaatctttgggcttaagatgaatagatccaagaatcttgaatagaacgtagatgaatttctaaggatgcatattgagttggctaattctggagagaatgaatctttaagtgatgaaaaccaggcaatcacgatcttaaattctttgtcagattcttacaaagaagctaaaataacaatttaagtatggaaggacttccataactttggatgacgttatttctgccctaaagtttatggattcggaattgaggaattacaagttgggaagttctaatggagagctaaacctgtgcagaggaaggcctcatcaaaagaagccatggaataacaggaaaagatgtcacaacagaggccttaacagaggtggaaaataaggaaaaggcaagtctcaatctaggggacacaaggatcctaatggatgttttcactgtggaaagccaatgcattttaggagagaatgttattactagaaaagaaataacaagagcaagcctgatgtcaagacaatgatgctaatcagggagaaaattacttctaaaagtagaaagaaaaacaacaagaagctaatttaagtgataattatgaaagtggagaagtttacattgctagcactaaattcaagaatgaatggattcttgatttaggttgtactttttacatgactaatgataaatctttacttactgatttcaaggaatctaaaggaggaaaggtcatcctagaaaacaatcaaacatgtcacattgaaggctcatgcactgttagcttcaaaatgtttgatggagtggtacagtctttgactagggtaagacttgtacctaatttagctagtaacttaatttttattagtgttctagataacattggtgttgtgagtaagattgaaacaaatactatgaaattaagcaagggtttcataccataatgaaaggctacaaagaaggaggtctgtactatctaagaggggaaccaatttttaattgccacaacacaatagtaaattcacctgaagactctaaagaaaccttatggcacaaaaggttaggacacattagtgaaagagttttgcaactaatgagtgaacaaaatattttatgtaaagataaagtaagtgaagttaatttttgtgagcataatattatgggtaggcatcatagacttaaatttaaggttgggacacataaatcaaaagatatacttgaatatattcattctgacttatgggatcctgaaaaggttcctacacatgaaggatgtagatattttctatctatagttgatgactactctaggaaggtttgggttttttttgttaaaatataaaaatgatgccttttctaagtttcaggatggaaaactttgatggaaaatttgagtatcaagaggatcaagactctaaggacaaataatggcctagagttttacaatgatatgtttgacacatattgcagaagagtaggcattcaaagatagaaaaattaggctaactccacaatagaatggtgttgcaaagagaatgaacataacaatcctaaaaaaagcaagatgtatggattttaggctggattaaccactggtttctagggagaggcaatgcttacagtgacatacttgaacaacatatgtccatcaagtgttgtggaatttaaaaacccggaagaaaggtagtctggtaaaccacgagacttgtctcatttgaaggtttttgaatgtgcagcatatgcacattaaagcattgataaggtttcaaacgtgctttgtcctcactcgcacgcttcctgggaaaacttcccaagatgtcacccatcctgaaattaccccaagtcaagcacgcttaactatggagttctttcatgatg

SEQ ID NO: 296394 - DNA, 2311 bp, Cannabis indica
caattttcaatcaatgttaaagccattcgatcggataatgaaaaagaactcaaccttcaatctttttacacatccaagggaatacttcattaccactcatgtgtggaacgaccacaacaaaattctgtggtagaacgaaaacaccaacacattctaaatgttgctcgtgcacttggattccaatccaatttaccattgtcttattggtcgttcttagtacaaactaccacatacctcattaataggacaccgtcaaagttatttaaaggactcacttcatatgaagtcctccatactacggctcctaactatgagcatctaagaagttttggttgtttagcctatggctcaacccttctctctaaaagaaacaaatttacaccacgcagtagggcttctattttcattggttatccccaaggcatgaaagcctacatgcttatggacattgaaacaaaacaagtatacatttcaagagacgtggtcttttatgaacaaattttttctttattttccaccacttctccatcacaaatggatgacatatttcctcaaactgtacttcccacagttaaacaaatacaacaacaacattccaaaatggctgctccttctccccagcagcccacaaataatattgcacccgtcacagatagctgcaccaacaacccaccaaagccacctgctggtttctcacaccagcaacaaccacagcaagttgcaccagcctctgatggctgcacaagcaacaactcaacacaacctgctggtttctcactccaacaacaatcacagcaagttgcaacagcctcagatggctgcaccagtaacaaatctgctggtttctcacaccagcaacaaccacagcaagttgccacagcctcggatggctgcaccagcaatatcctcttcccgctgcacccctcaaaactggatgaaccagtaaacaaccagcatacttacaagattttgtatgccatactcaatcaacttctcacccgattgaacctttcttatcatacattaaactccaccctccttttcgagctacggttcttgcagcatattcccattgtgaacctaaaaaccatgctgaagcttccctctttaaacattggattgaagctatggacaatgaaactcaagccttagaaaaaacaaaacttggatcatcaccaagcttcctcctggacaaaaggctattggatgtaaatgggtttataaagtcaaatatgatgaaaatagaaatgttgttaggttcaaagctcgccttgttgccagaggttttaaccaatggcaaggcattgatttctcccaaacttatgcacccgttgccaagttcaataccttaaaaattttcttggctcttgctgcaatgcataattggcatgttcaccaattagatattaacaatgcatttctccacggagatcttcatgaagaagtctatatgaccataccccctggttacaaggccccacctggctcggtttgcaaactcaaaaagagcatatatggcctcaaacaagcttcacggcagtggtactctaagctcagcaccactctcattcaatatgaatttcaacaatccaaatccgataactcattattcattaaacacacctctacaggtttcttagcaattcgcatctatgtggatgacataattgttgcaagtaacaacacatctgacatagcaacttttacagattccctggacaaaaaatttaaactcaaaaacttgggaaaacttcgttttttcctcagccttgaaattggtcgaactaaggggggcatttcactctcccaaagaccctttactttacaactacttactgatacagggtctcttggtactaaactagcttctactcctatggaaatcaatgtgaaactcagcaaagacaaaggatccacattgactgacccaactgcctaccgtagcctcattggtaaactcatttacctcactatcacacgaccggacatcacttacgcagttaatcatatcagtcagttccttacttgtccacgagtccctcatctacatgctgctcatagagttttacaatatctcaaaaaaactccaggccaagggctttttttcccttccaatagtacccccaacatcactgcctacgccgaaacaagtctttccccagccaatgtacaactttcctctttgctgatgccgactggggtagttttcaagacacaaggcgttcggtctcagggtattgtatcttccttgggcgttcccttattccctggaaatcaaaaaagcaacacgttgtctctcgttcgtctgctg

SEQ ID NO: 296395 - DNA, 2048 bp, Cannabis indica
caaacaacgaaacgtttcaaagaagccatttcatggctatgtgggccaatacccagctgtgcctttgtacgaaagcatgggaatcgacgatgccaatattcgtcaaaatgttgaagcttggactactgttttatggcccaataatggaaacccaactttttggtacgtacgaaaatttttaattttactacaataattattataaatcttattatatatatatatgtatatgtaattaatttgaatatgtacagtgaaactattcatgcttattctgaacaattatctgagttggatggaataataagaaggatgattttggagagtttgggagttgagaaatatttggaggaacacatgaactccaccaactaccttcttcgagtgatgaaatataaggggcctcaaaccaatgagaccaagttgggtttgaatgctcacacagataaaaacattgtcactattttgaatcagaaccaagttgaggggttagaggtccaaaccaaagatggtcgaggtttactgtcaaaccttcttcttcaaactctttcatcgtcatgatcggagattctcttaacgtgagttcttactttatatataaaatgtacgtcactatatatatataagaaaaaaaaatgtagtttttgttagccacagcttttgtaattagtgcatgattaaattggtaaatgtaattaattaattaatgtgatattttgttacataggcatgggcaaacggtagattacattctgcaaatcacagagtaatgatgacaggaaatgaggcaaggtactcaacgggattgttttcgataccaaaggcaggttacataatcaaagccccagaagagcttgtggatgaagaccatcctttgttgttcaaaccctttgaccatgtcaaattccttgacttttactatacccaggctggtcaaacagccccatctgctctccactcttattgtggactctgatccagaatcatccctacaatataattataatttatgtatgtaccgtcgttttgttttgtcttaaataattatcttctccatgacatgtacttttttatgttgatctcaatgataaaatatatattatgtttgtgaaacatgtatggcatatagtattaaaatattaccaataaatttcttggtataaaaagcatttaattactagctgggccgggattcgacttgggctaatgaagagtttttaaacatgggccgtcttctacaaaaaaataaaaaacataacgccgttgccggggatcgaacccgggtcacccgcgtgacaggcgggaatacttaccactatactacaacgacttatgttttctgtttagagagatcatttattaaattcaacaatagatatagtaagaataattctggaaaattttatatgaataaataataataatgtgaattgatgatgatgatgtggatggattttgtgatgtttcatcattatatagctttgctatgtactctattccatatatagtgaagtagtgataaaggaaagagacataatagaatccatgaaatcaacaataataattgacaatagagaaataataaaagggaagatcgatcgaggggtttaccgaaacaaaaaactctccttcaccatatatatataaatatataaaattgtatggccttagtcatagcccacttgttattgggtaaactaaaatagtggtgtccaattcatgaaaaggatccatgtgaacatgtctaatatttctaattaataatattctgtttcataactctcatcaaatcactgatcaaccaaaacccccatggtccatatccatattggcctagtgaaaaagtttgtgtactataaataaaatcttattatgtcaacacatttgtcaaataatctcacaccatatatattttccattttagttgtactgtatctaacatgatctattagggctcgtttggaacgctgtattaggtcgtattgtattgtattgtattatattgaattgtattttatgcaatatttttatgtaaaactatatgtggt

SEQ ID NO: 296396 - DNA, 3772 bp, Cannabis indica
ttcttttatttactatgtaatgtaaatgtaaaagtatctctttgttttataattttaattaattttatattcaaattatttttaaataggtagttaactacccctcaaatcatttaaatttagtattatctatctaatgtatatgattggttaaaagtttttcccacaaatgaaaaaagtgtgtaggtagtacacatgtcattactttaatttcttctccaaaatgggtgtggctcatttttccttttcatttgatggaataattttcaaaagattattcttgttctttcagcttatgattaagttgttgactatatcgcatacacacatatataattcatagtttagttgttttactaaagttatttattcacaagtctggtaatttgtattggtgtctgatgtgtttactgggtttcttccaattttattcaggccacgtggtagaagtacctctaacagtgaccgtattcacataagacctggcgacgatttaaggccattcaatgtaagagattgggatgctgaaaactctacaagtttatcaactgaccgttccccatctactaatctgagctcccaaactgtaaggctgcaaatcttgcgagaacagaacgagaagccacacggtcttacgcaagaggctttgtctagtttgcaactggagcttttcagtgggaaggagacagatgctgatgcggcggcggtttctagtgcaccacaggattgcagcatatgcctagagagtttcatccaggatgatcagcttatatgtttgccttgtgatcatagatttcatgctgggtgcttggatccctgggttcggattcgtggtgactgtccttactgtcgaagggctatccttgtaaagaaaagaacagtaaagtctttatagtcttaaggcgaggcaggttttttctttgctatgaaaattgtgtgtctcgcttactgtcattgtctaccttctgttgtcaaattttactgctttgaatacaagtctttcactatcgttttcttttcctttcaattcagaatttaaaggtttgttctatatttcagatgcacaaattaattccctttctatttctttcttgaaaagaactcttaatgaacaaatcggtaagacttggaaaatgagatctagatctattacatgtgctcaatttgtcggtatggttagattaataagacagccgattattgcttcgaaactcttgagcatatctctttctcctagagcattcttacgaggtactatagtacttagcaccacgatgaagtattatcttataaatagttagcgattttttataatatttattaaagtaaaataaataggattcgatattaagttgcactaatagtaatattatatctcacaagggtgctaggcatcatgggtactcgaggcaccatgatacctaacactatgatgaagtgtcgacctataattgattagcgattttctataatatttattaaagtaaaataagtgagaaccgatattaaattgcacgaatagtaatattacatctcacaaggatgctaatcatgagtgctctttagtatttctctttctccaagagcattgctatgaggcatcatgatgtctaacactacaataaagtatcaccttataattagttagcaattttctataatatttattaaaataaaataagcccgattttttttttttgaataaataagtccgacattaaattataccaataagaatattatatctcacaaaagtatttaacaccacttctttaacatctctctttctccaaacatgagagttgtttttatattgacaaaatcaaaatccaatgttgcctgcattaattgatggtatggaattttggataaactatatttagtccatacaatcttgaaagtcgaaactttaatctactacgttttctaattaatatatttggtttgtggttggtctttggttcatgtcatcatcacaaacttgtattcggctcaacaaaggaccactaagtaatattaatataattgaattatgaacaaaagtcgatctctactctctgagtctctaactattttttatatattatattattatatgagacccagtcgacaaaataatatggactatggtatcagacaagtcctagaaatgcattatttaaatgagtcttactcttctcttgtcgtttatattcctaacaccattacagaatagatgtattatatcattcagacaaatatttgtgtttcaaatttttaatgatataatagaaacatttcaccacttttgtaattaatatttttgaagaataaaatacaccaaaaatatcgattgtaccatttttgttatggaataatgctctcaaatcacaatgtagccaagggtatattttgtcttggaatcaactcaatagtatgttgtttacttaatacaatcttttattcattcattcggcaaaagtcttataaaggatttggccaatcaagcctaacaacatgactaatacaagaaagaataacaccaattcacatagcactaattttgttactcaaaatataattagctaaaagatgacccacaatattgatctcacgataatcctataacataatcatccattaataactttcgagttttctttacaataccatccatcaacatcatgaaatgagaaagtttgtgttgtattcccactggagcccatatttttattgatatcagttcagctctattatccattacatttttatagaattctctccctatatattttaactaaaaaaattgtatatagatagaatggttagagtttctttaactaaactaataataagccaatgaaaatcacggctgaaaccaaatattctatctgtacactaaagacaataattttgggaaaatgattgtaaggtttaagaaagaaagaaaagaaaaatgatgttacgttacaaaaatgaaatgtgtagagaaatgagattgatattagatagtaacaagaggaagaaattgcattgggaagagggagcattccattgtctcattggtcatatttgttttgtactatattcttttcgtggaagttacctattagtttctatgaatttggaaaccctcaaattttagaccacattcaaagcaaaacccaccaaaagtccaatattcttttcttctcttctcttacaatactagggtaatacttaatagtatgactatgagtcctacttttattttcacccttacaaatttaagtattaagagaaattatagttcaattttttttttattactgtgtacattataattataaaaaatatctcacttataaaaaatatctcacttattttttaaaaaatttaaataatttataataccgaaataaaattcaaaattaccaattgtttacatattttatgtttttggctcgtaaattattcgaaaaacatgtagaattttaggtagtaataaaaatcatatatccatactgttgttggaggaatttagacaacaccaagataaataatataataaagatatgaacagaaaatgtgcgattactcgaccgagaatgacgagtatttaagcaataaacacacaaacgtactgaaaataaaaagaacacaaaggaatatagtggtttagtcagatcacggtctgcttagtccactattgcaaggatttcctgttttgtccatttcatattggatcacctcatttatatacaaagcaagtgtcttttgattacacaaagattgaattcattatcaatccgtt

SEQ ID NO: 296397 - DNA, 3060 bp, Cannabis indica
attaaggaattttgtctaatttcattcaattttactatttcagttattgtttatgtactaaatcatgctccctaaactttaatatctactaaatcatgcccctcgaaatttgacatatactaaatcatgtccctgaactttcatccatgttagatttttttattaaaattggacaaaagtctttaaatccaacaatctcaatagttcaagggacaaaaatcctaattagcctaaataaaaactttttatttagaagatgtattatagaaatatcctatactaaattatcatttttagaccaaaaataactacattaaaaacattcaaaaattctacaatacatcctaacgatgcatatctatctatttcggcatctgaaaaatattttaacttaatatttcataatcgtatacgttaagacatttttttaaaattttgagaaattcaaaatttttttaacacattaaaaataaggttcaaactttttgttacacacgtggctcttttactttatacgcgtgtaaaataaattgtttgaacattacttttaatattgtaaattatttaaaattttttaaaattttacaggatgtcttcaataattataacatacaattactaattttttttaatactaaaataaataaaaatgtatcggtgcatttattttaaaatagtagtgtaaaagcacccaaaaatattaatccatatctcaatcattttcacctccataaagagaatattacttggagattcctataaaataaaacttattaaacccctggtggtggtagcaaattatacacaataaaagtttctcataattacaaaatgtaaaataatgagaagagaagagaagagaagagactagttttaataataaaatatctatgaggtgcatgtttaaacatgtggcaggcaaacaagaagtttggctcaaattaattaagtcctcttatctcatcactcaaaaaaaatcagccaaacaaaaagaaaatatagattacatgtttcttcgacgaaattgattagttgatgataatgatgatgatgatgatgatgttgtaattttagttgaagttgtatttgattgattactaagtttgacaacaaagctgatgatcatagtggtgtgtgggggtacccatttaggaacaaaattaagtgcttttccttctcatgaaacaccaaacctcttaacgtggaaaaattttactttgtaaaagcacccaatttccaaaaaagaaagctaataatccattactaaaacatactactatttattaaagagttaaaagattgatatgagataaccattgatgacttatatagctaaaacgacactaattttgagtaccctttttcctatttcgtcactaagcactgcccactcaactttcaaatgccttaatattatgtctgtgtgttgtttgtgtgtttgcttgtgtgaattgtgtgttcgtttgtgcctgccttacgctttattatgcattcaaaacgttttgtcgtttcatattctttactgtaacgtttatcagagaagaataatgtagttttgttggtgacactcacaaaatgcacttctttttatgggtttttggacaaagcaaaagttaacagttgagataataaggtggtaaaagttacgtgattcaaaggagtttttccctgaaaggaaaagggtctaaggtatcttcattaatcaaacttaaaagagattactttcgttctaaagtaaagggattggtttggtttggtcttgtctggtcctcttttagggaccaaatatataaatctttgaaatgatgtgaagtgatcatgatttgattcaaagtttgtatatggtaatatcagtaaactatggcattttatggctctaagtttgagattttgttttggtctacctggaacagattctgtcacctacgtgtcaagaagatgccaagtggcaatgacgtggcacatgataaagaggaggtgcagtacatatcatatcaatctctgctgcagaatagtatgtgagagtaaaattaatatataaatttggttattcatgaacattgtattattttttaatgtcgacataaagtttatgaaccatgacacattgacacaccatctatatataatagagatccgtccaaactagtattctaaagtggggtttaacttttacatttgtgagaagaaaaaaaattaataatgcaaagcaatgttggagagtagaatttatttagtgacatatctagtgtaccaatattgtaaagagctgagctatataaagaaaactctgtttgacgtgtttgttagataatctcagagaaaaccaagagtggaaatttgtactggtgatgatgatggatactaattaagatagtactgtcgtttgctggtggacattttgcctcagatgacagcataaagatcagattataatcttactttggttacttcaattttcatattcttcttcttcttcttctcatggctggagggaagcaagggaaagggaaaggaggactcagctgttcatgcattctacttataggtaagtaactatggttctttgatatcattttttgctttaaaaagcttcccaagattaatggaggggaccatgtcaaccttgttttgagttgtactaaaaactaacatgtgtttgtttaacaacagttattgctggaatggagagatttgcattcaaaggagtggcatcaaatttagtgacatatctaacagatgttgtaaacatgagtaattctgctgcagccaaaactgtgaatagttggtgtggtttcacatccatgttgccactcttgtttgcaccttttgctgactcttatttgcataggtatacaaccatattggcttcttcattcctctatgttgcggtaagtgaaccatttgagttttaactctgtctcattaaaggccaattcattgtccttatagtcaaccaatatggtcaaaagcttttattttctaataaatttgtacttcttttggctctagggctagtggcattgacacatctgcttcggtatgggcccggtctgctgc

SEQ ID NO: 296398 - DNA, 5611 bp, Cannabis indica
aagatgagatgatcaacattttcatcatattcatattatatacaattgttcaaaagctataacatcatttaggcttgttcataatcttaaagacacaaaacaacttcagtttcaagaagaaaacttgaatgagctacctaccctatagtatacaatgaatgagctactttattattattacttcacaccagcttcacttgatcttccccatgacacttattgaggtaaacactcctcgttcttttttcaacagcttcatttatacatacgtattctcttactgcatcgaaatttgattaacaattagttttaacattcaaggaacatgaaaaaatagagagattgaaatcaagttctaggattgtaagtttgataagtaccagacgataattttatcgatccatgctagctagaagtccaaagtattggtgaatacaagtgaagtcacgtgacggactttgtagaaatcctctcctccttcttcaaccttctttttgaattgcctaagcatgtgtttgatcacaatttccttgagtgtaacaacaaatctcaggccatccggaactgtcctcaaccttaagcagtttacaatatgcaagcgacgaagactgggcaaggcaccttcctccaccttccactctatgaaatcgtaaagataacaaatggatagagactcgagtcgaggaaaacctttactggtgcaattcattttctgtccgaggaaggcattgtgatcgaggaggagaatccttaaatgcgggagcttttctaatgttgacattggatcatccttgagacaagttcgaagcagcgttagcttgatgagatttgaagaaaactgattttcttctggtaacttcaccattgaaacttgcagatgcagtttatgaagttgaggacagctcagtagaagaagtattatctcatggtgggagaattcaactcctcgtcttattgtaccgtactcttcactctcgatgatgatgtcatcataacaaatggataaagatctaagattgataaatttaattcttgtgccccggaagcaagaccccaaatttatttttaatttggtaagattggttagtttctccaaatcattcaagtaatgataattaaccgaaacattcaccaatgtttgcaaattggttagattacccaaccgcaaaatattctcattgtgagtaactgtaaacttgcttctctcagcttctgtcaaatacttttgaggcagatacaaatgtctcaactgctccaatttccagaggacaggtggtaattttgaagattgaagttgtttgtcgatatacaggtttttaactctcaaatctaaaatttgcagacatctcaaattgcctacagatgatggaaatatttccacataactatccttgagactaaatagccttaagtggataagattcccaatttctttaggcaactttccaacatgaccgtgagtataattctcaaacttcaaaactctcagcaaatggaattgattgaacgggggcttcatcacttgctcataggatgtatctggttctgaattgaagcatataagagacctaagacaaccatccttatgtcttattaaagaaaccaattcatcaacactggtgttgttcaagtagatcgcaagtctacgaaccttattaattggctctaaatttgttgcagctccaacagaggaagaggaaaaatttgttacctcgtgatgattgcgtaaatcagcatgctgcaaaaaaccttcctcctcagcctttactaagcataaatcccgcataagatcatgaatacgacatgttttaattgtgccagttgagctccactctgctacttgaattatgcacctttcaaccaattcacttaagcactcatatgctctctcctccttcgatacgaagccttctgccaaccatactaggcacaaatctctagcccttatttcaaaatcttccggaaaataagctaaatgcaaaaaacatggctttaaatagtatggtagctcgtcgtaacttaaacccaacacccaagagacaccaaagttagagtcttcttgctcatttatttttcctttccttatacatgtcttaatattcttatgcaatgtctcccactcatctgcagttggtttacgagatagaagtcctccgagcactgtaatggctaatggcaaaccaccacaatattcaagcatctcctctgataactttttcttcctcttgtaatcctctgaatctgcaaagcataaacacaatgcaggaaacagaaatagttagtacttagttgagctgctgctgtatacttgatttgtatacgagtatacagaaccaatcaaatttgttattcttttaatctttctaaggtagttgcaaaattatattcattaaattttgatattagctcaatgtaaatgtaagattacaataaggctgagttttattcttgatatgttctactattgtattgttatccaagcttgaatcaatcacacaccaaaaacaatccaaaaaatagttttgagaacaaagaactatcaaaacaaaacaatcacacaaccaagaacaagaactgtaaatcactctcaacctctttattgctttgtaaaaggaatgttataagactaaatgaaactaagactaatatacctatgtgtagaagataggctcggatcggaactaataaagaaaataaccaacgttcataacaaataactaccaatcctagcaaacaagtaatcaactaactaactacattaactgtcaataactaagaaatatgtattcaggatataattttagtttaaaatagttttccacttcacatgtactcatgaacacaacacacagataaatctcctcaaagtttaagctttcattgttaaactttaactttaatattatacacatacactaagaagatagcaaaagaaacagaagttgagagacatattactaaccgatatcatctgttccaaaatgagttttcatcataaacaactcccaagtttcatttttgttaaagcacctgggttcatgaagaatgctatttcgatctgcatggaaagcgacctctctattacgagtggtaagcattattttactgtctgatccaacattagggaaagcaagcttgaggcaatcccatgtcgaagaactccaaatatcatcaagaacaacaagacaccttttttcagtacaaactttgaacaaagccttagcgatttcatcgtctttcatttctttaatctctcttctcctttcagatgcaggagatgtcaacctaatcaaaatcccttcccaaacatccctaggttgacatttttgagatacagaagcccaagcaaaacaatcaaaataaggcctaatttcaccatgatagtaaacctgtctagcaagagtagtttttccaagaccacccataccgcaaatcgacacaacactatgcaaatttctcccttttttcttcaaatgctcaaccaattcattaatattttcttcaaacccaacaaaatcagaatcaatattatgagaaaaagttcgcctaaattctaacctagttgaaaaattagtagcagcttcatcatttcccctagattgaaccaacccataagattgaaaactcaatcttgacttagaaaccctagctgaaatcttctcaattctcgatccaaccttgtgaaattcgatgaaattaccacaagagaacattctactactactactactgctactaccactattactaaccctagaagattctttcaatacaaaattggtgataacatcttccaaatcataagcatactcaccgatttcagctacatgaagacgaagagacttgtctccgtgtctggcgcgagcatcggcatcttcgagaaagcatttgattcgttggagctcagattttgcatcctcaacttggtctcggattccgtacaagaaattagattcgtttatgagtaagtctccgagtcttccgatcacgaaactgactatggcttccgccatttttggatgagattggaatttttgttgttgcagaagaagaaagtttcatgatgaagaagaagacgaagacttgaagataagagtcaactaactaattttaaaagtcaaatgtcaacaataactgtctgcggttaaaacggttacgtttacgtgttactcgaactaaacgatgtcgttaggtataatattagaatgagatattagcgtcagaattacctaaactcttaattacttacacttaactatataactaattttcttgcggtaaatccttccaaaactcacttctaaatgatacagtatatgatacaaatttttagtaagtgatattagccgtaaaactatctgaactttacgattagtgacatttaatcacataaattgattttttggtggtcaatcatccgaacgtcatttttgttaattatttatctctcctgtctaaaagattctattaaatgttatggtggacatgccacaatgtatacacgtaataaatttttagtggtctacattattttcattgattaattattttaagataattgttatgtattctagctactcctaaaattggccttgtacgtttatttacaaattatatttaataacaattcaaaataattgactaaattaaaactagttatattaaaaagtagtttcatgggtgctagatgtattgctttttcgtttggtattattctacaaaaacataaaaacaacaaaaaaaattacaaatatacagtttcacggaattttaaatatttttatgatttttttgatttgatttacagaaaatacggtctttttatgttgcaatcttgttaatttgttgttgattttttattatctgtaagttatcttttgttgttattttcatgttacttttatgtagttttcttgttaattgtatgttgttttcgtgttattttttgggaaactgtaaaaatatataaaaaaaacattctttaaacgtaaaaatgtaattattttacaaaaaaaatagtgtattatataattattcattttcctttttgagtggaaaaaacaaaatataagtaagaataaaacgaaaagaagagtagaaatttagcaattatcttatgataaagatttttatacattttgtgtaaaaaatatgatttttttttttcaaaaaggttatgtatgagaaaagtgaagaaaaaagttaaaggggagttatatttacaccccataaaaattataaatacaccccattattaaaaaaaaaaatataaacttaaataatttttaaaaattactcttaatacttttttaaaaatttttcctcacattattttatgttaattttaatacttattttgatttcattttcataattttttctaactcgtgtatatttttttaaaaaaaaaaatttcatataattttttattgtaatttttttgtcataatttttaaaatataatttaattttgtttgataggtatattttttaagaatataaattgaaagaaaaaagttaaaaatacttagtacaattaaagatataaattttatataaaataaaaattattaaaatggggtgtacttagaaatttttgaagtgtaaataa

SEQ ID NO: 296399 - DNA, 1010 bp, Cannabis indica
tgctagggttttcaaagtggaggttgggttgtgtgtgtttgagtgtttgaatgctaaaaagggaatatatatatatatatgtttgaggcaatttagggtttctaaataatatagaaacgacttgtagtacatgaaataggggctgccgtttgtggggtttaaaattaggggtcaaacttgtgcttggactaaggattaaaggttaggtttgaccttgtatttgatttgtttcctttgttgtggtgtatgttaatttaggaataaattcctacagtggaattcagacagcagctttccaaagaggagtttgaggaggtaattaaagttctttgggccatttgggagaataggaacaggcagtggaatcatatgcctgttatgaatggggctcggttgattgattcagtgtttaatagctacccaaattctactagatgtagggtgaaagatagcaagcaaactcctattcctgctactgaccatgggcgctggttggcccccccaagcgtttgtgttcactgcgatgctgctcttaaaccgggaaaggagggcgttgggctgggatttatttggaggaactggtctggaaatataatctcagcaggtatgatctttcttccaaacatttgttcggtggtcctttctgaagcaaaggccattgttgcagcgctgaaggcttgcccgatcggtggaagccggttttttgagatcaggtgtgattgcaaggtgctggtggacggttttaaggagaaaggcagtcagcttagtgatgttagccttgtcattaacaagatcaaaagacaccagttgttccccttttgtacaaagctcactcttgtaaaaagaaacaataatgagatagcacatagattagctaagagaagcttagagaataacttaactcaatccttttacaattcttttcctgagtggttggtcgattttcgtaaagctgatctctctcattctttgtagtgttttggggctttgttaataaagatgttcttttt

SEQ ID NO: 296400 - DNA, 9108 bp, Cannabis indica
tagagaaggaggcgcaggatagttatcatgcacctcctggctcttattgaggaaatgtttcacttcttcttagttctttcttaccctcacacaccactctcattcttcttttcttcttctttctctctctagaaaactacagagattgatcaaaaactcgtaccggagagagaaacccccaaaacgaaaaaacaccgtagtaatgaagcaaagctcaacttctgcggaggcggtctcatcgtcttcttcatcggagcccattccgtcggaccactcacaacctgccacgtcatcgtcttcatcggagaaaaccccgtcgatctcagcggctgcggaggacttggctgtggctgcgagagacggaggaggagctcaggagacagtgagtgtcgatcttcgcggggaatactcggcagtttgtcgatggacggtccataatttcccaaaaatcaaggctaagccattgcacagcaagtacttcgaggttggagggtatgattgtcgactgttggtataccctaagggagactctcaggctttacctgggtacatctctatttatcttcaaatcatggaccctcggggtacatcgtcctccaaatgggactgcttcgcgagctaccgcttggccatcgtcaaccttgttgacgattcaaagaccattcatcgggattcctggcaccgattctcaagtaagaagaaatcccatggttggtgcgattttacgccatcttctactgtcttcgattccaagttgggttatttgtttaatagcgattccgttttgataaccgctgatattttgatattgaatgaatccgttaacttctcacgggacaataatgaaacgctatcatcttcggcttcgtcaatgaaaatgatgtcgtcgccggttgttgctgggccggtttctgatgttgtcaacggaaagttcacttggaaagtccacaactttagttatttaaggaaatgattaagacccaaaagataatgagccctgttttccctgctggggagtgtaatttgaggattagtgtctatcagagctcagtgaatggagtggagtacttgtccatgtgtttggagagcaaggacacagagaagacggtcctattgtctgataggagttgttggtgtttgtttcgcatgtcggttctaaatcagaaacccggctcgaaccacatgcacagggactcttacgggcggttcgctgctgataataagagtggggataataccagtttgggttggaatgattatatgaagatgtcagattttgttgggctggattcggggtttctggttgacgatactgctgtgtttagcacatcctttcacgtaatcaaagagttcagtaacttttccaagagtggagccttgactggagggaggagtggtaatggggcaaggaaatcagatggtcacatgggaaaattcacttggcggattgaaaatttcacaaggctgaaggatcttttgaaaaagaggaagataacaggtctttgcatcaaaagcaggaggtttcagataggaaatcgagattgtcgtcttattgtttatcctcgaggtatgcttgattattgctctggaaattttctataatgtttgtctcgtcttatatgtttagctattgaccacgctagctttcttagttgtatccttcacatgcttttgaagctctgcgattgtcattcttatacagataattgaggacttgtactgtctatgttgttgttatggaattgcggtgttaactcagcttcttctgttatcgtttcacttgaactttttttagctaaattctagtggcctgcccgtcatggtctgatttaaaagatctcgtatatgattgatgatatcaaggtattgtaaaccgggttattatttgtcatcattaataattggtatgcttgattgaaacttgctcaatttgaacagaacatagtgtgtttatgttgaaattctttgtttgcccaaggtgacttttcctcatttaatcataaataggtatactccaattgcttaagtggtcttcagatagtgttttgatgaaagtttttgtatgtttgctggtatcagggcagtctcaaccaccatgccacctttcagtgtttcttgaggttacagattcacggaatacttccagtgattggagttgttttgtgagccatcgtttagcagttgtgaaccagaggatggaagataaatctgtcactaaagagtctcagaatcgctattccaaagctgcgaaggattggggttggcgtgagtttgtgacacttacaagtctcttcgatcaagattctgggttccttgtccaagacactgttgttttctctgctgaggtccttatattaaaagagacttcagtaatgcaggattttactgatcatgattgtgattcagtaaatggaagttcccaagttgatggacctgggaagaagagctcatttacatggaaggtggaaaacttcctggctttcaaggaaataatggagactcgaaaaatctttagtaaattttttcaagctggtggctgtgagcttcgaattggtaggctaacattcttttcttttttcttcttttggaaggtggttgttgttttcacattgtttacgctgacttgcttctttccttcatttgtacaggtgtatatgagtcctttgacaccatatgtatctatttggaaagtgatcagtcagttggtagtgatccggataaaaacttctgggtcagatacaggatggcagttgtaaaccagaagaacccgaccaaaactgtgtggaaagagtcttctatatgtacgaagacatggaataattctgtgttgcagttcatgaagcggatgcagggtttctgtgcgtgacacagtggttttgtttgtgaaatcttggactgttgcccttggtttgagttttctgacctagaggtcagtacctgagccttgttcttgaatgtactgtgttattgatttatatttttctttattggtaaattttcataatgtttttgtgactatagcttagatggattttatgcaattttattttttatttatgttctgatcatggtaaattttagcctgtttcctatactgaaggctgaatcattttgagtattaaccctataaagtatgatgttgataattaattgtaacacctaacacctttgtctatttgtatttattattgttttaattatgttaagccatgcattcacttcctttctctggcatgtgttgttgttttcgtctattttctattctaaagctatgagattcttaacaaaggacataatattagtgacatgtactaagattaattttaaagggaattgtctaaagtttttatctttcggtccaaaatttggatcctatgtagtatttgctcatgttcttgtgctgtctcttatcaggtgttggcttcagaggatgatcaagatgctttgacaactgatcccgatgaacttgtcgactccgaagacagtgaaggaataagtggtgatgaagaagatatttttagaaacttgctctctagagctggtttccatcttacatatggagagaattcttcccagccacaggtcactttacgagaaaagctattaatggatgctggtgcaattgctggttttctgactggacttcgcgtgtatcttgatgaccctgccaaagtgaaacggttgcttcttccaactaagctctctactagtaatgatggaaagaagcttacgaagactgatgaatcttcgccgagtttgatgaatttactaatgggagtcaaagtgctgcagcaggcaattattgatttacttttggatataatggtcgagtgttgtcaacctacagaaggaagttctagcgctgattcttctgatgcaaacttgaaaaattctccagatggaagtggggcttctagtcctcttgaatccgacagagaaaatggtggcacagaatctgcccaatatcctatccatgagagattagagtctggtgttgatgaaacaagcagtgcttctgctgtacaaagttctgatgtgaatgagattcatgtacttgggaaagctcttcccggacagcctatttctccacccgaaacatctgctgcagtttctgaaaatgtgtctcttcgggcaaaggtaaagtgtatttgttttatttaatgaaacctgtttaattggtgtatgctgtatactgatgcttgaaccaattgattttccagaccaagtggccagagcaatctgaggagctcttagggttgattgttaattcactaagagctttggatggagctgttccacaaggatgtcctgaaccacgacgaaggcctcagtctgcttcaaaaatttctcttgtgttagatagagctcctaagcatttgcagactgatttagttgctcttgttcctaagttggttgagcattcggaacatccacttgctgcttttgctcttctggaacggcttcagaagccggatgcagagccttccttacggatgcctgtaagctctctaatagtcatgtagtagttgattacatatttgtatttacatgctaattctctttgtttggatgtgcttttgaatacattgcggagaaactgctttgatctgtgtctctttgtttgtgctgtatgtgtgactttgaatttagactatattattccttaaactatgtcaatcttgctcgccaggtttttggtgctctaagtcaactggaatgtgatagtgaagtttgggagcaagttttacttaagtcttttgaactgctggctgattcaaatggtgaacctcttgctgcaaccatagatttcatattcaaagctgcatcacagtgccaacatcttcctgaagcagtatgtatagaacatcttgaaattttattgtatttgcttctcatgttatgaattatattttatagtatcattcattttagttgacattctttgatcttggttgtaggtgagatcaattcgtgttaagctaaaaagtttgggtgtagatgtttctccttgtgtccttgagtttttgagtaaaactgtaaatagttggggcgatgttgctgaaaccatactcagagacattgatgctgatgatgattttggggacagttctttaacaaggcaatgtgggctttccttatttggtgagcatgatgtgcccacttctgagaggttgcatctggtggatgagcaagctttttgtgctagtagttatttttctgatatctatattttgattgagatgttatccatcccttgtttggctgttgaagcgtctcaaacttttgaaagagctgtatctcgaggtgcaattgtggctcatactgtagccatggttttggaaagacgcctttctgagaggttgaatcttaatgccagatttctttctgaaaatcttcagcatgcagaagatgttggggagggagaagctgatgagcagctaacagtccaacaagatgattttacttcagtcctcgggcttgctgagactttggctctctctagtgatgcttctgtgaaaggatttgtaaagatgctatacacaatgctgtttaagtggtatgctgatgagtcttaccgagggaggatactaaagagactggtcgatcgtgccaccagtgctgcagacaatacccgtgaagtagatttagatttggatattttaaatactttggcttgtgaggagcaagatattatcagaccagttttgatcatgatgcgggaggttgctgaacttgcaaatgttgatcgagctgctctttggcaccaattatgtgccagtgaagatgaaatcgttcgcatacaggaagaaaaaaaagctgaaattgctaatctagtaaaagagaaatctattgtatcccaaaagctgagtgaatctgaggccagtaacaatcgtctcaaggtacttaatgttggtagggctagaactatcatgtattgttaattcttcttggagaattcacacctataaattttattgcagtgtgaaatgaaggctgaagtggaccgctttgcccgggaaaggaaggagttttctgaacaaatacaagaagtagagagtcagcttgaatggtttcgttcagagcgagatgatgaacttataaagctgactgccgaaaagaaagtgctccaagatcaccttcatgatgcagacttacaactctcccagttgaagtctcggaaacgggatgaattaaaggtcttgattactttttatcctcggcacccagcttgatgcttttattttttaatttatagctgtatctacagtagttgttgctaaatagtcatttgttttgccattaaaaaggtatcatggctaagtagtcatatcagtacactgaaatttgcataatagtctgatcactcccccaaaaaggattcggttttggaggtttttgctggttggccatctttctgtggatagataatgataatgtagtgcatttgcatgtttctaaggagtgtaatgtgccattaatttggtgggatatgattctaatgcgttgggttcttcagattcttggttttccatttatctatttgatatggaaacttctctagagaaactccttgattttgcaacaatttgttagagtcagaaagtgtctcacactaatattaattgtcactgaacaacttacctatgtcatatgtgcaattatttattgaataataacatgcacacaaaatatgcaccaaaacgttgtaatggattattgagtaatgatgctcttattgatttagatatcttttggttaagagagatcacttagctttaaggatgtttgttaccaaaggtagtgtatttcaacataaagtcaaaataatctcagtggtatctgtgtattgtcaccattctagtattgaatttcttgatgtatatgttctcttgcaatgttctaatctgttaatttatatgatcttcctccttgtatgcatacaacaaaaacatgacatttcattaatgtgttagacccctactaaaagttaatgttttatgtcttgattttgtaacattgcatgcgtttttctaaccagacatgttaaatgtcacagaaagtggtaaaggagaaaaatgctcttgctgaaaggttgaagggtgcggaagctgcacgaaaaagatttgatgaagagctgaaacgatatgcaacagagaatgtaacccgagaggaaatacgaaaatctcttgaggatgaagttcgacgattgacacagacagttggacagactgaaggagaaaagcgggagaaggaagagcaggttgctcgttgtgaagcatatattgatgggatggaatcaaaattgcaggcttgccaggtccctgctcttcttttaattggtctaattatttgttctctacctgatttattaggtcctcatgttgaactttcataaattgttgctttagaccgctgccatacttgtttcacgatcatcttctaacttgcactcgtgatgtttcttattctccttgctctttaaatggtactttattgatgccttcattttttctgcagcaatacattcacacacttgaggcttctctgcaagaggaaatgtctcgccatgctccgctgtatggtgctggactagaggctctatcgatgaaggagttggagactctatcacgcattcatgaagaggggctaaggcagatccgcacccttcaacagcgcaatggcagtcctggcggaagtgctcatgtgaatccccactctctcccacacaatctataccctgcaacacctccccaagttgctgttggattgccacctaacctcattccgaatggtgttgggatccatagcaacgggcatggtgcagttggaccctggttcaaccatacatgaattctgaaagcagagctttgttaatgctggtacgggcattcgttcacccaatatatattttttctaccaatcttttttatcactcagttatttcttggcattttgactgatagtactattggaacacatgtgggagaaaggataaatggaaggatgaatggggtagggttatatatttagtttgtgcgaggaagcaagtccattagaactaacagttgcaaatgccttgctgatatttgaaattttctgttcctttgcaaagtcaattataggcttattgaaaagttttgttaaatgccagtctctttcttatggacttgtttatttgtttttctttttatcttttagtttttaaatatatcatgcaaacggtttctttgattgtcgatttaacttctaacctagctaaaggaaagagagggaagtattgcatttatcttccgatgtatgataaccgattatgttctggtttgttcagccatgcttaatgctaccaattaagtatgtttcgggctagtaatttggggtttgtggttcacttcatgtagaagtaagtaaatatacagcttgatagatcaaaataggggtacattgagagaatattgaacataattgggacgatctatttcacgtaagaatttctcaaaatggcattgattatgccttgcaattaacctttattttgtcttcagttaatatattgttcaaatttgagcatcatgagtgggaatgttgaagattcaaatcttatttgatcatcatcgaaacaaatggaagcaaatcaatggatggtagacatagttgtctctctttagcatatatacatgcattgtttttttgttttttttaacgaacatatatgcatgttgttaatgtagctttttgaactattggattttgctattcccatcgaaagaagcatacacatttcgaaattaatacgcagagcagaaaatgtacttttttttgggaatatataatatattgatattgattcgattggtgattacgcacttccttatgtggggttattattttgtttcctattataaagacaatttcagccatccgtaactaattaggtagtaaaaattcataagaaatatgataattatcatagaatttactatatatatattattttattaatattgagaaaaataattgcagctacaaaaattagtaatccgttgtttgaaattacagtagaacctctatctaagaatattctattcaagaataacttctaatttgtta

SEQ ID NO: 296401 - DNA, 3664 bp, Cannabis indica
caaaatataaaagaagtattatttttgtaaaaaaattactttcttattatatatataattattttcttttactatctgtagttttttgttttttttttttttttgtgtaatttttctttttcttttctaaggatggaatgatcaactatgaagagtttgctcacatgatgcggaaagggacggtagattatgaagataaacaaagataaaacattagtgtgttaaatgtgattatggtaattgctctatatagtatatatatcttgccttttttctcatcttttgaataagtttactgcccaagagtttgtggatgttcaatgttgtatgattaatcaagcaaggcctttccaatttgtatgaaattacaaaatatccctttattaagcctttgttagtttgtttgtgggctcttcttggtctatgtgggtatttgggcttttattgaaatttgtcataattgttatgtttttactagaatgggtaattgcaaaatccctattcttttataaatattacacttaactcactatacaacatttttacggaaaaatccccaaacatattttgctgggacgttggataccatctacctacataattatatgatattgtctattttaggcctaaatccttacagttttgtttttggacatctttttaaaaggcctcatacttatggagttggtggaacactttatattcaagggaactcttgcgtatttttccgatgtgagacttgggttgataccccaacaatccatccatcaaaccaaggaccacatacttgtggcctttcaaccttttgtcgtcgttatcaccaatgtaactcactgtctaaccatcaactttgtcaagaagactttcaacaaaagtattaaacaccgatctctatcttgtaccactgtaattatcagcaaaacacgtcggctgatcatcataatatcaggcagacttttgttgacctcacttttagccaacgacagtgagtcaaattaaagcgattaagaatgattaaataataaatatgaataagatttagtaaacaaaaccataattataacggtttggccccttgatgatggtaatagcctactccaatttagtttgtattaacttgtgagataagaaccaaggaatccttgatctccctcgaaagctcttacaatgatctttgagttttacactcttgaatctatttttatttcttataatttctctcgtgtgtttttctaaaaattttgtgtccctgaatattgagatgactccactatttatatggatgaattacatcaataagttttccaaaactaataagaaataaaatgagaaaattgtttactttctataattacaacaagcaaaacagaaaacttggcgagttatctttcttccttaatattatgtatctatcccatgaagttagatatcgttgtgtctttcaagcatgaagatatatgggacatctctgaaatatctaacttggattctctcatcggctcatgcaagctgcccacatgttggaagctggtcggatgttctcacgcgctatactcggatgttccagcttctgctgactttgagtatcaaatctcctagtggagtcttctatccaggtcatagaatcgatttcatatgtcacccaagtggatgccacgtcaccctatgtagaaatttgaataatatttgccccccaagtctgcgctggaacttcttggtcgcatgtggacttatttagtcatgaagatgattggatgggtgatgtgtttgggtttttctcttgattcgacgtgactggttgaacgtctctttgatgtcaggagcatttaaggcctagctttgaaagttgtacctcgagtcacataatgaagttgtatgataccgcatgtgtgacgattgtactattcaacgagtactaacgtcctttttcagggggaaaccctaaagttcaaattttgaattactttttagcccttttaaccacctatataagggataaaaattggctttactcttttagccatttttatattgcataacagagcaaaaattttcttttttctctcaaaatttttgaagaaccctttgctggaaattcaattactagagtcgtccaaacgtactcaagagtttgcgaacagtaagtaagttatcttttcgtatcttttatgaaatttctttcaaatacgtgcattatttttttcaattttttcctctactgtaatattttgggttcttgaatatgttcttgactgatatgagacttaggagatattaaggcttataactttaactgatatccgtacgggtcttttaagcttctaatttcttactattttggctaaaaattatctgagattactcactcacaggcttctgaatatcagcattaatttaaacttctgggtttagggatttcattaatggaatgaaattccttcatttttttcctttgaatcgacctggtcagtatatcagatatgttttaccttctataactccttctagctctcaccttttgtcctccttctttgtatatgaaccctagtgacttttggggaggtaaccattacatcaaacatgatctccttcaacttctctatgtaactcatcctagactctgtgcagactcgtctccatccagtgaaagctcttctacttcaagctttgatgattgggaagttagtagtgatcattcaaaatcttcagaacccatggtgcaacatcatcagtatcccagccagatcagcggagaaggatacggttggttcatctaagaattgaacaagggttggagacattatctccctgtttcgtggacttaaaaggtccgacccggtactactcatacactgctagaaggctgactagctccttcgaccagacataccaccctagatgaagttgtcatcactaaatcgagacacactactgagttgaaaccatcagccaaacataaaaggatggcaaaaataaagcaaacattagggagggcttcgaagtccgacccttattttgcccagctatttgtgatggtgagtgtgaagcaagctgagcctccgaacgaggatgctaaaggtgttactagggacatcaaggtccaagagattgaggaccagggcgaggttcgtcctgacgatccttctgatggagtggaagaggaagaagaggaaaaatgagtttaaattcttccttatggtggatacaacgaggtcagagagcctttctctgaaatgggcaatgtcttaatggagggccaagagtatgaggaggcctgacctttaaccactaaaggaaagaagggtcatcaatgggtctctcctatgtccatacttacttacaagagattgaaaaatctcttcgacaaaggtgtcctcgggggagtagaggatttcttaccctgtctcgggcagttggcaatgaacccaggagaagggttatgtacatggtctgggacccatgccaagcaaggtgcactcttgcccttgcatttgtactctaagaaaaaggctaactactacaagatctgcctgacccaattcactcccaagggcattaagtgtatggccgcaatgttcatgctgtttgccacacagggatggggccagcctttcgctcacgataccaacatgtttttttaacttaaagtcatgtccaaaagaaa

SEQ ID NO: 296402 - DNA, 2805 bp, Cannabis indica
tttgtactattttagaaaatacagggtccattttataatttaacaaaacagagggtccaattgataacttttacaaaacacagggtctaaaatggtatttacccaagttaatttgattagcgcaaaattttttatcgagtaatttgtggcataaatacttaagtttattttcgattgtaaataaatatataagtttaattttttggcgataataatacctaagttatatttctgtaacttgtaagtacatgactgttaaatattaaattattaataaaaatttatttaatacttaatagttagataaattttaaaattaacttaaatattattattatgtaaattaaatttaaatatttatttataattaagagttaaatttaaatatttataaattatgcattattattttagacaaaacccataaacgctaaatgacgaatttcaggtcctttcatagataactgccacgtcattattattattattattgccttacctccatggttgagccaccctccaaaaagtcggcgaggaccaaataatcggcaaagtcagtttgaccaaagttcttattatttgttaaaaaatcatattactatattattattattgggaattgggataatctaattaattaccatttgtagttttgttatctaaaacattatattttatttcacatgtaatattatatagagtattgttacacttgtatatgggtgacgttataaaattagttagcgatacttttaaaaaattattttttatataatattaaaaagatatcaatagtacattttagtttttctctatcatatatagtagttattataacaaaaatttgattactataattctaattaatttatagaattaaaaataaaatgtaaaatcattaattataccacacaactaactgtttatattctattttattgatgataaattatttaaaaattaaacaaaatatttatattacctaccataattataatgtaattaaactactatttattattaaacgcatcagaaatcacatgcttgctcaaatatttttttagcaatatttattatagttataatattatcttataaattttaaaaattttcatatagttacattattaaaaataaaattcttgatatttcaatttaagatgcgcattcgaaaaatttcaaatacattttcaatattgtaaacaattcaaaaaagtttaaaaatttataaaaataatattttaagtataacaaataatgccttcataaaatatttaatatgtattttccaaccaaaaaatggactaaaatatcacaatagtatagtacatcaaagtccaacatcaaaactatgtgtactattaatattaattttaataattatcattaaaacctattaattacaagcaaggtgtgtcaatgtattattaggctccaatagtagctaatattaattactcttgctattattattttttaaattttactgcggtgaattggtgagtaattaatataataataattggtaatgattaataaaacaaagcaataaaaagagcagacagaacaaaaaaacacaaaaagcaaagcgagtagaacgcgttggcctaatgagattgaatcctgacccttcaatttggtctctctttttttatctaccttattattgtacacatgatttgacaatattatttaataaattaatacatatctcaagttgaaattaaaattaattttattaattaataataaaaaaataggtaattattgaagcacgttttgcttgatgcgtgtagtggaaataacgtttttataatatcatgatatttaattatttataatatttattatttttgttaggcacgtgtatgtaccaactttcccatgtgaaaaaccaccaccactcaattttatttttaaattggctaactttttatttcttttttttcaaaattgcccttatacttttctgcatttgcactcatacccttaaaccttatttaaatttataattctaatctaattattctctaattaacatattaatatgcttacaaccttttacaagaaataattattcttaaccaaaaaaaaacaaacaaaaaaacaaaattacaaactttatatacacaaacataatatggggtgtctatttttttatttatttattttttaatgtggagtacttattcttattacgtggcgtacaaatataattaatggatatattttgtcttttactttgaaccattaaaaataaataaaaataaaaaactgaagcatctaatatacaatttaatataaattagttttaatttatacatgttttaataatttagtatagttgagatattagtggtttgcccagctgaacaagagtgtcaaaagtttctatgcactaatcttatatatacaatataaattagaataagaatttgattattggtttttctatacatttattatatgtttaggagaattttttaatgtatttttttctatataattatatatattgtaataattaggtgtaaatttttaaaaatcttatttttggcactgtaaattattctaaattttctaaaaaactttataaatagttttaaatagctacaaccattacaaataatgtgtacttttattaacaatcttttagtcacaatatatattttttgtgactaaatgtgacttttagtcacaataaaaagttacttgtgaccaaaatatgatatttagatacaagttgtcactaatttaattttagttacaattattgtgattaaaaatacatttagtcacaataaa

SEQ ID NO: 296403 - DNA, 1456 bp, Cannabis indica
atttattattaaattgtatgaattattacaattattcaaatatgtattagcattttaaaagttaattgtatcattaattttaaaaattgtagacaaatatccattgatatctttgatatttttatgaatttatagtacctatctttctatatcgatattaagataggttcatatattcaaatttaagttagagatactaaattaaaataaatgttattttattattatatttatttaagttctgttagtttttaatggtttaattaaacttaaatttatcctaactatacaacattacattttattgctctcctacaatattacctttgttttctttcaaacaagccatagatcaagtttcttcaatatttcaaaaccctacaagctatttctttcatcattttctcaagtttttaccgtcattctcaactgcacttcgtggaaatgagaactagttatatcatagcaatcatagcctcggtattaatgataagaattgtgagattctattttaaaatcaattagtgatgagtagagtaacccacattctacttaaaatttttgctcccgaattttgacatgtattaaattatgctcttgaactattgagattgttaaatttaaggacttttatctaacttcgttcaattttactaacacgacgattatccatgtactaaagcgtgctccatgtcttccaaactttgacatatatcaaatcatgttccttgaactttcatttgtgtcaaactttcattacaaaaattgaacaaaaaagttgtttagtccaacaatcttaatagtttaagagaatatttaaacgtctaaaaaatttcaaaagcatgatttgatacatgtcaaattcaaatgtataatcttaattagtcttcttataaatagtttaatatttttttttacatttaatccatataagggcaatataatccaaacaagcattgaaattaaaatgtttcagttactttaatccatgtggggcaatgtctaaaggctctagttgactccaatcgataattgtaaatacatgtgtgtcatgctagtccgacacatattttttgtgtcatatcgtatcgtacttaaacatatattttttcgtatcatattgtgctcatacctcttaaatacgtaccgtgtcaatccactactctcattatgtcattaactatataatgattgtaataaaacaatagtaaaattatcttagaaaaataaaacataattaaaattattattaaagtcttaaacattaataagacttaattttctttttatattggtggaagaggagatttcaacaggagagttgtaaaaaccactcgtatttataagacttattagataatatttaactaaaacacatgccatcatatatatatatatatatatatattataaatattaataattatgtggatgtccaaatcttttatttattacc

SEQ ID NO: 296404 - DNA, 3103 bp, Cannabis indica
ctctctctcttctctctctcaatcatgaggaatatatatatatatttctttttgatgtacaattttgtataaatttatacttcatcttaacagggtgaggcagagtgctcctactatttgaaaacggggcagtgcaaatttgggttaacttgtaaattccatcatcctcaacctgccggcacctcagtgacggcttctgcacctcaattttatccaccggtgcaatctccttcagttcccatgcctgatcaatttggggggccgtccaccagcttgagggtggctaggcctccgttagtacctggttcatatgttcaagggacttatggtcctgttttatttcctcatggagttgttcctttacctgggtggaatccttactcggtatgaagagacttatctgtcctgcaagaaaaataacagtttcttttttgatagatcacaccaaacatagcatttatcatttgccaaaaccctatcatagaattaatcctatccaattactaatagcattcattgacatatttggtgcaggcacctgtaagcccagtgctatctcctggtgctcagcctactgtaggaggagcttctgtgtatggagtaacacatttaccttcttctacagcttctgttgcaagaccttactcctctttaccttcttctattggcgcctcaagcagtagtccaaaggaacaagcatttccagagaggcctggagaacccgagtgccaatattatttaaaaacaggggactgcaaatttggatcatcatgccgttaccatcatccacgtgatcgagcagtgccaaggacaaattgtctcctcagtccagtcggcctccccttgcgtccggtaggcataatctactcatctgcttatgcaattataagtgttagaacttgtttatttctatcttctgtcttctgtctcgtgtctgtttatttatttgttattgacatttttatattctaataggccttatatcttatgtaaaatataaaacacaggtagggtgcaatatgtctgactgctaaggttatgttacagaactgaaaaaaaatagtagatgaggcatctgcacttctgatgctatgtttgtgttatatattttaaaacacctgctctctccttgaggcatcatatttgcaagcttctatgctgatgatttaatttgtagacggatgttaaagttgatggctacgagcttgacgttgtctcattaatgaacaccgtgttattagtttgttttttccttttttttctccttgcatgtatttaatgtaaaatcttgatatgtagttggcacgttcagttgttagtctactatccgttatttttggagtctctgtctttgtgtttatgtgcctttaatattctgtgctttcatttggggccttattgtattttatttatgttcctaaacaacagggtatgcaaccttgcactttctatttgcaaaatgggcattgcaaattcggtgccacttgtaaatttgatcatccattgggtactatgagatatagtccatcagcttcatctttaattgatatgccagttactccatatccagttgggtcattgctagctactctggctccctcatccacatcatcagagcttcgacctgaactaataccaggatccaagatggaatctttttcagctagaatgccttcttctgggaacacctcaactagttcagttggtttaatattctcacagactgggcctgtttcactttctgatgtgcaactttcaagtcagagttccgtcgctttaagcagtagcagaagcactagacaaggcggtgaggttcgtcgttcaagctaattaaacacaagccattctccattatgctgtaggtggggggatttcacctgcctcgtattatgtatgctgtttatatatgtcggtaaatgtgtagtggtcaactgtgcaaaggtttttacatctcacattcaaggtcaaggtcttattattattattattatctctatcaagctactctgttgtttagtctatataataggatgatgtggattatttatgctcatttcatctatatgcagccaccaatgctatcccaaataagctgcaaaggcagatctctaatgtactgcttctcacttccaagtatttatgataggattcatttatatcaggtaatgcaatgtcttatatagaactcattgtgtaatccaaagaatctctagttagtttgttcatgccttgcctttttctcctattttaagagtggatgttttgttttcttctcgtttgccattctccctgattttattaatatagatttgatagttcattcttactctctttggacttcactttgttactgctcagagtaattgagcagttgagctctttactgtcaagtctgtgatattcaacttatataatctcactttcataattgatggaaaatatttttttttttgaaaaataaaaggttcaatagttaaaacacacgtgtgaatttttttttattttttttttaatattttaattgaaaattacttttcatagttgcaaagagggtaaacaaaaaaagtgttggtggcacacttcacagtagaaatagaaatacatgtgttttgtacttttttttttctaagaacttcgaaagctgtaaataaaaaatatattattaaattgtacagttaccatataagtggaaatgaaatgacagtttttgctaaattctaaaaatgttataaggtaagtttatagtacactttctttgttggtagacttcttatttgttttattatttaggagagattttcagttttttttttttaacgatggcctatattacaattgtgtagcatcacttttaattttttttttttaatttttgaataatttacagtgttaaaaataaaatttatatatttttgctatatttgcgattattttttattatactcgtggtaagttttacactttatttttagtaatataatctatttagagtattttaaaaatttatacgggtcttagataagtataatgtccgtgaaaaaaaattaattaattttttttaagtaaaccaataggaggtcaacgaggaggggtgtacagtgta

SEQ ID NO: 296405 - DNA, 4043 bp, Cannabis indica
atactaaatttttcccgtttttaaatttactaatttttttagcgacggtccccgaaaaaaattatttttaggaccgtcgcgaattctgatatttgtagtagtgtgttgtagtagttgctgactgttctttggtcaattgaggatgtgaccaactcttgaattaatatacccaagatgggggtgatgtcttccccatctcggatgcacattagagtgatcgtaggttaagctcatgtaaagtggatagctcccgtgtactattttttatttccccttgagtgatcgaaaaaatgccttcatgggcactttccataccaaatctcgtttggctttcttaatcatgggtcttagggagttgttacatgtgtgtgcactcgtccacttatctggagattcgtgggttggcagtgcttaactcactaaaagaaataaccgtagttacctcaagaccaactctataagctttgttcaacgcttgagagtgtcgtgaggtttgtgagttgtaattgattaataacaatgatataccaacaagagttactcaatgcttttattcattagatattaaattcaattacatcactatgagctaagttaaaagaaaaagaagtagtagttgtagatttttgtttttcatcaaagcttagctgaagtcatccccactacactaattccttgttcgaataatagtgtaggggccataccttattgatggatatctcaacaaagagatgattttgtcgcatcttgtcggttcgagaggcgatcgattcacttgtacaaggtaaagttgatctcactttgaagcaaactacttagggaacaactactttattaatgatattgtctcagatgatccccgttccagttccttggtaccggcactagattcaagtggtagtcatagcaaactccaacatgtttgtcctggattctgacgttgtaacaatataaggtccctccctctctcatgcggagtgttcggtgttactttcttggttaatatcttcaaaagactcatagtacacatcttcactgctgctcccctgttcccgatcattgttggaaatagagggagaatcttcgtcactgcccccatctcctgagtcattttgggaaggagggggagattcttcatcactactttcttccttgagatcttttggagaaatagcaggggactcgtcatcactatctccctgctcgagttcatcttgggaaacaaaagaggagtctgtttcagtggaagcattagttgttgattcttcttcactttcctggtcaatgtctgttcgagactcaggaaatagataagcagtgtaatcgattgcttctggttgagcaactcctctgaccttcttgatgacttcttcgagcttgatgaaaccatcaactctctctaaaaacgcttgaatggtgtacactgatttgagtttcaagtatttccataatggactcattactattagtccagctgtcattgccatgacattggcgtcttcactaagtatatctttttttgtgcggtttcctctaagaatcgttgtaagtaatcccttagaggttcgacttcttgttgcttgatgcaaaccaaatcgttgggctcgattggtctgtgccttgatggagataattggtcattgaatgctttcttgagcgtatcccaagaatcgatagatctcgaggaaagctttagattccactgttgtgctacttctgatagcgtggctggaaagactcgacaacgagaatcgtctcgaatgccttataggtcagtctgtactttgaagctgtgtatgtacgtgtgtgagagagagggtcttctttgccagtgtatgaatgccacactagatttctgaacttagaggggatctccaaagccttgactcgatctgtgagaggagaacactgctctagatcttactcacactctattggctatggagtaatgataaccaaagcaacaagggtgtcaaattcgaccctacacacatcatgtgtggtgatgtgtatatcagttggccgcttcctgttgatgttgttatacatgctcttttgtcttccaaatcgatcaaaggcattgaccgtcttgtaacttcattgagatttgaacaataagctccagttacaaattacaaagagttggaactaaaccattccaaacaacctcgtgatctgttcctaatgctatcctgcctcaatcatgagaacaaacattttttttctagaaacaaaagaaaaggaaacatgagaaaatagggataatcaattttactaattacatcagacagagatgatctcactactacaaaaaccactattctcgacgaacttaaaacattttttttggggacagtcgccaaaaaaattaaatgagtgtttaaaattgttggaaaaatttgggtattcccgacggtttcaaacactcaaaactcccatcttggtttcgaggacgatgaagacgatgattttttttgaaggaattcactatagcgacggtttaaattaatcatcggctatactataggccacagtttaaaaatgttggctatagtatagccgacggtgttaaactgtgtcctatagtatcgactatagctgacggttctcaaccatcaggaaatcttttccctgacatttttcatcagtcgcctattctacccagtattcgccatgctcgtataggcaacaattttatagaccgtcgagaattctttactcgacggtgtaaaaccatcgggaattctgggttttttagtagtatctatctctccttttatgtttaactttctccactaggactctacaatcatattccactagactgatcgacaatttaacagtagcacaccaggtcaaagttgtatgcaaagcaagagcctcagcaaacaatgatgaagtctcaagctgcctagaagaatagcatccagcgattacatcccgtgcagagttagtgattgcagccccaaacttaatcctctttctgaacggatctataagtcatctaaattcaatttgaaagtacttggcttaggtaaaacaaagtctgagtagacagtggcagaagaagaaataagctttttgtaagctttaacactaggaaccaaatcactattaattagtattagtcttggaattagggctttattttagaaattgagggatccaaaccccattaaaaagtaataatacaccaaatagaaattgataattggaaattaagtacatgaataagccattaattattcgcactactagaatttttctagagttgaagactatcatgatttttttaatgaaaaacagccatacttaattttctttataaaaaataaatctaaataaacacatgtcattgcattggctctacgtagcgactccaagaccatatattcattcttattaccagagtgtatcaaaatcaaaacaaagtcagatttcttttttttgcttgattttaagatagtaggttttaggtatttcccacttctattcatctacaaaatatatttatttatttgtagaaattaaaaaatttattttatgtactgtgatagctctttaatttatttgattggaattttaaaattataatttaatttttcatttaacaaatttttacatgtatatatatttttaaaataaaatcagtatcttcattaactaattaaattgttaaaagcaatagaacgtgcttcagaggaacaattctccaactaaagcacacgacctggagagaaacaagagtctttggctaagcagtgaaccagcttgtttgcagatcatttgacaaaacacaaatcaatatttttaaagataaaagcaacacacgaacatcatgcactaaaagaccaaaagaagatgacatagagattttactttgaaaagcttgtatgcataccaagctgtctgattccaaaatcaattgtccccaattgtgccaatcaatccaacttaaagccaaccatctttgcaacttcatgttgaaccctctccaaatgaccccgattgaaagcctccacgacattgccatggcagtcgcg

SEQ ID NO: 296406 - DNA, 5479 bp, Cannabis indica
atataaaatggattataaagttctcattgaactagaattcctcttaattaatttggatattattttatatatcataaaaactagttacttaattactctgccctcttgttggttgataatacatacacatatatatatatatatattatatatataaatatgtcaaagatgtggctttgggaagaacacagttttggaaacatttaattaagtcaattaatatattttttaacagatcagattttgatggacattgaaaaggacaagtgcttaattagatgcgagtaatccaagcaatctaacctagctagatgtgatgatgatgcaacgaaattaattccattaaacaaaactacattgattatattataccttaatttatttattagacctaatctaattattttttttagagtacgttttgtcactttatttattatttaaattaaaacaattatacatgcctaataacgatattatgtccccaaatgcatttttcttttcaacttctaatattataactaaaatagttttaatttttaaggggaaaatatagattctgtcaatgggacaaatttccagtactctttattcatcaaaagaaatctggcagtatcaaaaagagacctcgcactattaagtcaaattactgcatcaacagattaggtactaatattaatagaactccacacggtaagaaaacctaataatgcttccaaattccaatatatgtatccaactctggcaattacaattggacgtcactcacatgaaatcgtattaaatcaatattagacaattatttcgccatccttattaattaattaatggaattttgttataaccatgaacaaaaaatacaagagtaatgtatattaattttgttcattgtgtggttgtttctaaaccaattaataatctttaagattaagatatatatatatatatatatatagttattagaaggaaattgctattaagcaccagtagtgtctagtactttttgaacatgttatgttgcgattgaatactcctcaaaaactattatattaaattatgtggacccgatacttagttggaccaataacgatactgacacataataaggtgttaggcaccactaataccatttaacagttctcttagaaatattattgtgtttgttaaacatgcctttgatgtaatttattagatagacacatatataatcagaacagacatattagtatagactgacctttttcaaattcatagatttcaaatatataatttgagcttcattatagttgccaaaaattaaataaatataaattttgctggacaaataattacttgcatacgatgtccaacaaaaacaaaaaacaatcatgtaactatataacataaatatcacatatacttcaaaatgattgaccagttaaaatttagtatatgatattacctaatttttgtaagaaacaagtgagatatgtagttaaaaatcaaagtcttaccatttcaaatatagagcaaaaatattaaaaaaaaattattaaaaaaaatatgagcaactcagctatatattaagatgttaaaaaattatataaaaagaaagacagccatatcctaattttaatattctataggtataatttttctagattttgaattgtacatatagagttagattcatattatattgataaatttattcatatagctaagatcatctagaatacaattatacatctatatttttatattagtgttagataattaatattttggaaaaatttaaggtataggagtattatttttgtcttagtagggtatttctttttgtttacggtatataaaggtataatttaatttttttatatgaccgtgtatatattatagttaattaattgacattctatcacttttaaaaaattataaataatttataataatgttaaaataaaatttaaatagttttgttgcacttatctgttataaattataaataatttacggtattaaaataagattcaaccatgcattttgtccccttccaaatacattaatatatgtatatttatatacatgtataatgtttatttatttatttcaaatcttaactatagctagctagcacaaactaacatgcatgaacaagacctcaaattcaaacaaagccatattccccgcacgtgtttacgtgtcaacaacactataatattatttgtatgaaaacaaaattaacagaatacatttgcttttgatctcttatcgaagctaaatttgagttggataattcactctttgcaaattaattaactaaattttcttatatatataccatcgatcagaagattattgggtatcttgtggcctaagatcgattttgagaaaacctttctcactgagaattattattagcctatttgtatataataattaagtttgatgaagaaaaaaaaatgtaaaaaatgataataaaactgtatataacaacaaaaaagaaataaattaccaaacacaatatatagagataaatcgattaaaaaaattcaaaaagaaaaagtaataataataataatattgccaattaatgctaccaccattaatctcatattcaaaataataataacaataataatttaatcaaaataggtaacattattgtcactggaaatggagctataacctgtggtattagtagaggtatatagagaagaagttgaagaagtagtagaagatgccgaaacaacaatagaaggcggaggaggtggcggtggagacggtggcggcggcagcctagccggatgatgatgatgatgatgatgatcaggaacaggcaaaattgtagattgatcatgatgatgatgaagatgatgatgagaattaatattactattattattagctaattgagagggtaatgaagctatggacaccacaccaccaccatgatgaataatattattttgatgttgatgttgatgatgatgatgtggagacattaaattggctaataaagcagcttgagagtagaagtagtagtaatagtagtattagtattagcattagtagttgtactagtactagtattattattattattattatttgtagtagtagtatgagtattagtagtagtggcttctctaaatttatatctcaatatctcagtccttacagcattaagctcagcttgtagagtttggatttgctgttgtaaggctgagattagccccatgcaaccgtacactggatctctcagcctaaggtttgcttcatataccaaactattagccgcatcagctctctggctttctgccaattcctacatacatatatataattaattaattaattattacttataagaccacaaaaaaatcattatgaaattaaattaattaccataagcatcttggagacgttgcttgcaccaaaaactttgtggacagcggcaaatttttgaggctcttgaggtgaaaagtagggagaaaaagggcattcctcggcacatcttcttctcaaaagcttacaagcagcacaaggtgttatggtgtttaaggtcccagctgctgctggaccaaaagattgtactaatcttcttcccataatttgattttgatgatgatcagaaatattattaatgttgttattaatattatttggtggtggtaatagtactactgcatcaataggagtagtactattactacttctgatcctctttcctatttcatccaattcatccctgctactatatataattaacaattaaagaaaaatagattgtatcaagctttagaataagaatccaaaacaaaaaggtatataattttaaatgaatatatatgtagttaattacctggacatccaagcatatatgtatttatactactatatattggaaatttggaataagaagaagatgaagagatatgagagggaagaaaagaaagattgagaatagagaaaggagtgcttaatttaatggagccagaaatacttaggtcaacgagtcctttactatagaaacaaacaaaacaaaacaaaacaaattaaatttgttaagtagatgtatgagaaagaaaagggctcaataatcagatttgttttgttttatgatggatgatatatatgaattaatagtcggtgatatagcattaattttcccctacttataaactaatatatagtactgtgtgtttatgtatatttatatcatggcattttaattaattaattagtttggtcataagaccggagtggtacgtgtgcactacgtggtttatacgcagagatgatcaagttacatatattacaagcaactaaaattaataaatgaatagtttattaatcttattattctgtcttaatatataataattatagtatgtatctcttactaagggttagggttcgtttgtattgtattaaataagtagcgtattaagattgggttaattttgtattgtaataatcataaattttattataatataacatgtattattatataatattataatatataagaacgtacttaagttatattatgtatggtaaagttcaaaacgagcctgggtttggctgggagtcagggtcgagggtccaggtcgaggttcaatccaagtccgagtgggggtcctaagtctaggttggggtcaaggtcgaggatagagtctaggtccagctcaggatgagcagaaattgggttttgggttagagacctggtcatggaccaagtcgaagcttaggcccgggtttggcaccaggccaagtttttgagtttgagttcgggtttgggatctaggatccaagtaattaaggttggtccaaagtcattgttgggtttgaaatctaggttcgagtcagggtctagggtctgggtccagaccaaagtcgatctagttcgggactaggattcgggtcagggtccaagatagggtctgtgccaagacttgggtcgatactgtggtgcgggtcggggtcaggttctaagtcaggagtcctgggatttgggtcgggttatgggtctaggtctgagatttgggtcaggttgcgagtgtggggtctgggtcaaggttgggattctatgtccatataatttaaaatatactatactaattaatatgattacaatactatactattgagcactaaatattgtataatttaacaaagcaatacagtacaatacaatatggtgtaagaaatacctctaaaatattaattagtttgtctagctcccaacttagtatggtcaaaatgatcgtatatcaaaagctaaataaaattaaagctttattgatttttaggatttgtttagtacatatatatatgctactaaacaatattatattgcatagtattatgttagactatcttttaaggaagatttttataaaattacgtataaatttttataagcatttaataaataaataatattttaatataaattaaaatttaatataatattatataaaaatataatata

SEQ ID NO: 296407 - DNA, 4596 bp, Cannabis indica
ataaatcacttcaaatttcttatattgattacaaataagattgtaaagagttttatttagggcataaaatccaacactgggtagtgggaaggcttgacaaatttaagctaagtgttttcacttagcttgacattcacgctgcttcaaagttggtatatttggatgtcgggataacatttggaaaaagggagatatgagggaataaggagaaatgatggggggaatggagagagagggagtggggaggggtgtgggagcagggagggggagtaggggagcagggagagggagagagagtaggggagcagggaggaggagggggagtaggggagcaaggagagggatagagagtaggggagcagggagggtgagtaggggagcggggagggagagtgggagcggggagagggagtggggcatggggagaaggattgggggagtggagagagagagtggggcgtggggagaagggatgatagagagagatagatagaggacccactaaccttggtatcctaattctactgagcgggtttggggaatcattcattatgtgacttttgaacaaaattgttgaatttttaaggtcaacacttgccctggagtctaaatgagtacttttaagtgctctttttgactatctagttgaatcacctttggcctagggttggcacatcttgtgtaataaactatttgaattgccgtacggtggtattaatgcaatcataaatgaagttgataggttgtacactaatccctagattgaatgtggcttttcccatccattaatcacacgatgatccaacagcttgcatcgattcccttttctataaatagccttctactccacttcattttcattcactcctccaccattcttaacaccttctaatcactgattcattcttccttccttcttgagttcatatccatttggaactccttaacaccttgtcattccaaagtttaccttgtttcaccagcgctacactttcaggtatttcttttcttcacttctcgcctttttttactatatgaatacacattcgatacactcgtaatctagcgcttgcttatgcgtaagttgactagtagcaatgatccacatgtttgtacctattcaacaagcctaaccatgtgtccattcccactcccttttttaaatttttaggttgggcctaggggtgaaccctatatggtgtggccttgggttttatgcactttacagtatatttataatatggtgatgtgccttgtatattgacaagtgggaatcagattcctaatggagacccaggggtcatcctttgttcctgatggggtcattcccatcgagctttcatccgagctgatagggatgttaacgatcccttgttgaggtaccaatgcttgatgttagaatgttcaggctgtctagagcaaatttatgagttctaggagcgcctagccaaacttagggaggaggttaagttcttgaaagggcagaatcaacctttgtttggcgatacagatgcccacctttgttttcttaaataagtacatcaagacatcacggaaaaacttgctcactcagagtgttatattcctcctgaaccctcccctaggcatgtccccatgtctctaaacttgaggtcagttgtctgccagtaaggtgaaaagggtggttcttcatactaccccctacgtcgcacaggattatccatgtggtgacgctttggttgtgtctagatcgagtcgaaagacctcatcccatcgaatgaagaacatgaagtgtgttgcttcttgttctaacttattctgtgacattacagatatatggaccaaccacgttgcacaaacaagcctagcacaccactcccaaatcgcgactgatccatcccttttggcatgtccaatgtggttagtacagttactcagtctaaattcaggaagttggtgcaccagtacactatgacacaagattttaaattcctttaaaaagattgtgctcactgacctcctgaaggcatggtgacctttagtgagtatataccaaaggtaggtgtttcttggccacttcaactgttctacgttgagatcttaaactattttggtgtggatcctctacaacttatgcctaacggttggaacatcgtgacgtgcttctacattgcctttaagaaggcagttagtcgggcgcccacgaccaaagaaatgcaatatgtgtgggttcccaataagagtgagaattttattttatttttgttgttgtgttggttattgttgcttagttttttagttgtcatttatggtgattgtctactgattatcgatgaattatcggtagattctcgataggattttgtattacactttttgttgtcatgtttgcattttatttctattattattgtgttgtttaacttttgttgatgtcattgataagttgtgtttttcttctgttgtattctgtctatttcttaataggttttttattggttctcgatatgttttcgataagattctaatacttgttatgtttttttctttaataacaactgattattacgagagtgttattttctcactcagatgaagaagcatatgttaggacaatcacttataatgatgttgagatagtgattcagataggtgttgatgagaagcatccttaatatgacgcctaggatcctactgttttcgatagattctaaaaaagtatcaaaaacaaattaaaataacaacttcatcgtattagaattttttttgtagttttatagtaataccttaaggtttaataatcagattagcaactctaactagattaattatgtattaatgagagattgtattattatataatttaacatgtgaaattattttggtttattgcattttaaaaccccgttggtgtgttaggggcattttttttaattttgacccaagaaggataaatttgtaattttatgatataatgtatttatggactatattattatatagtatatttattctgtctttctgcaagtattatctgatatgtcgacacaatatatattcacaatcgggtattttgggtcgaatcgggttcgaggcccaaaatatatttttaggatttatttatggaatttatatgataaatgagaaaatttgatttattgtgatacatgtgcgtgtgttgaaatgacatgtttgcccttgattatatgtgtatggttatatttggctgtatgagtattttggttatttgaccacttaagttattatccaacaaaaaaaattggaaaattagaaaccatttttttttctgagtttgaacccctcttagccgacctcctctttctctctttcttacctttttcattttcaaccaattttgtggaggaaaggcttaaagtggagtgagttttgcgtgatttattgcttgaagtttgtggaatttgtggtaaagcttctaatccctttttatttatgttaaattctgatatttgaagctatttgagtttgttcttgatgttctttggttgagtttgcatgtcgatgtgatttttgtgaattgttggtgattttagtgaatttgagctattgaaagtatgtatattgcatctaggatattttaggggattttagggttgagatttgtcatttgatttctggtaaaaggtttgaagttctgggtttttgccttgaggatttgaatttcaagcttgagcatgtgtgtgtgtgtgtacacaatgatatttgtgttacacacttgaattttgttgtttgttatgttttttttttagtattgtgtgatgctcaaatgaacaccaaggttagattgatttgcttttagctaaaagattggattatgcatggttgtgaatatgttggtgtgaatttttggttgattttcgagtgtttgaaaaaaatggcattttaggggttccaaggccccttaccgtgaccacggctgggctcgccgcgacgaggtcctattttccccgagaatttttattttcttgattttgccatgacttttgactcgggactctgttttgaatgttcttgatatcgttataaagctcattttgaactctacatgttaatctataaatgaatgtaaattatatatttgtgatatctcgggaatgtgtgactaggattaccgatgcgcttaagaacacctgggaatttagaatctccacatacttggattaccagtgtaacaccctaactattttaggcatgttagcgtgatttttaatttactgtgtagctcgttgctaatcaacgaggttattgaaaatcgcgattaattaaaattttgcttatttaattaaaaacataaagtgacatacatataaaatttcgggatcccgtttacaaaaatatttacaaaagtttaattatacatgtacaaaaatctgtcgcctagcgactacacatcaaaagccttgatgtcccaaagatcgtacgctttaggcctaatcgccccaacatgtacaacctccatttgctcgctctcatggctgctcagccttgcccttacgtacacatggaaatagtaactatgagttaacaaactcagtaagaaaatcataacataaaacataataatatcccaggttataa

SEQ ID NO: 296408 - DNA, 4388 bp, Cannabis indica
ttaatcacattccaatgttgcaaatagaatccattggacattccgtccggccccggggccttatcttgtcccatgctctttatacaggtttcaatctccttatctgaaggaatagagatgagggaagaattctctctttctccaatcactgaatagttcaagcactctacatcagggccacttagtgatagattggagaaggtagagttgaatttttcaatgaacaattcagcaatagagttgatattattcacccaatccccgttctccgatttgagagattgaatgaagttttttcgccttcggataacagtagacgccataaagaacttcgtacaatgatctccatctttaagccaagctactctggatttctgtctccaaaagatttcttctctggagagagcttcttttagattgagtctagctccttggagaacgtccgcctggacttgatcattcgattcgatcttttcaacatttaattgcgcctccttcacttgatcttggatttttctgaaatgagttttgttccagtgttggagatggtcctttgatttcttcaactttcggtacaggttcaccatgggattatgatgaagctgttccctccacgcgttgcgtactacccagtaacaccgaggatctcttccccacattaattcgtacttgaacggcgctttcgaacatctcactcccccatcagtactaaggaggatcggcttatgatctgaagtggcaaccggcaataattcaaccactgcattagggaataatagtctccagtcaacggatgctagggctctatcaagtcttgcacgcttcactgcaccacctccacctgaactcgaacccttttggaaccaagtgaactttcctctaagacacctcaagtccacaagtcccgttcttgccaccattcttcgcagatcaaaagagtagcgagcagaattattgagattcgaataattgatactctcattgtccgctagagtgccattcaaatcccctagtagtaggatacgagaattacacctagcactgaaatcaccaacccgggtccagaaagcctccttgccattcagcgttggagggccataaactcccagcaaatgccacttgagcccaggagggtcagattcgatggagccattaatccagtttttatctttctcgttaatcttgcacagaacacctaatttccaaccaactccgaagccccccgaaagaccaacaggggaaacataagtgaaatttggaaagtggagcttgtttagaagagcaaaaaatttttcttcaattaatctagtttcggatagaattaaaacatcgggatttgaccggcgtagaaccgccgtcagctgtcgaactgccgcggcattcccgagcccgcgacaattccaagctaacaccttcatggggacatgggagacgtttttgggcaagtctccacagccccaaaatgaaaaccccgatcggcttgagagttattctcatcctgtctatctccaatctcttcaattacacagcttggatgattttcagtactcttttgaacaataacaaatttgttgtccaagtcaatagccagttcaatcccatttgaattccaaaggtttcggtaaacccgttccttcccattcgaaaaagatgcagtaccttttttcttaaagcttctgggagtggccccagtccacgatttagaagtctctggtttgcctctttttgttgaagtagtcgatggtgatacaggttctttgttctttcttggtcttcctcttttcctcttggtgcttttgttatcagaggatcctggtgaaaagggaataggttcatcacctaattccactggattctgaggcttcgtcccagctgagaaactctctgaatgcgaactagttccttcgtgagatgagagaacaccaggaaccataaaaaatccatccacggcctttctttttctcggcccattatcatgttcaaaagtcttgaaatcttcaatatcaagaataggattgaacagagttggctctcttaggaatttatcaattgtagcagttccaattaaaggcccaaacgctctggcccagcattcggggaaacgccagtccaaaggttgggcctggggcccaaggatagaattgacaaaattccccacattaaaatttcttttaagtgtgaaattctctctattattaacggctatttctgtagggttttccaaaaaggaatcactaaccatggcagagggatcctgcagagtgttcttgtttagtttaggaaactttccattctcatgaaggggctgggaagtaacacctctatccatcttgtttgtagtccgagaggagttaggatgcagagtactaatgtcagaatttccatgcaacgtagctggcagatcagaattgtgattggacagagtggcgtgagaagtcactgtcttctccagaggccggacagggatcactttctcaataacgccctctgccgtattttcgaacggagtaacctcccctgtgcctggaatgtataccgccggaaaacgattgaggacaatttctcccgtttccaccctattctcagttacaacttccacttgtcgacgttttccagggagttgtctgcgaagttcccggcattcagatgcttcggctgccatccatcttctctgggtcttcacctggtttctcatcttggggtctttgaccaattgtttctgagtaatccactccttgaaccagcttggaagtggaaggtgaaacggggatcgttccacagcttcctcccccatccaaactccatacatagggtaaaaagctcctttgtcatccttaatcacggtcggggttttgaagcaaaatttctggtcatgtgatagagccccacatttaaaacagagttttgggagtttctcatattgatattgaatccaaaggtctgtaatcccctttctcctaaggaaaaaacctgagaacaaaggtttatggacatcaacggtggcccggaacctcacagtacccatcccaaatgatcctctctcaaaattcctctcaatgtgttttgggagttcatatgatgaagagactttccccgcaaactcttgcaaatttgtcctgttccaatagaaaggtggaatgcttctaagacgtacccaaatcggtgagtgatcaaacacaacttctgccggggtaagccaggatggccaaggcatgagaactagtaaatagccacagaccacccaaggccttcttaacagcacattctcagcatcaaacttactttgaaaggtgaactgtaagagcccatcctctctttccttccagctccatctcgtcagcgaactccaggcatttttgagagagccatgaatggcttttcgtcccagtcttgaacagcagtagagtttccccaacaggatgcgactgggttcctcattttgatcaacttcaccagggtgtaaatcacaggttaactcagtagtagtaacttgaactgcatcttcgaacaattcactaagattcgcatccgccatcttaacaaaagagaataagtaaaataacacacacagattatcaatggtaagctaggatacacaaatcatatgcttccatacactcccacgattaggagttaagactcaagatctcaggacaaactcttatcaagactcaagatccacataacgaggttagtgcctcatctcgtacacctaaagttacatggtttctcatcgaggcacatggcaacatttagtacgtttttatctcgcataagactgtaaattatgcttttaacgagttattccatgtcaagtgtaattatgattacgtgtttgagttctttattcttcctagcttgacacgtgtcttcctctgatgtgctcgccgaattttgggtataacagttactaagaaaatacttacaataatacttatcttctgagattctatggcgttaaattgctaatgaacgtccatctattggggatgaatctcactaaaacaagaactatgtagaaccaacaatggagatcaaatatccttacaataaaggtcattatttaaagtgtattttcatctaatatttattttaattatatatttattcaattaaaattactaatttagaaaactctaaatatatattttaatttaatatttataaattatacttagatagatctgcaaataaataaaattattttccattttagtaataattctccataaataatatggaaattacttaatttcagttggtccaaaattaactaaaattaatattcaactaaaatttaattttctataaatatatatggcaaaattcaaaattcaatgtatttaaaataaatacattttcgaaatatattataaaataaaataaaa

SEQ ID NO: 296409 - DNA, 823 bp, Cannabis indica
cagctaccaacattacaaatggtcctccaatacatctagcacaatataaattaaatgtggacactgccttagacaaccgaaggcattatacatggttaggagcgattgttaccgattgggaaggaaacccaatagtatgtttttcatcttctatggtgggttttgcctcacctctttacgctgaagctcaaacctttttttatgttctcagatggtccttcttaattaagatgctaatcacacacataaagacagattgcctccagctgacaatgaagattaagcacaaatggaaagatcattcagcaaccacagggttcatctaaaaaattatgtactttttatttaattttgctaatgtatctctattccatttttctaggaatcccattaatccctttgaaaaagaaaattttaaattggtattaatgtatgtgacaaagaaacttgttggaggaaattgagaagatcactccactccctagtccctacgatatcttaagttgcatttattataaagtcgtggcagaccctccacaccatctatgtttcttttttttccccttctgacaaatccaattcatccatgactagaatagaagtataataaataaataaataaataaaacaaataattgaaatctattcatttaaatgtaaagcacacaaatattaaataacaataataaaagattagacatagtggtcaagaagagagtataacagggaaaatgaccaaagacaggacatcatcataatctccaaaaacagtcatttttaaatcagaacacaaacttgaaataattttcaaaaaattaaaaaa

SEQ ID NO: 296410 - DNA, 1696 bp, Cannabis indica
ttacttccaaacacaccctaattaaatataacttttttccttttagtttcgttttttaaaaaccaatcatattgactttctctcgccttacttctaaggatagatcatagatagagaaggttttctccagaggacaactataattaattatttttctgcatagatatatagttaattaacgtggtaaatgtatcatactgacccatatttgtaatgaggaacttctttgatggatttataagcaatggaagagggcccctactggagactcatactccaatgataatgatgcatatgtttaccactctttagtctcctcttaataattttgacagcacagaattgatatactaaaccacactgtcgaaaaaagttagtagggaagaatgagaaccacattattattatcactatagcacttctttttgaatcacatataattttattatgatttgtatcaattattttacctatattaattgcaactatgctacacttagcctcatatctctcattttcataataatctagtgtctattataatctaatgatgttaattacttttcaaaaagaaggaaaaaaagtgaaccattatatagtttatcattattttaaaggtaattatcataaattttctatcagaaaatgatgtccactgtgttttttttttttttcgttattttaagaaaccagatttcaaattagaaatagtagtttagaagaaaaaaaatagggtgctattttagattccatatttttacaaaagttactgatttcttttattttgttaaatagcaaaattaccatgtatcttctacaatagtacaaatcggaccatgagttcaatttttaacaattttttttaatataaccaacttgaaaacaatttctaacacgattagatgtagaaaatataactagttttgttataacacttctagattgagttattattaagttttattttgataaaatcagttcaaggtcatatttgtaccattttaaaaaaatataggatctatttcgtcatttaacaaaacagatagtccaatcaataacttttacaaaacacaggatccaaaatggtatttaccccttaatactggtattttttttacatttcatatatggactatattttaaatatttattgatttttttcggctcgttaaaaataatctttaaattatttatattgttgcgaaatggactattaccacgtttgggccatgtttttaaataatttaaatattttaatttagttttacttatttttcaactattaattgaattttagtgtggtgattttttttaaagatacatatgtttaatatttttattttaaattatgtatgtagtgttgatgtaataatgatataaatattcatgttattatgttatatttttatgtatgacaaaatttgatagattgactattttataattgtataaataatttaaagactatttttaacgaaaaattctgaaaatacaataatacatacctcataataatttatctgcaaaagttttaaatagccaaaaaaaaaaaagtattggacttaattaagtcttgaactaatataatatgggctttaagtattaggctaacaaatgtaagaaatatatatggagtaagttgaaaaataccacttttattaatcaattaattaaatttatctctaattttatattt

SEQ ID NO: 296411 - DNA, 4118 bp, Cannabis indica
ttataaaaaaatacggtcttttgatgtatttttatattgtacttttgttgacttattgttatttatatgttagtttttgttgttattttgatattattttttgttacttttatatatttttcttacttttttataaaacaccataaatttataaaacagaatctatgaacgtaaaaattttttttacaaaaaaaaaaatagtattttatcttattatccaaataaaaatgtataatatttggtttagtagtgaattacttaagaagtgctataattcaaataaaagtgataataaatggtataaatcatttaaatgggccgtaaggcccataaaagaaaatggcctagagaacgagattgaagagtctagggttgtgttagggtttcgctcgtatataaaaaaagcttattcaacacaaattctctctcctatacattcgtgtatattgtatatatatatacacatatatatacacacagacaccgccattagccacttggtccactgatactatctctcttattcctatagggatcatcatcgagtttgagctatggcggaggagaggtctactggtacggtccgttggttcaacgattcgaagggtttcggtttcatcaagcccgatgacggtggcgaagatctgttcgttcatcaatcttcgatcaaatccgatggtttccgaagcttatctgagaacgaagctgttgagtttcaagttgttctcgctgaagatgggaaaactaaggccgttgatgtgaccggtcctgatggatcgtctttgcagggtaacaagaaggagagtttcggcggtggtggtcgtagaggtggccgtggaggtggtggtcctggttttggtggtggttggagaggtggagatcgtcgtaacggtggtggtggtggtggaggaggctgttataattgcggcgatactggtcatatggctagggattgcgatcgcggcaataacggtggtggaagcggtggaggcggaggcggttgttatcaatgtggtgaattcggtcacatggcgagaagctgtcctaaagcgaatgaaggcggtggtggtggtggaggaggaggaagcggcggagcttgttacaattgtggcgattttggccatattgctagggattgtagtagcgctagcggtggcggccgtggtggtggcggtggtggaggttctggtgcttgctataactgtggagaagtcggtcatttggctagggattgcagcagtgctagcggtggccgtggaggcggtggtggtggaaggtttggtagcggcgatgctggcggcggcggcggttgttacagctgtggaaaacctgggcatttcgcaagggagtgcactgaggcagcttcatttctcacaatgaagaagaaaaggaaacacagaagaaagaaagaagagagtaattagtaaatattctcctcctttctattttccaattttatcttttggtttttattttgttcattctaagctgtggtgggtttatacataggaagatgtttttttctttcttaatggggttttgatttttgagttgtttctaaggatgatgatatatgatgatgatgatggtgatgttgatgatgatgctttgctttagttgtggagcaaaattttccagattttcatacacacaatatgtgtttggctaaacaattctaatgttagctttctttctctgtgtttaatcatctttaactgtgaataattgtgtttttgcaatgtgattactgattattgttcttagataatgtgtcatgggaatagtaattggaatggtattacagtcgtgtaatagtgattaggggcattacaatgttttcaaaagcaaactaaatattagaattgtatagtgattgcattactattatgccaaaacaaacatggtcttactgtgaataattgtgtcttttgttacttaattgcaatgtgattactgattattgttcttaggtaatgtgtaatggattgtagtgggaatagtaattggaatggtattaaaatgatgtaatagtgattaggggcattgcaatgttttcaaaatcaaactaaatcaaaccaaacatggtcttactgttttattactattatctcattctgatctttgttacttggttcaattttatttgcacgttgcttcattctatttggtatctgacaaaattggaatagtattacattgtttggtttgtttttggaatagtaatgggaatgagtggtgtattttcaaatatattcttaggtggtattttttggttctaaggaatgaaaacataaacataggaataggaatagatgtaatagtgattatattgtaaagccatttcatgttttcaaaatcaatccaaacattagaattcgaatagtgattccattactatcatgccaaactaaacatggtcttactgttttattgttcttaatttcacattgctttattcattttgatatttgacaaaatcgaagtattgtataatttgattgtgtcacatctatagattgagattattagtgcatgtttaggctataattgttaaccagttttatatgatttgactagtttttggtctgttgtgggagtaagccattaaacaaaagtattatatgtctagattttcttgtctatatataatatatgtccatgacaagattagtcttagatttttagagtattaaattaagttagattttattttgagaatggtaattagtcattgtcataattatattttattttgacaaaatgttttatttgcaactaaattcatgttaatgaaacttgtttctttgcccaaaatgcatctttgttcatcactattttatagtcgagtgagttatatacttctatttcgaaagagttttaagtattgaattgaacccaataatatttttcttttgatgtctccatctccaattttttgggattttgctttatgacattgtcaatggagaaatattgaatgtgaaaatgagacaaacagtaacagtgctggccatcaaacattcatttcatttttattaaacttaaaagtatatatatatattttttttaaaaactacaaatgcctatcaaaataactatacattacaatactcgtgctcctcctttttattttctatattaaaataaaatatagaaaatatttacaatgcatcctggttactataatggtacatggttattcttgatttttttttatatatatatatattattactgctttttttctaatctcgtataaaataatttttggaaaaaaaaattgtagaaaaagtaaaatcataaaatttgtaatttcctaataatttaattttgttgtaaagcatggtttgggttttgcaagggaacagagtatttagtgggggattgagttgggttatgggtgttggggacagagtgtttagtgtggtaatggcccataattctgagctgttaataacaataggtggttagattagacccctcctttcacctaacttttcattttcaagctcaaattttagtcatacaatttttcaaactattttaccattaacaaatgagaaataataattacaacctcttagtaaatttttacgtctgaaatcacatgccgttcaaacattaactatatatatgtgtatattcaggcccagtcttgagcatacgcgggctaggcctgtgcttagggcccacctagcttaggagtctaatttttttttctccttttaaaattatatttttttttactgactttaaaaaatactacactttttttaacataagggcttaaaaataattttttttcttgtggcatactttgtttcagggccggcccatacacggggaatatttacacgagcatatctaatataattatttaaaaattacaaaaaattgactctaaaactattttttgccaattaaaaaatttaatggtgtacatctattttgaacttggcccgaactcgaactccaattctaatcgtggttctgatacatttcaaatccacacttgaatatgtgaaaagatatacataaaaaatgtttaggtaagaagataaaatttatttttgaaaataaaaacaaaattttgatgtttttaattcaaaaaaaaaaaa

SEQ ID NO: 296412 - DNA, 8336 bp, Cannabis indica
tatttaaataatgataatatggtgaataaagtaaataaagtttagcaaagtgattgctaagattttgtctaatcgattaaaacctcttttgaaagagcttgtgtctcccttccaatctgcctttatcccgggaaggtggatagcggagtcatcaattcttacacaagaaattattcacaagattcgtaacaagaaaggccaagggggtcttatggcattgaagcttgatatgcacaaggcttatgacaaactagagtggagctttcttgacagagtccttagagcaaatggttttagtgacaaatcctgtaagctcttaatggcttgtgtcactacgatatcgtactcggttcttttgaatggatgccctctcaagaagatccaacctggtagaggtatccgtcagggcgaccctttgtctccatttttatttgttctttgtcaagaagttctttccaagctcataatcaaggcagaggagaaaaagcacactaacggtatcaagatcagtcaagcaccccccccccccaattactcatctaatgtttgctgacgatactatccttttcacccgagccaatgagaaggatgccaaaggaatggtggagtgtctatcaacatatgagaagtggtcgggtcaatcctgtagtaggcataaatccagcgtactattttcaaagaatctgagcagtggcaagaaggacaacctgttgagtattctcaacattcagcaagttcttggtaatgagaaacatctgggaaatccttttgtctttaaaagacgaaaaaaggaggagtatttgaggctgaagaatagtatgatgcaaaagcttgaaggttggaagatgaaactcctctcgtatgcagcccgattaactttgatcaaatcggtggcctcagctatgcccatttatgcaatgtcctccaacaaaatgcctattggtagttgtcgtgaattggatgccttgatgagaaagtattggtggatggggaacgtggataaaaacagattcttagctctcaagtcctgggatttgatttctcaacccaagtcctctggagggttgggtttaaggaggtgtgaagacatgaacaaggctttaatgtccaaactcgcgtggagccttgctaccaaaatggagcggccttgggtcgactgccttttgaagaagtattgcagatttgaaagtttctgctgtgtagatcagagaagcagtgattcatacttatggaaaagtatccttgagtctagggaggttatcttcaagggttctatggctattgctacttctggagagtccataaatttctggaatcaattatggattccatggcttgagtttcaagagttcaaagagcttttgaacaacattagaggaagaggctacacaattcaaacattagctgatatttcgactggaaatcagtggaatgaggaggtagtcaatcaggtttttagctctgatctggggaagagaattttgctcattcctaggattccttcccttttcttcgatcaagtctactggaaaaatgataaaaaaggagaatttttggttaaggcagcttatggtgtggctaatagctggaaatttgctcctgtcaaagagatttggaagaagatttgggataagggattgcatcctagaatctctgttatgctttggagggttctgaatgaggctattcctaccaaggatagacttcattttattagcgacaaatcttgtttcctctgtggcaatgaggaggaggatggccgtcatgtgttttgtctctgtggttacgcaaaagcgctctggtttggtggtagatttccaattagaatagaccatattcaaggtgaaaatttgattgcaattgtggaaaacatgctattattgctgtcaaatgaagcttctatgcaggaagtgcttctttacgtgggctgtgtcttctctgttatttggcagtcgaggaatgagcttgtcttcaagaacatcccagctaatccaagttgggacttggcaaaaattgagaacaagtttctagagtaccatcttatggatttattaaacagaaatcaccaagaagggtctctcagtatcgacaccagggaacttgccttgattggggggagtgaagtcaatttgaggcaggggcattctaaggttaaacatgcgttttttactgatgcatcttggctgggaggagacactggtctagctgcaatcgtagtagactacatctcaggtacctggtttgttaaggcacacagatcacattcccattcagttttagaagcagagcttagtgccatccttttagctcttgagtgggcagtggagttgggttggtctgaggtgtatattttctcagactcgatgactgtcgttcaagctttgaagtcacagaagggtcctcatgactggaaagtttcagctttatatttctctttaattaatttaactaaagtgagtcctggttttaagttttattttgtcaatcgtggttgtaattctgttgcggatggtatcgccaaaaaggctagagtttctagcgatatggctgttttgtatcaaggggagggaaatccccctgtgattcccatcaactttctatttatatgaactggtagttctttaaaaaaaaaagtttattaaaagttaatgaatcataataattagtggcattatagtaaataaaaaagtaacatttattgtggactaaatttgatacaatatgtcaaatttggcacaacttttagcatgtactaaatttaacaaaatttttagaacaccattagagtataattttttttttaagtgtgctaaaatatagcaatacaccactttttcgtactccattgagatgctctaagagcttgtataagcataaagcatcctctatgggccctgagctgggctgggcctagcgaagcctgatacgacaccgtttgtccaaaactcaatgggaaagtttccttatagttttcatgtcgtgatgctctctaagcccttttatttcctctcactaaatttcgtccctcgaaagcttgccggagcttccacttttggcggacaaccggttttactttcgacccggagacagatcggacttaatcgtccaatcggagcagatttggtctcagattatatcttttaatagattatccaaaattgttatagtcgcaattattgtattttgtctttggttctttggggaaattagttcatggaggaatactttagcagcgatgatgagtgctgttattccgatcgggattctctggatgggctcgagaacgaagactctcgtacgcactgggcaccttctaagggccctgccagtaaggtattccattttctggggagtatttttcttattaatggagcagacttcaatgttctattaggcatggattgatagaaagttatgttttttattagcgtttttttttttgttggggattctatcgggtgcgtgttaatctagtttttgttattcatgtttggcgcatgaagattgggatatattattttctgaggttgctggtttctaaaatttcgtatggtaattgtaaagggacatttgttctctcaattgaagcaggaaattgtaggtaaatttcgtgaaactgcggctggtttgataattttagctttataactgtttcttttagtgctctttcatctgggtaagtagtgttcgttccgactttgttgaatttggatacttgtttgcttaattttgtctctagatattttttgtttttgatcttatttatatgtcgtattgttgagttttggaaagaattttcaggtgctttatatttcttcttcagtgttgtagttcccaccaagtttttgtaaacccttttatcttttgcaggtaataacgaaggaatctctattggctgcacaggtaaaaaaagaaaaacctaatattcattgctcattactctttctttacttgtatcaaatgtgactacaaaattttctaaatctgaacgcttttgtgtagagggaggatttgcgcagggtaatggaattgctatctgtgagagaacaccatgctagaacccttctcattcatcatcgatgggatgtggaaaagttgtttgcagtgctagtagagaagggaaaatctgttttatttatggaagcgggagtttcactagctgaccaacaaaatcttggcgtaccactgcctccgacagtaatgtgcgaaatttgtatagaggatgtacttggtggtgacgcaacaaggatggactgtgggcattgtttctgcaatgaatgtaactctagcctctctgatttatgaaattaagtatttcttattgtttttctactgtgttttccgtggcacttattgggtaccaaccttctttgattattcttcctttgccttattttattttgtacaggttggacagggcattttgttgttaagataaacgaaggtcagagtaagcgtataaaatgcatggcacacaagtgcaatgcaatatgtgatgaagcagttgttagaaatctagtcagtaaaacccatccagatctggcagaaaagtttgatcgttttcttctcgagtcttatattgaggataacaaaagagttaattggtgccctagtacgcctcactgtgggaatgctatacgcaatgaagatgatgatttttgtgaggttgaatgctcatgcggtttgcagttttgcttcagttgcttatcagaagcacactcaccttgctcatgtttaatgtggagctttgggtcaaaaagtgccgagatgaatcagagaccgttaattggatcactgtccacacaaagcattgtcctaagtgtcataaacctgtagaaaagaatggcgggtgcaaccttgtgagttgtatctgtgggcaagccttttggtgagttttcttcttacctgtacttatcttgggttcttctgaggtctattctttaatgttttcatccataccttgtttgtttgtttattttattatatatggtgtgtacttatttggcacctgtttctatcaaaatacaactttggtaccatgcttttcaattatgcttatgtggatcaaactttctttaattatataagttccaaattcaagtttaattgtttaattacatataactgggagcagtttagtcaattgataaaattttattgatcaaattttagtttagggtaccaaatatgtttaattttaaaataatggtaccagatgagcattattgaaaatatagggtaccgaacctgttcttttgataaaaaacaggataacaaatgagtatattccctactatttcttatatacatttttcataatagtttttataatatgtataatccctttgttgtactttttatctcaattgactcggtttgaaagttcattcagatacatttttgcagctgtgaaattgattccccacttttgaaatttcaatgctcaaaattctttagtaatttaaaataatttcctgttttcagtttgatattttacttacaatggtatttatggctgtgctgtaactatttttagtttttgatgatagaaaataaagtcttgggatttctgttttgtttcttaatcattttgcaatctgatgtccacggaggacaagttgagcagattttgctgaattcattgttaacgtggtttcctgttaaagttgtatctatggtctgttagatatctttgcttgtttagttagtgtctggagcttcaagacacagttaggctttttgtactgtttgacacttggagcttttatgctgatcctcttattaaaataattgtcaagttttgccatggtctatatactagatagtgtatatatagttttaaaagttggtcggtgaggcggtgaaaagatgtatctgaggctacgcctcatctgctgtcattgaggcgttggcatacacctcacaccgatgaggcagagttgaggcctctaaggcgcatgagtcgcacacctcaaaagtgggtattttttttttgttgtgttagggctgttgttttgtgggctgatttggttttttttaatagcttttctaatatctatttttagacttctcaatgactctattgggatttagtttgggtatttttactagattttttttttaatagaaaagataggaaaatataaccctaaaatccctaagcatctcatacggcatctctgtctctccttctcagccgagtccctccttcctcagtcctcatcaacctcacgtatagtcttctttatatgtttagaacttttaccgtattttgtttgaaattgaaccttttatgaatttattttatgattttaagacttaactagtgattttgatgaattttatgtcttttttatggaattatgtggtgtttgttatgaatcttataagttgcatgatattttatgaagtttttcttttaattgttgaggcatacgccccgatacgcctcacgcgactaagggaaaacgcctcagtacccgattctgttttttaaaatcacaagtgtattagtacattgttgtttgtttagccattcatctgcatttcaggcttgaatagctgttattctgtgttcttggaaccagtaatgtagaattataacttttttatgcaaataattcttctcctagtgtacagattaagttgcatttatttttataccctgtctgcacttttaagtaaataatagacttgcagagttactgcatttgaatgttctttttattatttacatttggaaattgaagctaatctattttttcgctcctcatgaggcagttggctgtgtggtggagccactggccgagaccatacttggtcaagtattgcaggtcatagttgtggtcgctacaaggatgatggagagaaaaaagctgagagggcaaagcgggatcttttccgctatatgcactatcacaatcgttacaaagcccatacagattcctttaaactagagagtaaattaaaagagactatacaagagaaggtttcagttttagaagatagggattcaaagctcagagatttcggttgggtaaacaatggactctacagactttttagatcaaggcgggttctttcatactcgtacccatttgcattttatatgtttggagatgagctttttaaggatgaaatgacaaataaagaaagggatataaagcagcatttatttgaggaccagcagcagcagcttgaggaaaatgttgagaaattatcaaagttcttagaggcaccatttgatcagtacgaggaagagaaagtcatgaacgtaaggatgcaagtactaaatctatcaacaataactgataaactctgtcagaagatgtgagtctttctacaattagtttctaaattctgaaatgctcatgaaattcatgtttgtgtaaatgtatcctctacactcatactttcttaatcctgtgcaggtatgaatgtattgagaatgatttattgggttctttacagctaggtatccacaatatagccccttacaggtcaaagggtatcgagaaggcatcagaactttctgtttgttggggcaataattctgataaagcattacattgtggctcaagtggtatttatttaacttttgcgactatctttagtatattctatattatttaagtattattgtcactgttaattatgacttaaaataaaacaaagacgagtaaaatatgtgccatacaaaattacacccaaacttcatgtacttatgtgcataatcattactcaacaaagattaataaattttgtattttatatgtatagtttatgtgtacatacatcattactcaacaaatgttaagaagagtttattcattttgttccttaaatgattgatatatctgaaatgaaatttacaggacggacgacagagtcagatcaaccttctgggtctggaagttcagaagagagtggaatttcttctaggaaacgtgctaggatggagggtccaggtggggccttttttgatttgaatttaccagcagacaacgttgacagaagtgagctctaaaatatggcaagcctcgtatagaaacaggtgtacagtcagtctctactctagtgtaactaggctctctttcggtatcttaaatcttaatggtggattaaaaacccaagtgctttacatactactgccattgctaattttaacacattgttgttaaaatatcttggatgacatttggggctcctctctacagaagatcacttatacttaccaatttgaacatccttactattttgtacatatgtatattctcccctcaaatttgggcaaacctttaatattactttacttggagtttgaggcatttctttct

SEQ ID NO: 296413 - DNA, 5994 bp, Cannabis indica
cctccaattataaggcatcacgctgtgctgatttctttagtaatctttcggttttagacaatttaaaaaactaagtatcagatgtaggagacttattaacttttttttttaagttttgattgggtcatcggtagatgtagatgagaattgaccgcaacaatgaactaatctttcaaagaactaaacataattccaaaaaaaattgaacaagaacaaggcatgtaatctaagtgactattatgatacatataagcaatgaataaggcatgtaatctaagtgactcatgactacctcaaaaaatgagagatcaaatattgaacaagaatacaaatcaaatttaaaataaaaaaaaaagaagtagaaaaaccagagaattgaactcaaagaagctttctagtgtagttttttgttgtgtgattatttatattgtaacttctcaattatacaaggttaatgtatagcattgacaatagtttctggattgtactctatgactaaaacttaacaatgcccatgttgttgaatttaactgttatgcaattgttactaaaggagagataatctttttcaatgattcagaggatataacaatattgttgtctagtttggatttagatttttaggactatacaatacaacatcttgattattattattattattattattattattattattattattattatttattattattattattattattattattattattattaggataaatactattttgaactctatattttgtaaaaattaccgattaaactctctattttatcaaatgacaagttaaatcctgtattttttaaaatagtacaaaataattgaatcattatactattttatactattttagaaaatacatagtccaatttattattttacaaaataaatggtctaatcaataatttttacaaaatgcaaagataaaaatgacacccctattattattatcaaaattcattatttaaaaaataaatgaataagaataagaaaaagaaaaaaaacagagaattgaacccaaaacaaaaaaaaaacaactgaatttctttggctgtttagaaaaaacttttgaattttttagttttacatttggtagaaaccaagaccccaagaggtggtttcttgaaagtaagagtacactgaccatgcatatgataagagtaacgcaaatggtgacgccaaagcttactctgacacaaaaacctcccttttacttcaaacaaaatcttatctttcaacatctcattcttcagtctctgaatctcaagctcaaaaagctggaccttactagccaacatatcaacctcaacggacccagtcccacctttggccacagaaaaagcaggttcaacatttttagtagctataatggtttggccaaaataaagctcgaccactatgtgtttgaagtccacagcagccttcttgtttgggtttgtaaaatttgtaaaaagagtgatgttaacatttagaagattacccttttcgagattaagcttgttgagcttagtgagagttgaaactaccccgaatcgtggaccccagtgactgagaagggggtagaagatcaggagtgaaaaggctgcaagtgtcatgagaatcacggctgtgaagactgtgcaggagtagaatttgtggcgtttgaggagatccagttggctaggctcttcttcttctagagacattacatgatatgatatgatatcaaatcatttgggatttttatttatggaaattttgattcagaaagggagagtactatgatatcattattgaagaaaacttcatggaaaagtatcagacagacatggctaagcagaggaggcaaagtaatattcctttggtcttgcttccctactttttttatcatttactaatctctctctgctctgttattatatatatatatatatatatttcaataaagagaaataatcctttacgcttataaggggatgaatcagatgctagatcattttaagtcttaagtctgtcaaagttagataaagcacaaattagtttaaaattaaaaaaatgaatgaatctctttctatttttaaacgtggcttaatctaagtaatgtatcaaattttaatagatgatactcttattttttaactagtaaatggtacatatttataggcagagttaacaaaggaacagtaaataacttaaaattatgtgatgtcattattgtcataaagtttagtttgaaaacagttttttttttttttgctttgtattaatatattttatattattttgtcttatacacagtaacacagattctatgtaaaaatatataaatattaatctatttatagaatacgagttattccaactcattgttcacttatttattttgtgataaaactgcatgattcttcttaacatgatatcgatgtagttctataatgagtatatccaagaattatgtcatttatatgaaccgataatattgaacatttaaggtgagagaacaataaataaataaattaaattagccaccatcttcttgtttgtttaaatacttgaaaaattagcaatcaaagttaaacagtactaatcagaactaacttttcataatatcttctaaccatctatatatatataatttggaaggaacgaagtgtttgattcgtatccactttcgcttttgttatatgttatttccattaatcaaagtcaaaaaaacaacacaaatttttcatcaagatgtattctcactttcttgatcatcatcatcatatatggctttcaatagcttttggttcaattagacctcaaaaaaataaattgtaaaaaaaaaaaaaatctgggcgcattttgtgtatacatgtcaaataacaaagatcagtgctttgatttgcatttctttgcaaccataaccccattaggaggtctggtcaccatgatagtacatcgaccatgcaaccaataagagtacctcaaaagaccaccaaagctagatcttgctctgaagaatcctttcacttcaaacaaaacaccattgttcatcaactgtctcttaaatctttgtatttcgagctcagaaagccgaacttgactagtcacagcatgaaggtctaacaatttagtctcagccttaggtgcagagaaaggctcaatagattgagtagcaataagactccttccgtaataaagttcaatgtacatatagctgtagtgaatgtccactttcctatttggatttgtgaagtttgctagaaatgttagatcagcattgagtaggtaacccatgtcgagatatgctgcgtttagtgttgctgctgacacgtcgaacctcggactcctaggacggaaaatgaggtagactatgagtactgctaggcctccgaggattatgacaacccaaaagattgcacagaagaatgctactaaccatgcgaatgagcttgtcttgcgttgcggtggcataatcatattaccatcgtggattggcccacgtcgccaattgccccacacatttgattcttggtcatcttcatgacgtggcacggtcgaggcggcggttgcggcggctggcggaggcttgggatggtccacaccggttatatctggaggatgttggtgattatatggtggggattggcctgcgcgtggctgcaggggtcggtggtctctttcgtcgtatcgatcaaacggttggtggtgggcttggttttcgtgaccactagggactactattgggaccactggccgggaagaatctttgtggtgaccgtgcctttgttgttttgttgaggacgatgatacccttgtggttgtggggaagttgggtcacggtggtggtggtggtgatggcggcggcggcggcctggtggtgtggtggggtcatggtggtcatcatgatgagctggtggtggcccttgtccttggagttgtggttgtgtatgtctagcgaaatggggattggtttcgttgtgtggcctcatggtatattatggtattatatgaatatagtaataataagaataatgatgatgatgaacaagtgtagtagtagtagtagtggtggaatgatgaagaagaaattaaaggattatgataaaaggaattgtggttgagaagattagatgggatcacttgaggagaacttcaaggatgatttatttaaaaggcaaagaatatcaaaggatcggacatggctaagcaaaggaggcaagtaataatatatatttatatactagtcctaccttttcaatccaattatatatgtactcataacaaccagctacttagctagctatagactaaagacaatgatttcgaatcagatacttggtgagagagagcttaattatccttaataatgaattagagccaagtttcatttacaagattcaattatgtacatcaacattaaaatttgaataagtagagtttaatatgaaataattagagtttatcagtgtttttttcctctcctcttttaaataaattaaagaatgttatgtagtgtaacagtctcttaatgaattcattaactggaagagatttaatttgattggctctttcattagctctaatgaattttggttctcattctttctttaatccgaaaataagtatattcaaacttataattgctttcttcctataatattgatttgtaaagggtataaactagatttaattgtatacataatctagtgttacattcaaattatgaagaagaacaagaaaaatatattatacaacacaatgccactttctctacctagtatgtgtaaaagggtacaagatactcaatatggatttcaaataaatcattcaatgtacaggagatttccactttctaactaaacaaaagctcacagcacagcttcattgtgtaatggactgaaccatgccaagtcaattttagcccttaaaatggttagggcatctcttctataacatctgcaattaggctctgatgctaccgagctcgtggatatcttcgttccaacgcgagattcaaaattatcttcattcttgaagtagatcagggaatcaatgaacgtgaacaaaaatattcccttcatttcctcttacttgccttttcccatttggatgaagtaacctggtcaattcaagtactaaaacaacttcagataactacgcaggaagggacagccagtttcaggtaaaagaactgggaaagcaacaagttaccataaaaacagagactttagaaacttactaagttccttcacattctgttttcccaaaggcagcattcttcagcttcagccatccgtgggtgataccagtacttcaaaccaacacagacataaggggacacaagaggttaaaatacatttatacgttacagttgaataaatttacaatctttggaaggacacaaagatagaccatacaagaattaagagtaatgatcttcaggaacttttagtcaaagctgccaaatgttcattcctgtatttcatacagacagaagcattatcgatcaatcagaaaacaatgttgaagatctgattaggatcgctttaacttgctcagagcataccattagcagaaaacagttggtatgcagcaaatctcttttctgagagggacaatatgcaggtagaaaccattttgcaagttcactcagcatccattgaattaatagcattaattaaagtctcagaaacagctgctccaagagtaaagcccttctccatcatctgatcccatacactacatgcctcacgtagcttcttttcccgaatgagacctcctattatcaatttgaaagtcacttcatctggacataatcctttagattgcatttcattgtatagacacatagcttcgctaactctagaaactttgcaaagcccatttataagggcattgtatgaaatcacatcaggagtgactcctctttcaaccatgtcactgaaaacgctaagagccatctcaatcttctttgccttgcatagttgatccactattgcagtgtaaaa

SEQ ID NO: 296414 - DNA, 3026 bp, Cannabis indica
tcagtaacaaaatctccattatcggtctgatttttttttttatgtggttattagctttcctaccagtggcatgggagtgaaaatacttagtattagcatctcaagctttcaaccaattaatacgagaacgttggtgccaataagtttcttcttgttcaaggagatcatgaagtattttttcagattgatgaagatcagagaaagatgcatgacttcagagatcagatgctctaaggtctgagagtttttttttgtgcatcatatatttttctcttcatgttaccatacttattaatgtgccatgattgcagatgggaggagacagtctgaatattttgaaccgcctggttttaagagctatgatctaaagtggtccagtgacaatccacaatttcagtgcattcaggatcattaagccaaagagcttcatagcgaaatcgtgatgtgaattttcggttcaaaggaggatcattgctggtgtggaattcaattttgagtgccctatgattcgaggagtagtaatctaggtggtgaagacaagtattatggaacacattctgccaagaaggattaacaaatccataatccagacattctttgatattaagagagccaggggcacgattattccaagtaaaatctcaatctgtgtggtccaaacgtgagaggtttccatagtttatagcttcatgaaagttatcaatcaatgtaaggtccctgatagcaccacaaactttgagatcgggtgaaaatatttcattaaagtcccccataaccaaccaggggtccataggggaaatatcagcaagtcttttgagtagtttccaagtattaggtcttaaatgtgtttcttgagcaccataaaaataagaaaaatggaatttgggaccattgtcacactgaacataaatatgattcattaaataattctgtaatgttacatcaatattatgtttccataacaatattaacccatccctaagacctctcgtaggaacttcaatgccattaggaaagttcaaagcagttctaattttattaatagacctagttggtaattttatttccataacaaacaaaatatggggagcctgttgagaattaagcaggcataattgacggaacttgctcggtttccttaacccctgagtgttccaacttatagcaatcatggcgagtggtggggttgctcagcaacacctgccagactagcttcttcttcgtcaacagaatgtgtagataagtgatcattcactaaggctgtaatggcttcggaagcttcagaaggcaaaacatttgaggagttaattgtgtccgtcatggagtgagtggggtcttatattgtggaactttcaatagtagtctaaaggggacagcgtttaggtatggatcacaaggagtcaccagtatggacaacatggcgtttgtaggtatgtgtggcagtaggagggtcattgatgtttaaggttgtgttgggaaaagttgatgtattaggtgggctttgagtagagtgtattggcaaggttgattctggcaagatgttggggggttaattgaatggtgggaagtagaatgtggttcagtgttggtgatgacttttggtgagaggctgggattgtttgttattatattagtttgctgggagagtgcatggatggtgtttgtggagtggggggttgcagggcatggtggatggtgttgcggacaaagagagttagcaaaggccatgccacattattggctttgctttctcgcaaagaacggccagagccaggtcgaggtagcgggtcaccttttagccagaccccataaggcagagaagtatctccaccattatcctctacctccaatctcccacatttgtggcaaaaattgggtagtttatcatatttgaaaccaacccataggctatgaaaaatgttggtgaatttgaggaaagtgccacggagaaggggttgagttgcatcactatcgactcagatgcgcataaaaggaccccagccttccaataaagaatcatcatcaaccttcaaaaattcatccatatcagagccaattttctcagccaaagttttacttttcctaaggaatgggagaccatgaacgtgaacccaaatgggaatgtgagtaaagttagattcaataggaattttaaaattagaaattgcagcaaaaataatgggttgattattgaaatgccaaggttgataacagagagttctctgcatatctccagcacaaccaaactgaactagaaaatagcccttccgatctgtaatggtaacttcaaacctcttggaccatagttcagacatctgaaagatgaaggcacctgggttaacttttttgtgggtgagaacataggcaaagacactccatttagagatagtaggaatggtagaagtgcttgacactcctatttcatgaacaactttttcttgttctgtaagtttaatttgggaggacatatctttgagaattcgctccataaaaagaaagttagggtatgggtgattcggagagaaaaaggacatgtatatatatagtgtattttcattgtggagatgctgatggaaaactggtagagaatgagaaacatggagtcggagtggaggatgaacgtggggttgacagttaatcggaggttacacacgatcaagggataatggagaagaaaaccgccatagagcaaaaaaagagtggacgctcttatataataatccacatttttctattttgagttaagtatgtgtgtatagaataaatgttaaaattagctgaatgaatcaaagtggaatatccatgaatatatttatatttatatatatatatgatatgatgaggatgatattcattccactttacatgcttatctaattctaacacacttattttgttgggatttgatctcataattcctcactcacacacaccccaatattatttatatataaaaagttacggtatcatcttttatatttgtaaaattttttttttttttgaaattaaactcttattaacaagaa

SEQ ID NO: 296415 - DNA, 7264 bp, Cannabis indica
ttttaatttaactgaattcatttttactcttttcaccaagattgacttatactttttttttcaaaaaaaaaattaataaacagagatatataatatataaggataaaaaactcttcaattttcattcatattttaagtaaaattaacatgtactcataaactcaaaacaataaatataaagcgtgattgtgtgataagtattgcttgccggtatgggatttggactaatagcctatgataagtatagttagttattatgccttgtctaggttaatttggatttttgcctttttatttaccaaattgagattgttgagatgttggattcaaagacttttgtacaattctgttcaattttactaatatgtcgattgtctatgtaccaaattatgcctcctaaactttgatgtttaccatatcgtacgccccaaactttgacaggtactaaattgtgccactgaactttcatccatgctagaattctattagtaaaattaggcaaaaatctttaaatttcacaatctcaatagttagaaagaaatttttaacaaactaaaaaattcgaagacatgatttagtacatgtcaaagtttaatatacaaaattctaattaactttaaaattatgcattaaaatattacacttagtaacgcaatagtttctttcaactcatcacatttaatttagataggaccagtgttttaaaaaaaacaatttcacatcgctttgtgtaaaatttcagtttataatttaggttcactatcatatcttatattattatcaatttaatattagataagaggagtgctactttcaatctcttattataaaaaattatgttagtgtttgttatggttacaacatcatttctgtaaattttttaaacttttcgaatagtttacagtgccgaaaataagtttgaaattttttgagtacgtgtggtagacgtaaacatcaggaactttgttttcggtactgtaaattattcagaattttttaaaaattatagggatgataaagtaactataacgaatattgctatgaaaaaaaaaaattcgatatgtgattttggacatagatgttgactaaaaaactataataggaggttttaattagcaattctcgttagatatttattcattctcttatttaatttttattctaaagttactattggtgtaatttaatatctacttaaatattttaatttaatagctaacatataaaataaaaaattagtcaaaccgactcataaagacaacacctcatggtaatattgagtaccactaatatttaataaaaattcacatacatataaacggaaaaattctaatagaggttttattttaccctagctatacatagaaaaattataatctatatatatatatggaaaaattcatgttttctttttttctctgagaaatgctaaaaaacattagtgatacttatcatccttttagatgttatgtcgctattggtgtaattaagtatcagtctcatataatttaatctaatgacttttatggagtatcgctaaccaatcgcaagacataatttattagtagtgttaggcatcactaatgcccaataccaatactctttttccatatacatgcaaaatatattattaaaaatttgatttcaacatcttaacttatttttaaaaaataaataaataaaaaaaaatgagaaattagtgtatatctactataacaacaatgtgttaaaccatatagtacgtaatactactaagcactgacctgacttggtattctagagttatagaacactgaagatttcggtggttcaaaggtataattcggtgatgtatgaagataaatggaatagagaccttgatgtcctttgaaaaacctttcccatagaggtgctaaaggcatttttccttttgtcaagaacataaaggctacctttgggatcctattgtatggaaactcaacaacatttggtatcattgaggctctccaaaacagttcctcatcgctcatcgaatgttgtaactctttaggagctatccaatctccgaattccattttcactctcctctttgaaaactcacatgacggtaaatcagaattgtaagatgtatcgtttcggggatgagaatgtgtattcagttgaggaaagaaagtgtcgtctgatgagcttaagaagtttatgatacgattatgaatgaagagacctagaatcaaagcaaagaaagtcatcatcaaagagagtattattgtggttctgatatgaaaattgcttaagtttgcttctcttttgatgcgtatgtaaaggtcatttacaaagacggttattttactatctttcatcataaaccaaagtaaaaaaaataaaaaataactgttggggggtaaatttttggacacatgagaagtgacttctaattatatattgctaggattaagtgcatgcatgactatcatgtgtaaaaaagtttataaaagaaaacgaaaaatgggtattttttaatgtaattttagtcgtattaaacacaacttgaaacaaagcatgattagagagaagagtagaaagaagaaaagagaaaaaaaaaatggtagttttccttttcgggtgagtaacttgtgacggtatccggttattgagaaagagaagatttttggccaacaaaacttaatttggagatggggttttggtgagagtgaagaatatgaagaaataaaagaaaaaaaaggtaactttattacaacaagttcatatttttcataagaaccatattcactacaccaagcaagctctcttgccttttatcattaggatagtaatgtatggctttaccaactttaatgtcttaaattatgctgtaaatcaaattggaaattattgctaaccctttttaacagaataaaacacagcaaagactgccacagcgctaataacaagtaactttgaagaccttaacttgtgatttttcgacgtaaagctattggtaagcattgtgcaaatccaacgagataagaaccgcagcccacatgtttttcggaacttctggatggaaaatccctacataaaccaatgcagcaatctttaatttagatctaatatgatttcaaactcaatgtggtaagcaatactttaagaagttctaagatttgacattggagtagtctaacctaaagtttggtaggtggtgaaatgtgtcaaatgagaagctattcctcaatggaactataatttactcaagtcgtcagcgaatgtagcaacactggcgttgaaagtttctaaagagaaaccctgcacattctcaaaaacaactgttggattttgactctagaaaggaatacacatatccccatttcatgcaagcttgcaaaaataattacacactaactaattaagcattatgtgttacaatggagtggtagcaagaaacaagtacttttgatttcgaaattatgaaaggaaatacaaaagttgaggatttagttttatgtgaactaattttattggctaattatgattggctaattatgatttttgccccctgaactttttaagttgttaaaaatttccctcgaactattgagattgtaagatttaaggagttctgtctgattctattcaactttactaattggtaattgtctatgtactaaattgtgcccctcgaactttgatatctaccgaaccatacccctgaactttgacatgtaccaaatcgtgaccccctgaattttcatccacgtccaaaatttgttagtaaaattaaacaaaaatccttaaatccaacaacctgaatagttcaggaagaacttttaacggcctgaaaaattcaaaggtcatgacttggtatatgagttcgggggacaaaaatcctaattagccttttcgtaaaagtatgctcaaaattaacagttaacttccaatttcctatttaatatactactattacctacaaggaatcaaatatttcaaattaagacaatgtttaagaagttgatcaccaaggctcttcttaaacaaggactgaccacaaagcatgccaacagtggattattttaaatggggaataagtagatccagccgagctggatctttcataagcatgcgaagcgtgcatcattcgatcgaaatgaacataattgtatcagaaatctgtaataaatattacctttggcaatttatcttgctgggccagatgatccacatgaagtctgacatttgatccagcaaaaggccatgctcgtttatcaacctcggaatatacatttgctactatgtcaaacagtgtaactgctccattttctatggcttttagaatagaagcttctctacttctacggttcctgaaaattaaatattacaataatctgaaaatttatattgaaccacaatgcatgcactgtcatgaaaagaagaaagagaaagtgagttattttccatactgtagatatccacaaagcatgtgctttggccataggttaaccctcccatgcattgggatcaaaacatgtggagaaaggtccataaatttgtaagttgatttgaaatactcctgcataaacaaaatagtttttcataagctgagttgtgattttcaaatatttaaacatttagcatatgatatctctatgcttgacatttaattcaataactttttggggttttaagcaaatcatttttcaaataattgacctccacaaatgttaaagtgaataatatggaacttgtccacaactctttaaaaaaacattaatagttgttttaaagacattaagtgaaattaataagtccaccctattttccatctctcatcttagtgtcaactactttgatctcctcttcggtttatgtgaacctatttgtcaatagctcttgttgaaagcttaaagtggctatacagattggaaaactgagagagcacattgaaaatggcatgaattatatgaaacctatggccattggatccaatcaattcaggtatcaaaacacatgaataagtagtagtgcaaggtatgaaacagcaatgagctaaaaacacaaattgaagtacttaacagaagcaaaagaattagttcataatacacttactgtcatatttccgccagaggtaacgtccaagacagcacttccttgactgaaacaaacacaaaagaatagttatcagtgaagattctagccccacaaaaaaaattcagaacatgtaaaacataaacggtgaaagtagtagagatcagggggttactttgtctacaacaacattggttcatctcatacttcaaacactagaatggtaaaggaaggaatgaagtgaagtgtgtactactaaaaaaaatcttaccccacacaatgatcaccgacaatcaaggaatgagtactggcatgaagcaatgccaaatggccatctgtgtgtccctggacaacaaaatcattttaatatcagattagagacaacaatgtagagaaaggttttggtgatgtgtatagccttattgctagctccaagccgagatgatactactggtataattaagtgctgactcgagaactcgatctcagaaccatgagttttaccaacattaaaaggaaatatgctgaccctaagattaataaaaagtacataaaccttctattattcttttttcctttcttttgctttctttattaatttgtacatgaagttcataagtagttgtggccgttggtgtcatcatcattattattatcattgcaaaacagacaaataaattgtaaattctacccttgttcagcttattactttcattttatattctaaaaaatttctagtgtaagcaataccggagaaaaaacgacattcaatcgatgacccccaatacaaatgtcttcacctccagtaattgaagtatatccaagtgaccagtcatctgtaataatacaaagacaaatgtctgaaaatataagctctcaagaacaaaaaaccatattgatattataggaaaatccagtcctgacgctaaatagtaaaggcagtgaaagcatagttccaaaagtttagtggttcgtcatgttagaaactcaacaaaaagtatctactttatcgaaatatttcaatggcaaataataacaaagaagaaatggaaatcaagagaatatttacaactagacacaatcaccatttgtattatgtcaaactgtaacattgtaaccttttccgaggcgacgaaatgtattttcatgtgctaataagacagcatcagggttgcacttttggacagctgataaacctgaacaaagaaaaaaaaacaataataaagacaacgaacttctgataagctgcttaccaatacttaccatctacatctgttatgtttcttatcaatgaattcggtctgcttcgagtgaatggataatctgagaatgagaaaaatggaatttgtatacttaccatctacatggtcgcggtgatgatgagtaagaaagacaaccaacttcttgggcagagaagcaacaatattcttgagctgaacatgtaaacagcataaataagaaaaggaaaaagaaatcacacatcataaattcacatattacaatagtaaaaagtaagagatccccattaggatactgtagctcaagatcttaggcactgcataatgcatactccatactctagaccaatgaaagagaatctcttttacttaggtcaagcaaaagatagcaaaaactaaaattcggttgtcaaaggcagcagaatagcaatgtttcaacataaattttcaaggcatacctcttcatggaggtaagagtgacaacctggatcaactattaatgcatctccactagcaacagaactaatatctccactgtagtctgaagaacaatcaggtgcaaatacaatcaagttcgttgtcaaaaaaggctttcctgtcctactttgcataggtactagagtaacaccgggaggatattcctgaaaatgagaacaaatattcactgtaaaagctactacaacttaatgcaattggatagaaaaaagaacaaatagagattttatcaacaaactgcaaagattgtgcatctcacaaaatgataaataaattttataccgaagacatctaatttatatcacaaaagctcttcacgttcttacatatggctcaattctctaatgggacaatgtccacaacattcccccaagatgatggctattttttgctcatcaatcatattgagaatcatattgagaatcatggggttccatctcaaaccaattggcaatgagtggagtagcccatgt

SEQ ID NO: 296416 - DNA, 5714 bp, Cannabis indica
ttcatatttaggatgttaattcaacatacttgttagtaaatctagaccctggtaaaatattcctaacacaaacctctcagcttggttggcctgtgtagcccctccccttgccatcagttcatcaatgtggggccaattgaaggggatgtacagcatatacgtttgctttgtcctgtctaggtttggatcctgactgatatactgtgcaataatgacggtaacctcatcatgagagggtcttttcacaaaggatgatatatgtccctctagcaactggctgaacaatatatgtctaagaagttggaggaaattttctccaacactagttcatttcccaaataaagtgatcctcgaatcactacttgcctagtcagaataattactcgaagaactggccaaagaaccactgctgacttccaagttagaataagtgctcgaagaattggcttgagaatcactacttgcccagagtatgcgctaatttgaacagagtaatgggggtgtttatagttagaattcgatgaatcgctagatagctcctcctcaatggtcatagaaaaaatggacaatttgctcgaggacgatgacgaactatctacatagagggtcagagtatgctcagttaagagttagaataggtcgtcgtcaatctagtgttcaccttcccagaagtcaattatgttcatctttagaaggaaaggaaaaagaggtgaaacactgaactatattgaaaggtttttcatataaaacaccttcaacgtgccaaccagaaaagagtaaagatccaacaagaagattttgcattttccttaaaatatttctagggaacgaaatattattagggtatcgcaagaaactcagaattcagaaaaactacaacagggggaggcaaaaggatttggatgcgtaaaaccaaacgctcatggtcaatataactcctaacatataactaaactactctaaatcgttcactacttaagatttttgttcaacataaacaaagatgataccctcccatgattatcccatcaaacaaaaaaattcaaaatcataaagatcaaaacttaaaagaaaacttcattagtgatggaaaatggacttactcacggttcaagttgaaatcttgacttgctcgatgaaacctcctgaagcacaagtgatgaagctttaagagcataaagggagaaaatttgtaaaactcaaagggtgagagtttttcttcttttatgaggctttaggaatgcgtaaaaggaaaaataggttgagagaggggatatttatagtaaacacaaaagagagaggttgtgaagaaaactaagtagaagataggaaattataacgtactatattagagttgttgaatcagctagtgcaaatccaacttatctttccagttcacagcttggcatattgatctcatccgatcataggcgtctgactgacctgcgctagcgaaagctgtcgttatggtcttgcgagacaacgtactgcgtggactgcatggctagatatgtttaacttattacaggtccgcaatccacaaaattagctcttaaatccctcaagaccaggcctttatggttgcctacaatcaagggacgaagaaactaatcaacttttattgaattatacttgtaactctataaatagttgctcactttcactgtttgggagatcaaattctttacttataagagagatattacgctgcaaaaatgcaaaaactatcatttggaatccattgaagtatatacaaagaaactcacttgactctgattcttttgatctccatacatcttcaagaaatattaaacaagggggagtaggttataattaccatataatcaaggccgaacctatataaaagttcttgtgtcgtttatttactttcttaaatttcgtcatcacacatgtttattatgatattatttgattccgcgcagttgattaaatatgaggtcaataatatttttatttaatttaattaggctaattatgatttttaccctccaaactttgacatttactaaatcatgccccctaaatttttaaggtcgttaaaatgtccctcgaactatttagattgttggatttaaggacttttgtctaattttaacaaaaaaagtctaacattgataaaagttcaggggacatgatttaatatatgtcaatgttcgaggggcatgatttggtagatatcaaagtctggggagcatggtttagtacataaacaatcactgaaaaagtaaaattgaatgaaattaaataaaagtccttaaatctaataattttaatatttcagggagaatttttaacagacagaaaaattcaagggcatgatttagtacatgttaaaatttagggggtaaaaatcttaattagctatttaattatgtacatataatcgaatcaaatagttttcaattatataattgaactttaagtgtaaaaaaatgtatataatttgctcgtgtcatactgtcactataattcattctttttttggtttactaaactatagaaaactttgatagctaaagatcgagaattgttaaagaatatttatggtgtatacttttgtgaattgtaatattgttataagtgtaatttaatattgagctatcttactctaataaagattataaaagactgctagctaattatagaatatcactcataattataatattaggtaatttgatgccccatatcaatatattaagtattgactatattgagtatcctcttatgaatttattggcatgtttactaataagtagtagtgtgaatcaatggtaaggtaattattcccttacatttgtttacttacattataaaaattaaaaaatggagaacttgattaaataaggaagaaaagaaaaagagaacttctctcaccaattttgtaaggaatgtcattaaaggtaatgaattttaattatttttattttattttttaatattaaatatataataacaactttgtcctttaaaatatgtcttacaaaaaaaactaccatatatatataatatagtttaactcaaaacagtaatttagtcaatttaagcattccaattacatttcttaatagagtaaacaagataaattacaattattctatttccaaaaaaatttagtaaacaacatattataaatattgattccgattattttttatttattccgttatacttctccattaatttatttagattcgaaatattgtataataaacttatcattaagtaagtcatattcatatactaaacaaggcccattaataagaacagtttattattgcgtactccactgtatgcaataaatgagcaaaagagaaaatatagataaatgggccgtaatatacggtttggtccacgtgagtgagcaccgactgtgaatggcgtcagtccatggatccaagaagaagaagagcctccccaaactgttataatactccccacttccccattcactacctgcaatgccaaacaatcagtttaagcactctgagcactccaacattgtaaccatggttaggctattagtgctgttcgccctatgcgctcttccggctcttgtcagcgctcatcttcccaccggtaaacccttccacatcaaaggccgcgtttattgtgacacttgtcgtgctgggttcgagaccaccgccaccacttacatcgctggtatatacaactcagatcatgacttttttagttatttgagcaatttgacatataattcttttcatggttgtttttatttaggagcaaaggtgaaaatagagtgcaaagacggtgacacattgaacttaaagtacaggatggaggcagagacagacgaaaatggaacatatgagataatggtggaagacgaccacgaggaccagatctgcgagtgcgtgcttgtgagtagccccatggccaactgcagagtggcggacgagggtcgcagcagggccagcgccttgctcactggctacatgaacggcgtcattaacagaaagcacattgtcaacaacatgggattcttgagggaccagcccttgcccggctgcacagagctcatcaagacctattttcccactgatgacgagcagtgatactactactactattactagactatttaattaggatataattcattattattattatatgctatgctgtgttttctttcttcatcgatggtacttcttgtacctttttatatgtctctttttaattcaaattatgctatataatgactatatatatagtagtctatatatatgaacaactaagttatcacttaatgtgattgagtgtttcatgaatcatgatcggtttcatattattattgcaagagtaaggtttactatttatagttcgatcatattaatttattgattaatgttgaaaacatatttagaggcatgtatacgtaccaatttgttaagttcagtatcattaattatatacttttttcacaattaaataacctttaaacaatatacataaaaggaaatagaagagggaaatctatataaaaaattatatatatttcatgaattcatttacattttagccaccataactagaataagatctgttgagttttataccctaaataaaactattcaatataactttattatttaggttaattagtaatttttttcccctaaactttgatatgtaccaaatcctaccccctgaactttattggcggttaaaaattccccctgaactattgagattgttacatttaaagacttttgtctaattttagtaaaaaaattctcacatggatgaaagttcaggggacatgatttagtacatatcaaagtttaaagggcatgatttggtagatatcaaagtctaaggagcataatttagtacataaacaatcattgaaatagtaaaattgaatgaaattagacaaaagtccttaaatttaacaatctcaataattcgatgggaattttaacggccaaaaagttcagggggcacgatttggtacatgtcaaagttcaggggaaaattactaattagcctattatttatttaaaaagacaatagaaaatattttatgactatcaattgcttggttcacaggttttatttaatgtgattatatgtgtaatatataaaatttattaaatctagaacataaaattattcacaattattgtgtgatgtattgcagtagaaaataattataatatatgattcgaatatttatgtactgagatttatcagaacactgaatttacaatgacataataatcgacaatacggtctatttacgctaagaaaaagttgtatgtctttttcaaagcattggtaaaatagacttgaataatatatataaatttatatcggactagattgatatttgaaaaccacctctttgtgcacatacaacaaccccaatattaactcatggaataaaatttattaatatttaaccgcgtaaaaatttccatctaattctactaaactctaaatatttatatattcatattttatattttagttccaaaaatcttagtcaaccgtaaccatccactaattaaattactaggtgtaagatctgaaatatttgactatgtttactattgcaatttgtattaacattctcttacatcttccttaaaaaattatgaacctccataatgattaaattgttagactttttatttgggcttacattaacttttattggttttatt

SEQ ID NO: 296417 - DNA, 930 bp, Cannabis indica
ctttattgatgttgaataaaatagattacattgaaatggagttttatttagggcataaaacctaacacttagtgctaacttgggtgccccttgtgtgcagttgacactgtcctatcctgggataggggccccatgtgttgttttgttcttgcaatttttttgggtaaatagaggtaaatacataaaatgcattgactttggacccacagacttagtcctagcctatggggcagggataatccttacgcttggggaccacacaatattgaaagatggcttacatacatcgtttttgtgtactatagtgtcacagtagtggtcataacagaaaagggagatttctttttggtgctacatgcattcttaggctcaatcacaggggacaatcctctgattaagtggcatttggtgccagagggttgccacatcatcctggactaggtctccaggatgcctcttggaatgccttctaagatgtatcccaaattctcatccggagggtctcaactacttcgtcttattcaggcgggatgccattccggatcaagagaactttggtcttggacgtaaatgtcctgggccatggataggtgtgaggctcatccttccatacagattgggtttggtatcttattagagctttttactaggacaaagatgattaattttgaattaggaatgacatgtgtccccttccaaaaatacggatggtagtgataataatttgttcaagtcacggtaaaccccactaagttacactcaaagttgtgaatcagtgtatatatgtatattcttccatcttgttatatatatatgtatgttgccactactacaatttagctttttactgacactatttagtgacacgtacaaaaatgcaggtcacgaaatagttaggagtgagttttagtgacatgcataattagactc

SEQ ID NO: 296418 - DNA, 3874 bp, Cannabis indica
gtaatttcgaatataatgtattggttgttttttagtgtaaaaaaataaatgtcatttttttattaaatttttgaaagtataaatgatgtgttatatgtgggtctgttaattcttaatgtgcatttaagtgactgagaaaaaaaaaagctcagaacttcataatgaaatgttattcaggtgagcattgaatattagtactagataaatgaaatgaaaatagaaaataaaaataaaaataaaaataaaacaagtgtagaaaagaagaaaaaaaaaatccctttttgggttgaacaactaacctcctttgttgctaattataatatcagttgcttatctaaataagtagtaacgagtaataatcattacatatatttattaaaataaaaaatcaattatgagatttataattcaaataaagtttaatattttaaaaagtaatataattagtacatattttcgaattatttgcagctatagagtataatataataatagacaagatgtgtttattagttcttataaaattcgacaaactaattaataataaaaggttagctagttataatatatataataagtatttggtacactaggagtataatatttatattggttgcaccttaatttttgtactgattaatatcattaattaattctaattagttgtatggattgatatatagaatagacgttggcctagttaatggatcatgattccggggaataagggactgcagtctccactgtagcctctcaattatgtatttattttttttatatatattgtagagttatttgtatatatataaaaatattgtttacttaaaatttttataaaataacaattaaggaattttgaaaaatgtacttattttaattatttttaaaatatttttttaaaaaaaataaagcgttcataaatttaaaagagaaagttatacatcccgattgtaaagataattagaatatttttagttatgattgttaagagctggtttggttgttagatttttgttacaattatacagttatttttttttttacaatttctagtttgttacctctcttgagcttatatatatatatatttatatatatatatagtgtactactcatcttgattaaatgagatattatcttttagttctttttccttatttttcttttcttcttcatctttcttctctcttttgttaaaactgttctttgttcttcaattatggtaagacatagtaacaactctaatatggtatcagagctatttcctccattgacagctaatatggtaagcactggagttggtaatgggctccacatttccctcagctcctataaatcttcaatctgcagcagcgagaaatcaagtcaaagaagtagatgattattattctgtttacttcaatcacaccttgttgatcaagctcaatgatcataattttctcctttaaaaacaatagattctagcagcaattcgtggcaataggttgtaaaagtatattcaggaagttgctttaccaccgcagtacctcaatgatgcagagcaggtgaatcgagttctcaatccagcttttgtgaaatgtgaatttttcaaaatcaaatactggtgtctcggcttctatcttccatgactgagagtctactcacttgaatggtggggtgtaatactgcttgacagatctagagtgcactagaaaaacatttcacccttcaagtttcatccaagattctagagtttcgtacaaagtttcaaaatcttaagaaaggtaccttgtctctcaatgactatcttctcaaagtgaagcatgttgtagatttgttggcctcaattggataagttctttttgctcgagatcacattgcttcaatcttcaatggttgccaagcgaatatgatacgtttatcatatcttcaaacactcgaatagaagaatattcaattgctgaaattgaagtcgttctagctactagcttcagaatcaagaattgataagactggtcgggagattaatctcagtgtgaatcttgttgttgctagcaaaaatacagatcctaatcagtggtcatatgaagcacacttagctcattttaatcataattctaagaattcaggaacctcttgaggtcagtttccatttaatactcttattattcttcacctaattcatctagttttcatggaaatataggatctaattctagttccatgtcatgaggtagatctccatcattcaatactgggagaggaggatatatacaaatttcaacatcctggaagcttagttgcatagactttagtgtcaactttgccacaaattgagtcatatggctcttgagtgcttccataggtttgataagagtttcactcgagtcttcccagcatttgaaggatccacatctatgcaagttaatgtagctcagataaatcaaggtggagatggaaattagtaccatggtgcaactaatcattgcacccttaatctgaataatctcatgcatagttcaaattacaatggataagataggctatatcttggtaatggatcaggtttgacaattcaacacactggtcatatctttcttaattctaatagtttagataaacctttgattctcaataatttgttgtatgtactagaaattactaagaatctttttggtgtctctaaatttgctctggataattatgtgttttttgagtttcatccacatgtttgttatatcaaggaataggtgaccaaagccacaattctaactgggacacactacaataatctatatacttttgatccaggatgattccaagtattgtcctctccactctctctaatttgttcaaagctcatcaagtcagctcaaaaatgtgtctgttttgtcaccacaagttcaagtgattctgcactcagtgctagttcatgttctcattgtaataaaccatctgtttctatctttgagttgtggcataatagatcaggtcatccctctgaaaaagctgtacaatctgtattgaattcttgtaatatctcttataacaaaagaccttattattttgtgtgtcaagcctgttgtttgggcaaggttcacaaaattccattcccaaaattctctagcactgtgtatttagaacctttacaacttgttgtatatgatttttgggtccctctcaaaccatttcttataatggttagaagtaatacatgagttttgttgatgcttgtaatagattcacttggatatatcttctaaaaataagtctgaagctcttaagacctttcaaaccttttaggctgaaactgaactacaaaaaggaaagaaaaaagcttcattaatgtttgatctctcttgggtttgtttcatcaagtctaatcacaatctctttattcaacacacaaccacatcagttacacttatccttgtctatgtcgatgatatagtcatcacatgatgtatttttgctcttatcacaactctgattgcaactctggattccaagttttctgttaaaaatcttggcaagtttcattacttccttggaattgaagttcagtataatgaaacagatatgaatctgtcctaaggaaaatacattataaatctagtgctcataactaaaatgcaagataccaaagtattgccaacacctatgactagtggcctaaaactatctgtattttatggagatctagttgctaatccacaattatataggtccattgatgcattgcagtatctcacaattaccagaccttatatttctttcagtgttaataaagtgtgccaatttattgctaatcccttggatactcgaaagaaagattaaaaaaaccaagaaccgaccgaacatatataatatatataatatatattatttttgtaca

SEQ ID NO: 296419 - DNA, 1608 bp, Cannabis indica
acgtttttacgttttttttcgtttttttttcgtttttttttagtagtttagtttacgaaaataaaaaaaaaagaaattatattgcatagtggacttcaagcattcaacttcaaacaaaaaggttaggacctcattatagttgttttctaacttttcggtaaagaaaaaaaaaatgttaagaacataatttttacgtgttgaagtgttaataagttcacgagtaagttgtattgaggaagaaaataaagttctttctctaaaatttggtagcatgtagatttaataccaacaaaagaaacagagaagagccaatttacatctaacctcataaatcctactcataggcaataatagagagtttaatacttggaagaaaatacaatgagatacctaattaaagcttgcatgtgcttgctcggtctctttgcttttgacatatcacattagttttattatgagtgcctaatccaaaagtgattatacattttgctcacacgccttcctacaaattgaaagaggagcctaactgatgagcctggatcactcatctatattatttttaatggatgagtgatctaagttcgttaccaaacgccaaactaattgttcgagacaatattagttgttcacgatcgtaatgattatttgggaccattccacccttggacccttatcacaacacttagacatgccctaaatcattcatgggctttctttagaggtgacacatatcacaaggacaacaaatagtgtattccaaaaaatgatgaagtatactattaatacacttaaattgtatatatacgagaagttgtgtaataagtattgaattttatataatttaatttattaatttttattgaatatcgctaactgattgtaatgcgccacttttaaatagtgctaagcaccaatagtactttatagcaatgctctatgtatataatgaagttgaattaatattaactacattattaaaaatggtgtagtacccaaaaatatgttaggactaaaattaaatgtgtattagggctgaatatttacaaccgaaaatttacccacttagcaaacccagtcggtccgaaatctgaaaaacccaaaaacccgatcacaagtaatgatatatcatttttatatttttcttttcaatttttctgtttttttatatggaaaaatatataaaaaatgatattttttttttaaaaaaaaagaccagcccaacccgagctcgatcaaaacccacccgaatactgtccaacctaaaaccgatccactcgcattgaatctcgaaaacccatttacgcaaacaagtgagttcggattactaattctatacactcgaacccaaaaacccgataaaacccacctaatgtacactcttaaaattgcttatgtaaaatgtatgcaactcaagtgggccttacattactcatagtcatatatttaatatccaatataaaaagaaagcctactttaatttattgaactgaatctcatttatcctttagtcaaatttagtaggtacactacacatgtattgttgtttttagggtaaataccattttggaccatctgttttgcaaaagttaccaattggaccctgtgttt

SEQ ID NO: 296420 - DNA, 3966 bp, Cannabis indica
taaacttgaaaacaacatgtaaacataaatgacttctaatcttttattgataacaaatcagattagattgtaatgagttttatttagggcataaaatcccaacagatggactgtcaggctcaatctatgcgagcccaacaagaagaaataaactcccgtttcagggaggcaactgacctaatcaggcagttcacccatcagacagggagcaggtgctggagaaccctcaacttagaagagatcccaatcggggaaaagcaccttacatccccactagaggataagagtactgtccagaggaacaccgacccaattatgtgtaatcacctcagtttgaaaaaccttccgattccaggccccaaaatcaaactattggcaacccgatagacgaccaagtcttgcctggtaactactttggaaaagatgatcaacccaactttcatcgtcagcttgaaaggaggaaggatgatgcacctcttcagccagctgaaggatctcgagggtaggtaggtatatattaccaagttggattggtctaagtctataatagtctcaatataccgtctaacaacctcggcaaggtgtctcatagtggacaatcatacacaagcaagaatgatgatagagtttacagtggaccacacaaaaaattatcgttgtgataatcgtcgtactcatggaaaaaattgagaaaatcctccgaatgataacaatccacctaagctagcttagcctatgagccaaccccacagaagagctccacgcgactcagttttccaacagatggggcccaaaactgatctttgggatgatttgaattgtaggagaggaaatcatgatagacactttgtccctccgcccaacaatcaactaatcaatgtggagaattacattccacaaaatatggataacttcgtaccctttgaagctctaggggtgaacaagtgacataccccagtcaagaggcaggtccatttgatctaggggtgcaagcccaattgaatcaacttaagagcctcattcaaggcctgactagcccaaaactcactgatttggagctcgatcatataagaggttcaccattgtcacctcaaattaattcccttgatcttccgaccaatttcaagatacccacttggaagatgtacacagggaaggaggatccattatctcatatcaagtatttcaagatacaaatggacttgcatgcagtaaaaggtgatgtacagtgtggaatattctcgactaccttggcaaacgctgccaagcaatggtacttcaagttaaccctggggaaattcaattgatggaatgcctttgcaacagaattttgcatgcaattttcttcttcgagacagctctccgctcactttaaagaccttgttgaagtaaaacagatactaggagaacctttgaaagattacaacaataagtatatgactgaagcaataaaagtgaagggacttaccgaagaaggaaggttagcaatcgtgctaggaggaatcgagcaaaagggtgagttatggaatgacattaaaagactcactgtaggcttaatgggagaatttttagaccgagcatacaagtttataaagctcgaaaaagtagtccaccgagtggacatagttggtcagagtaaggccgacccaagtcccacactccctacaactacagccaatacatctgtccaactaggtcaaaccttccaacctcaaactagaaacaatttcgaccataattgtaagaggtctaacaacaaaaataaccacaacagtcggaaaaaaggaagttcaacaataacttcgataaaaaacatccctgagagaattcctcaaagttcattgccttcacaatccttactgaagctcaagaaaccattttatgataactcagtctgttatgccgtacataagatcccctccgatcaagaaagatatgaacaagagggacaccaccaaatattatcattttcaccaaaattatggtcatgaaaccaacaagtgcaataatctgaaggaagaaatagaatttctcatcaggaggaataatcagcacatgtatcggtacataaaggccgatcaagatgaaagagctgcccaaccaaataaaaatcaaaattatttgatgccccaactagtggatgacatttacaaatgattattgggggcccgcacatcgctgaagattcaaacaaagccagagaaatgtatgcttggacactccaatatgagcaaaaatgaagaagtattggctgtagaagagaaaaagccaaaataactacgcaaagaggaagttgtcatctcatttagtgaagacaatgttgaccatgtcatttacccatacaacgaccccttggtcgtcgaggtacaaatttctaacatgatagtggctcggtcaatgatcgataatgggacttcctcgaatattctcttcaagagaacacatgaaaagataggacttcccctcaaagatttgatcctatgcgcgcaacaagtgtacgaattctccggacaaagcataacttctttaaagatatatccgtctcccactcaccgtaagaaaagctccaacaacaaacacggtgatggcttaatttttagtaatggacgtcccttttgattttaatgtcatgataggctgaccatccctacataatttaaaagttgtaacctcaatctaccatctatgtgacaagttctctaccagcaatggagtcagatgtctgaaaggagaccaaaagaccgcacgccaatgctacaaccttgccttaaccaaggaaaaaaaggaagaaccagtcaaccaaggatcgaaggccgagtagagtttgagtaaatagagatccacccaaggcgaggatgaatacatggatactcgctttggggacccaagtacaagcatcaagctggtggaggaattagaagaagtagagatcgatccgactatgctgacctagaagctcaagattggatggggtttgttgttcgaaataaaatgtgctttgatcaaatctctaaaagcaaaccttgacaatttttcctggtcacacgaggacatggttgggattgatccatctataatttctcacgcccttaacattgatcccaatttctatctagtacaacaaaaacgaagactgttcgacaaagaatgctcacatacacttaaagaggaagtagaacgggtaaacaagttcattgtcgaagctttctaccccgcatgggtagccaatattgtcttaatgcccaagccttacaagaagtggcatgtatgcatcaatttcaactacctcaataaggcatgtccaagaagtgtttcccaattccaaggatcgaccagcttgtaaacactactgtaggacaagatatcttaagctttatggatgcatgttcgaggcataattagataaagatgcatctacctgaccaagaataaacaagcttccagaatatgttggcttgtattactataaagttacaccgttcagattgaagaacgctggagttacctaccaatgttagtcaacaagatgttcaaagatcagatcgggcataatataggtatacgtggacgacatgctcatcaaatctagaaagattgggggaaaatagaagagctgaatgagtgattcaaaatcctcaaaaaatacaacatgaagctcaatcccctcaagtgttcttttagagtcatttcagttaaatttctaggatttatcattaatgcccgaggaattgaagctaattcaaagaagattctgttagaatatgtttaccaggatctagatttactaccatgtatgttatttaacatcctaaatatgaatatctaaaacaatgtaaataaacacatataaagtttagaaaaccttacattgggtgcagcaaaatattaatggctccttccatgcagatctctaacccttgtatcctgtctgtagcagagtatcaccaagatctgagcccgaatgtc

SEQ ID NO: 296421 - DNA, 3680 bp, Cannabis indica
taatcttttattgtgtttttttcactcctacccatgatgatccggattgtcagggtcaggccagaaggaagagtacttcatccagtctgcctcttgaggtacgtttgccatagatgattcctgctgaaaacaaattaatatcaaaaacatgtacataatataccaaaaaaaataattgaagtatatatctatgaagaaataatatagagaggtaattttatatatatttttttacagtaaattagttcacacaatcaaagagataataactaagaagttgttgttatctaattattcctataatttctaattcttctgatcatttttttttatatttttattttatgttatatgtaattttatttcttttcataattctctaatattttcttataaggaagattctttttccaagttattaaggaatattaacaaggctaactaatgctctagaaagagaaagataaataaagagaggtcaatatgtattgtaaataaatatattgtgggcttgttgtttcacattgtgtaccagaaaagaaaaagaataaaactaatagcattttaaccaattaatattcttttcttaaagagtagaacttacagagtgagaaaacaaaaaaagctttcctactcacacttcatatcctataataagtcgtcaattaattgtgggctgctctatagcgacgcttatatatatatatgttcttgtacaataatacgtacgatcattacttatccacgaagtataaataatttatctgacctatagtcgatctaactagttaattaattaccgtatctccaaagaaaagaaaaaaagaatgacactaaagtgtagtatttgcaaattaaagcttggttataatggttatatattagtgagctcaaatattattcccttaaaattcttcgacaatgttgtctttccagttagtgacaaaaaatattcgagtctaaaatattctataacaatatccatatattcgatatcacttgaaaatccaccaaactaaactcccatatatgtatttaaaataatgtaaaggaaaaaattcaaagagaggaaaagagaaaaaggagaaaaaagatggttctctacttgggttggggcttcaatctttaattcaaactaatagtaataaagaaataatcatttctctttctttcatcctttttaattctttgcttgacctttttcttttagctccctagctattatttgtattatagcgggcgatttgtatatatatgatcacaagaaaaaacaagtagtatacacatagatttcagggtcaaaaaaaatcgaacctagctagctagttatatataatatttatatgatgtaatataaataaaagtatatatactcacttctttgatattattattattacttgaagtgcagcccattatgagttcttccaaaccagatgctgaccttcctcccattttatgatgctgttgttgttgttgctgctgctgtaatattatattattgggttattgcattattattattatgtaaataagaaaaatacaaataaatatatatatgtataattaaagggtaactaaaattattatgaagaaagaaaattattaattaaaaactaaaaagatcactatacacacaccacatgcatgatttgtttgttctacgtacgtacgtagtgattattaattaatgtgataactgataataaattaataagagtatttaaatataatttagtttatataaatgtagtacctggaaagaagtattactagtagtagtggtggtggtggtggtggtgtcatgattttggagcattattctataggcgtcctgatcaagaatgatggaggtgtggtgtagaggaggaggagagattatattggaaatagggtgtgaaggcctgcttatgtgaaacgacgtcgttgccatttgatgatgtatttgctgctgttgttgttgatggtgatgatgatgatgatgttcttgagccatgttattaaggtgtactggtggcctgatatgttgatggtgttcacgcacgtgatcttcgcacgcgcttcctcctcctcctcctcctgttacttcccttactgttgaactatgatctcctattcccacctgcattaattaataaataataatacttattcacattattaattcaaatatatattattcccatgaaaaagctagcccttcattttcaagtaacgttcccaaacctatatatattatttgagagttagatgacagtaatgtgtcaattaaggtcaatggaaattgtcacgctgtatatgcaagcataaccaaatattggatatttatatgttacagagagcaagaaagagaattaattaattacaacttaattattgagagcttatatatctatatcgatgatcatgactaataatttaaaataataaaattagtaatttaattacctcatcaaaactttttctaaacggaacaaagctgaagtgatcagatttcaactgatgaatgggaatatccatagtggaacccactataagcagtactagacaactgagcaacagcagctgcggctgcaaccatttgattatgatgatgatgttgatctctctgaggattattaataatattaccactactacttatttccttagaagagcagctaccactcccagtactgtctctcctacccccgccaccgccgcctatgccgccacctccgtcgctactaattccttctgcgacaaccacggaggcggcggccgaggctgcacggtcagaccaattacattgcctgggctgagtttggtaaaaaatcttagagacaacaagctctccttctttttcttcctcgtgttgacccaaatggtattggtgcatgacccagttggtcttttcgggtttgcggtttttaccgaagttggtgtacaaaacaaggattttcttgcaccctttttgctttccgttgaccatgaccggtctggtcttcccggtcttgtgccacctcgtttctcctccttgttgtaagtggtcacattctgtttggatttttcttcgttttcttgtacctgttgtgtacgctttcgagggtctgtgaaagaaatgtctgcttaaaccatctctagtcactcctgccaaagaaaaaataaatacataaataatcaaaatgtttggtttgacttgtattcatatttgtgtatctctagcgtgcatggtacatatgattgttattaattattgtcattattatgaatgataatagttatacatatactttgagaattaataaaagtggagtttgtgtatgtatatacatatacatatattaatatttatttagatcgatatatataattaaaatgaattaaggacctggaagtttttcaggatgggtataacaaatcccatcttctccttcaattgtgggaatgaactcatctatcaaagggtgagatttcatgtctttatcttctacttttgcttcgaggtgttcgatcagttcttggtctgttgggtcgaatttcactcctgctggtagacctaaccaatcctacacaatatttatttgataccatattaattaattagtacttttttatatatatagtcaataatttaaaatattctcacctttaaaaaaaataacaaaaaagagatgggagagggagagagagagagagat

SEQ ID NO: 296422 - DNA, 10433 bp, Cannabis indica
atatgaattatgtaatttttatgatttttgctcggtaacaacgggaaaatacgatggatggtcgttagagtcacatgagtaagttaagagcctatttcttagcgggataaatatttgagatatttagaataccagagattagcggggttatgatttttgaccattttgcccctaagcctattaattacttaatttacaagtcaaagggcattttgggtaattttcattaatggattaggtggctgaatcctacgttcgcagctggccactaagtttctaaagcctaagtattatttgatttaatttaataaaaaaaaaagaaaaaagaaggaaaaattagataatcctaagtctctctcttgtttttggctgcctaagaaccagaaaaaatcaagctcaactcatcaaatttgtgggttttcagcaaggattctaagtgattttagtggagacaaaaccctaatttgatcctattttagtttgctaagttattgtagatttattttgaatttttgtgtatgcttggggatttaagttatgtgatgtttagggtttcgagtagggttgttttacatagatttaattggtgttttaggctagttttgagctgttgttgctagttgattttgggttagtttgagttgacccaactatggcatgttgtgattttatgcaaaattattaatgttgatgcttggagaatgtttatggatgatatttcaggtgatctggaagttttggtgaggtttgggtacgaattgagattgttgtggattttttaggttttcttggtgcaaaccgattaaccggttctacatgtcccgtagaaccgattaaccaaatcaggggcaggattcccaaaaaaatctattttgttgattccttttattttcagagccttagttcattgtttcctcgataattaggatatttccatgctagttatcgataatagaatttatagttgtgggtttaggttcccggattaggttttggcacgttatttacccatttgcgtaaatgtgacataggacatccatttagcacgtgattttctgtttaagtcggctagcacacttggattcgaatacgaggtaagaataacataaaacatgttatataatgtgattgtgtgtatgtgttatatatgcatgttatttgtgattcgtacactaccaacactagtacggtagcggtacagagtataatggtatagtgtacgatgtttaaagagtacaatacggtgttaccaacactagtacggataggtacggagtgtatgtggtataacacttaagggtattcgaggtacggggcaaaccctaccaatactcgtacagtagtggtacgtagtacatgtggtacagtagtcgtaccttagtaaagaacgttcttactaatctgataagccttgtggataggtgtatgtacgcctagatgcaagtaattattagaatatatgttatatgcttttcttactgagtctgttgactcacaatattaaaaagttttgttgcatcgatgaacaaggacttgtacgctaagaatattttgtgaagaaacaacagtaagaacactataaactaatataaactcaaccaatgttaaaatataaaaatattgaccatattagaaatgttttatatgcgagccttgtgttggattgtcaatgtgaaataactgcaaataagaataaaactattgaacaactatcatctcgttaattattgtctcgtcaattattggagcgttgataaaatggacgcacaacgataatacaactacatagaatcaaaaaaataaaaaataatgctgccaaatatgaggcgcgatatgaatacgaattactttattttttgcgatcgaaattgaataaaacaagattaaaattttgtaaaacaacactaatgcaacatgtataatattagcttatgtagtgacaatttttttcttcagattatacttgatttgaattgatcaggagcttgggatctatttctttctgatatttattttatgaatatggaaattaaatttatgagaattagttttatgaaattcgaattataatttagggatgaatttatatttcaaaccagtttttctacagatttttgcatcagtgagtaattgttattgtttggtgtgtttttgttcttcttcttaggtgacgtcgttctaattaatagtgtttcttgatcttccgaagttgattcatcattgtcggttggtttcaattgcacgaaagttttatttctatgaaacgtgaattgtgtgggttgaagatgtgtgcaagaggtatttttgtaatcttttttataggaatgtataaatatttatttggccagctcacgatatttctgtaatattattgtatttttaatattattgtatttttttagttataactgaaaaaaatttaaaaatattttctattgaataatttttttttcaataattttataaataatattaattatttatttatatatttcttataatttaaaatcaatttatatttaacaaatgatataattttttttaataaattaagcaattttattaatagcaattagctaaaataataacatgcaatccaatcgagacatctcccctgttggtgacacactcaaaattagaattaaaaaaaagagccaaataatcagctgcctaattctcaaatcatttgacaaaaaaagtaaaaataaaattagattaaaaaaattgcaacatcacagttaaccttaagagcacatatattcaatttcatctatcgttcaattgcagcaggttcattcaacctcgtagcttgagcactcaactattatgcaacgtatgtaactgcactactaataaccccttcagtcgtagagaacttgttattcccaaccactaacaggaatttgatgacgagccatagaagaacaaaaaagaaccagcaacgaaacaaaataaaacaaatcatatgatagagacaagaccaaaacgctcaaaaccatgtagcaaagacaagactaaaacactcaaaatcatgtcacagagataagactaatcgtagtagcaaaaatcgaaacacaataacaaaatacaaccccaaccaaactgcacttatgattagagaaagtcgacaggcctggcccaaaaaagagacaatctcatgcagctataaatttaacaaatgatataatttgagtagtttagttgctaaaaaaaagtttttaagtgtttgattagttttatgtaacaaagcaaatgatgcaattgtagttttttgtttgttttgaaaactggcgtagtttatcaagtattcttttttttagtattttagtttaataaaccataaagttcaaaagtgattttgtcacaattaatgcttagatttaatttataaagaattgcgagggcattgttttataatttcacttgagagtttagggcaggccactcatgcaatgcaatcaaagttctgtgcacacattttacacttaaacactacgcacatatcaaaattttcaaaccaatcaaactcatttaagataggtctcaaaaaaaaaaataataaataaaaaattactacataggtgtatgtggtggattgcagtaaaaaaaggttagcacatatcattactcaaattgatacaggtttggaagcatatgctttatttataacattcaagttacaataatgttgaatttgtatggccaaggcaacagttacttgtcagctcattccctcatcatacatttttcaggtacacatacataattgagccaaattgtgagaagataataaaagttgacatgtatcaaaatttgcttacaaatggatactagcaaagaatgatcaaaaaatgagaaagaaaagtaagaaagcaaacataaataaaatccacatttttatgaactttaagatggttttgaatttgacaaccggtttcgactagaacaacattgcttctcttcggacaaaaataaagaaagaataacctacaaactaaattaggcaagaagataacatgtttacgtttcgagggatatttgtttccaaaacattccaccatttaggaaaggaggaaacgagctgtaacatctaaacatgcataaagatattaaaattaccaacgattaagcacatacaagctgacgatgatcgttgaataagattcttaactgatagttccagccctgaaaagcaattcaaggacagagacgagacaacataaatagtaaaaaaaaaactactttgaaagataaatgtaacaaaaaacgaagacaaactgaaaacccgagtgttgttgactgcttttcaattgtccaggtattcaggacatccttacttttgtatttctaggaaccccctttaataggaggaaacaattgagccattcataattcattagtactaataggcagactaggatggatgccttcaagtaggggtgtgtgtcagcacgatggctttgagctgagactaatctaacatccttaaagaatggagtaaaaggtcatttacctttgcattagaaatacaacaagcaatttatacttcttttatttcccgtttcttaataactatgaatctgcctaaaatttgtctttgattgctcaccgagaatcatcacaaacccgacaagagaagtatagttgtgtaacatgtgaaaagtagaaatagaattgtttgtttagtatgtagaatcgcaaaaggatctctgagagcttacctatcattcacatggactcttctcgtgtcaagaacttctagtaaaggaagcaatggcatctagattttccttcatgaaccattcatgaggatagacagagttagctgattcaagatgaagatgccaaaccatgattctagagcaatcttgctccagtccttccatttggctctcatcttccacaatttgttcaataaatgtgcttacctgaaaatgcaaatcaactagattagtcccaaaaaccatgatatcaaagtttggcgattaaagaataaagaactaaaattttcttaatatcaagtgaaaaaagttttgtaactttaaaaaatggtgccaatgaagtggtgcagtttgaaacaattttcagacaacacaagaatcaaagtagaagaaatactaacttgaagaccatccttgactgtgtgacgttgtctaataggttcaagcataggtctgtgccacctctttggatcccagagtatagtactattaaaggcaaacccagatatttcagcatgaaatctccgaaatctccattttgcttcattcatgtgccatccgattacttgagttccattacaaatgggcccttctagtatggggttaattttgttctctggtacgttggccactacccatgtcccaaatcgcctgcagctcaaaatagaacaaaaacatcattataatgtgtagtgagaaaaaacactcaaacaaactcacttattatgtctttgataataaaaagagttatatattttcataacataagtgaagtgtagcaacttcaagtattcatattaagaactcagcataaggttgccttgcttgggatgtaatgtaatcaagctaaatataagtagaaaacacaaatagaagccatcagattggaatggaacaaatatgaacttttcttaatgctttttcgtaatgatgcctctcatgatattttatcggaagatccaacatttgcattaaaatagagagcattcatgtagttgaaagaaatgtcaccttatctgcctcatttgctcaaaaagttctgttgagtagatattatcgtcatcggcaaagtagactattccatcaagatggtgagtttcaatatgtgacaatgctacatttctttgatgaacactcctgtctttaacatcagttagatttacgttacaaacaagatgcctgtaagtaaccccggttctccttaatatgtcagctgtttctacagactgtgaggccatttccacaacaatccataacaaaggggatgatactaactttattgtttgagccaaacgattcagatgataggcttgaaatggccaaacatgtgtcggagtcacaattattaaaagctttctgaagtccaattctgattcttcaacaagtgatacattgtaattagtatgttgagatataccatctattggttttgactccaccagctcaggttttaaggtaccattttccttcatagccccaatgtctaatgccatatcacttctagatacagtatcatatgactgaaactttccaactgcagacatcacctcaaaggaaaaggcttgattctttgacatgagattagtggaaatattgatggaggaaaatggagtgaacccaatgaatattccaaccaaaaagcatataaaaaattggaaaagcatcctcctccatacttgtcctttaagtttggatttttcaaggggccttgaagtccttggagagaacacaataaaagcaaaggcttgtgaatcgagtgagctggatagagaagaaaaaaatccactggatgggggatggctctgaggagcacaagtggaagacctggaaagtggagaagcgacagaactggcttccccactcaatgcaattccaggtcgaggcactggagacagggttcttctaatagatgccatttaactatgaattaaaaagaaaatcaataaattccttcttactcacttcacaatctacttccttcaaattgtaatcacttatcatatatatatatatatattgaataataaaacgctcaacactcaattactcacattcgtgccagagatggttggcttggccctcatcaaaagcttcacttaaacagaattgagcacaagtccaaacaaaagaaacatcgaaatttagcagtgtaacaatttctggtaagcatatgaaaatgaatgtaatccttcaagtaatgattcaattaccatgatttgcatgccccaaatggctaacattatcagttcaataatccattacaatcattagcttttcccgcaagtaaatctaacctcaaagcacaaaacctccattccaatcccttaatctacacaacttccttctcaaaatgtccaatttcccactcacctgcaaagccatgaaaatgaaatctcaatctacgaaaaaaaaaaacaagccacatagccataaatcgaaacaccaagaggagttgtgagctaaaacgacacattcccagatgcccatcaagatatataaccaaaatcatcaaagaacaagatttcgatggaaaatataagtcaaatgaagagggttactgcattaccgttgagtggaagatgggcactcgttgttttacgccagtactgagtcttcagtcaccggcagccaaatatgtagacgagcgtggaagagattgtttcaagtttttctctttatggggtcaaaattcaaatagattagagggtaaagctgtggtgtttcagattttattttttttttcttctttttctttttctttgagtgcttatactgttttacagagaaagtgattaaaaatacagtttatacagatggagctctgtcacaatgactcagacaaatataattattggaattgtttaatatatttttcccgtgaccgacgctgagagcttgtgtagtacgggttatgactttatggtcgacaaggtcatacatggtcccactcccacctctaattattattattattattattattattattattattattttggaatggaatctcttaaaattgtttagagataaaataaattaaatctcgtggtcattctaaataatgttagttaagatgattgacggatcaactatgtcaattatattgttggcatagcctatttagccaattatgagttgtaaaattactaagtttagaaataaaagaaagattacaaactcaaaaataaattaaagagcatattacattggtgaatgcagttactaatatcccaattaaagctggttccatttagtgtctttataactatctctgagccactctcaattaacataaaagggtgtttcaaaagcacgaccttctccatggccaatgacaagctgcaacttctccattaaggggatcaacaaaattaaacttgttagtggccatctacaaaatagaacccgtgtgatccctagccaaagccactctacatatggaactaccaccaactttcacatcataattgattttgatccattaaattataagtccagctgattgacccacggagactggtttatccacttgctgggaaccaattgaattagccttagaacaaacagtatcattcgtcgtttcatcactctccaaaagttcattcgaagatttatccaaggtatgacaacaattatcagcatacagagcacatcccggaccaactccatgaggaaaatctctgaccaccatcttaactcttctaatggataagaatggcttgtcaccgagggaagcaatttcaaaatccaatatgcgcttcttcacaagagtggttcgctcattaaattcaaaagacggttgaacgtcaatattaacaaacgaagcttttcttttgtatagtctataataatatatattatattatttttatatttatatatgattctttcattacttataatttttttaactaatttaatttaatactatataaaagattaaatttaatgataattacttacttttaaagtttcttttgtatttctaatcttttttttttttttggtcttaatgttctaaatatttttttattttaaagatgatattatttataaattatatcataaagttttaaattctaatacaaacaatttatattaagaatagtgttcaactcatataaaaatatattatatatgatctaaataaaatgcttgaattcttttatatataagataaaaaattgagaaattaaattggagtaaaagataaaaaaaaagtggtttacaatttgtaaaaacacatttcaactttatgtagagtacatgataatagtagctattaaaattttaagggttttctatatatttttgagaaaatactttaataataatttgtttcttgttttttgaaaaatatttaatcattcactcttaacttcctctcataaggtcttaaagtgtttataaagaaaaaaaaaattataacattgcataaaaattaaaaaataagatctgacacgacactagtatctacaaatttactctttatctttttcaattacatatctagaaaataccattgtagctgtagttttcctaattttatattatatcaataattttaacacaaatattaataacctaaaaagttacaattactataaaaaaaaaaacgttcaaaacaagaattagttgcctagttataaataatacaactatttcttaaagttttctaaatgagcattgctattaagtatcttaaggtgctcaatactatattgatatggcgtattataagtggttagcaattttttatattatttattagataaaaaagtatgaaacgcaatattaaattatattaatagtggtaagccatctcttatagtgcttggtacattaagttgttccaaaacatttctctttcttaatatgtccataaattccaagttagttttgattgaaataaattttccaaatatatcatagaaaataattaaaataaaaagaataatgtgtttgaaacacaccccaaaaacacacaccacccgaaaattttgaaacaccattggtttataatactaggacccatggtcatatggtagggtgtagcacataaaatatttcatttttatgaataaaaaagcgaactggtcaaaaattggaattttaggagtgttgaagagaggcctagtcattttgagcgtagcttgatgtgtgcgattgtgactaagacatcaagaggagttttgggaaggaaaccaacgatgttttatataccaattgctgaaaacagaccaaaccttcatatataaaaacagagaataactgaacggttcaaaaaaacacaaaacaaaaagaacccataacagttccaaaaaccatcaatacaaccaaattaggttcaaaatacaataaaactaacaagaatcaaatcaatggaattcaaagagcaactaaaaagatctcgcacccctccttaataccaaatacattacttgatatgaagtacgaactctctcgtcaaaatgttgttgaggtaaaaaatttaataaatatcatctcctttttactctatactacatgtgttccgatttttatcaggcacaccgatacaccccacatttaacacgggtgtaatccagtacaatacaaccatcataaataacacttgcacacaaaaacttttggaaaattctacaatgcgcccccttaaaatgatacattgatgtacccttatctgttttagcacccgaaataattttt

SEQ ID NO: 296423 - DNA, 5970 bp, Cannabis indica
taaaatttgcgattagtagagaattttaaagttaacttgttttaatttgaaaactagtgtatctatcttaattattatttcggtttgaattaatgacatatctacctaataatatttccttgcataacatgcatgaaaattaagagaattttatgaattagaattgatgataaacttcttatgaacaccaaaattctttcatattataatatgaaaaaggaaagagttagagtctacatcacaaaacactaggtgtgatagggtccaccatccaaaacgagctcatcgcaatctgataaagttgttacgaatgaatctccaccgttcatctaaatcaacggctcacgttccgcgtgtctacttatgtcatccggaatccacaagacaccgcgttcttactctctcgctcctctctttctctctcttctcccactctgctcggcgctgatgatggtcatggtggagcaaccctgataagccacccactcaacaacgtcgcctcggtcctactctgcaggttaccgctttcttctccttcttacttccagatttccaattgtgatttcttaaaaaccctagaattgtcaaatcaaaccttagctgcttatgttgttctgatagagagtaaaaaattatacgttgactgttcaaacttaatatgaattccctgttgagcttttgtactagaaagtttaattctttttttttttttggggttgataaagacgtatgtatagttggtttaaaaggcaatagttttatgtgaagcttattattgcttttcaatgttcattattattttctctattttatttttttatttatttttgagagcaaccactttacacttgatcggttttgcattttctcttgttttgtaatataaccctcaacagatttttataggcattgcctcattttttagctgttaaaccgttttggtggtagttgaaccttataaagagaattgttgatgagtttggtggttgggtttctgttgcagattgaatctacatttacttaaatagagtaaaacatggggtgctctgcctcctagttgactgaaaaagtaagaacaagattcttacattgcatttgttatggatgttgatgtgattgacgttgaaggaatgagtcatcgtgcaatggcaaatgatggagatgccgaacccaatgcgagtagagactcaagtacagctgaaactatcacagttcatgatgatgatgatgggattggtgagccttatttgggaatggaatttgattctgaggatgctgccaaatttttttatgatgagtatgcaatacgtgttggttttcactctaaagctggtccatctagtcgttctaaatctgatgggtcgatcatttctcgggaatttatatgtggcagagatggggtaagaaggcaggctgatagttgtgaagcaatgcttaaggtagaattaaaaggtcaagataagtgggttgtaacaaaatttgtgaaggagcacagccattcattggttaatcccaacaaacttcattatattaggccgcgtaggcattttgtgggtactgcaaagaccgtgtctgaagcttaccaagggacaggggctgttcctagtggggttatgtttgtatcaatggatggaaaccgttcttctgcagagaaaaatagtggagttaggcatagtccaactgagttcaaccgatcagtgaagaattctgcaaccatgaactatgctgttaatcctttcaatcgaaaaaggaccctagggagggatgctcagaatttgctggaatatttcaagaaaatgcaggctgagaaccctggttttttctatgcaattcaacttgatgaagagaatcgcatgactaatgtattctgggcagatgcaaggtcaagaactgcttacagtcattttggtgatgcagtaactctggatacaacttatagagtaaatcagtctagggtgccgtttgctccatttacaggggtaaaccatcatggccagacaattttgtttggttgtgcattacttcttgatgagtcagaagctacttttacatggcttttcaagacatttcttacagcaatgaatgattgcccacctacctctattaccactgatcaagacagagcaatacagactgcagttgctagtgtttttccggaatctcgacatcgtattagcaagtggcatgttttaagagaaggtcaggagaagttggctcatgtttgtcatgctcatcctaattttcaatcagaactttataactgtatcaatttaactgaaactatagaggagtttgaatcatcttggaattttatcattgataaatatgatctcaggagaaatgattggctgttgacattgtataacgcccgtgataaatgggttcctgtctattttcgagattcgttttttgctgcaatatcttccaatctaggatatgatggttccttttttgaaggttatgtgaatcaacagacaactttaccaacgttctttaggcagtatgaaagagctttagaaagctgttttgagaaggaaacagaagctgatttcgatacaatttgcaacacaccggtgttgaggacaccatctcctatggaaaaacaggcagcgaatctgtatacacggaaaattttcacaaaattccaagaagagctagttgaaacttttgtgtacactgcaaataaaattgagggtgatggagctattagcactttcagggttgctaaatttgaggatgacaataaagcttatcatgtcactctgaactattctgagatgaaagctaactgtagttgtcaaatgtttgagtattcaggcattctttgtagacatgttttgactgttttcactgtctcaaatgtacttacattgccttcggcttacattttaaaacgttggacgagaaatgcaaagagtggagctggcatagacgaacacagtggcgattcacatgctcatgagtctcttacattacgatacaataatttatgtcgggaagccattaggtatgctgaagaaggtgccattgctacagaaacttacaatgctgcaatgaatgcccttagagatggcgggaagaaaattgttattgctaagaaaaatgctgctaaagttgcacctccttgcacggaaagttacgatgatagaagaaattctactttaacttcagattcaactccattgttatggccacgccatgatgaagtattaagacgttttaatcttaatgatgctagtgctcctctgcaaactgttgcagatttgaatttgccacgtatgggcccagtttctcttcacagagatgatggtactcctgaaaatatggtatggaaataaattatttgctctattgtttcttatttttaacatatctgatctgattagaaatgtatgcttttgctcatttttatgtaggttgtacttccttgtttaaagtcaatgacttgggtgatggaaaataagaattcaacacccgggaatagagttgctgtcattaacctaaaggtattgcacatgtgatgaagtaaaaccttgaaacagggaatatttgtatcaacttaatcacattaatttgattggtcccttcccttgtccagggttgagtgcccagatatcagttcatttataattatataaaccaattttcctctttgtgttttgcttaagtatctacttacatctctgaaattttactattaccaaattacacttgggatttaccaaatagtataaaatcctttgaacaaaattttggtctgaattaattataataaagataatatcctctctttgcatacatcaaattacttttatattttgaaatattctgtatattattttacttttgaataatgctgtagtgttgttttattgattaaaagcaatttcttaaaatattttgtaatctattcaattttttttaaaaataatatttattttaaaaaatgaataatataaaaacaattttgtttaatttaaatcaaatatatgtatttttataaaatgtttatatatatgaagtaaataaatggatggtattattgtcgtataaaaattattttgaccaaaactaagctcagtgagtattttaacaaatataatggtataatttggtattattgaaactatagggatgtaagtaggaatttaagcaaaacagggtgctaaaataatatattatttttttctcactttatttaatattgtatgtacaatttatgtatcaacaggtcgagaacattattcatttatttacttatttatttcaattgtttactgctacagttacaagattatagtagaactccatcagcagagtcagaggttaagtttcaactttcaagagtatcattagaacccatgctgaggtctatggcctacataagtgaacagctatcaacaccagctaataaggttgctgtcataaatttgaaggtaaatggtatttcccatcatgcctattgtctatgggctattttctgaaatcttatattgtcgatgttcattttccttcaagaaaagattttttttaccaggtttattatatcaaaaaaaaaaaagtgactgtctttaaggattataatgagatagcttgatacatttatgtgtagtggtcccttcctaagtgacagattacatgctagatgttcttagcttgttttctatatttttcatcgtaaaataactgatggctgtctctttatcgataagaggtttcttatgatctttgaactattgtgcatatctgtactggttgttcattctttaatgaaatttctgcttgctcagcttcaagacactgaaacaacctcaggggagtcagaggttaaatttcaggtatccaaggatacattaggcgccatgctgagatcaatggcctatattcgtgagcagctctcaaatcctgtaagaaatttctccctagttacattgacttattttggtttcggtgaagggataacaattaacaagtagtttttttttctttcttttttcaaatagattaaaaattattgtagactacatacatattctacataagcatgatgttgtccagtttctgttttgttttaatcataagaatttccattctgacaggtcgacatgcctctggaaccactagcgaagaagcagcgaaagtgacatcattgcattctaattgtttgccccggatatagaattggggcccgatcacccaattgtatgtaaccacacaactcctggagacaaaaatgttctgatcaggttagagatgctcatgtgtcacatatttatttcgggtagctgggtagccactccttttttcacagaagctcgtatttagcatatttgtacatgtagagtatcaaactcgaggaacctaaagcatgaaagagaattcatggttggtaataaggcacagattgattgaaaccccagaattagacatatctttagaagaagaagcatggtcgattcttcttctatggcgattgtgtgaagcttctgcagcttttcactttgtgtaaacattgcagagtaagtaagaaagagatgtttgaaaggcgagtggggcaagtcaggggaaaaattgattgagatctggttggcattgtagttgagaggtgattcagtgtcttgtatattcttcttgttgtcataaatggcattcgtatatattttgttggcaaataagatacttttgttaaaacaaaaatttcacattttaagtaatagaattaatttatattaatgcacaacgtaattttaccagacataacataaaagtttattatgaattcaaaattattgaaatacataaaactaaaaatgaaataatttcttacaagcaaatagaagaaaaaaaaacttagtgtatattgctccaaagcaaatatttcacattttttttaaaatattaagtaatacacattcttttaattaaagggttatttgcggcaaaaccccctaaagtaggcaggtttttgca

SEQ ID NO: 296424 - DNA, 4075 bp, Cannabis indica
atttataatctttattaattagtaaatctgattatatttaaatgggttttatttagggcacaaaacctaacagttattccctctagtttctttcatcatttccgttctaatcacattagttactgcattaatgtctctgacgatttttatcctcagaatctctcttcaggcgaagagttctactgcatttattgcaccccgccctttcgttctctcttttggttgtgtcttcctcgacactttttaatatttgacttcaccaactctaactatcaaatcaggagccaacccaaagatccttttttcttcatgaaactggtggcaagttgaaacgatggtgatgatggagccatcatgatgcctaaggatcctagaataggagctatcgtcagaagcaagccaagaggcatcctacgaagtctagtattttttcttgataaagctcgattaagatttcattttcatgcacctgcttagctctgttctttcttatttgctcatcttgatagttgttagtctcgttatggaagacctaggttttaacttcccccaacccatgatcctaacctttgataaaaatacggtgaagaaactcctaatggtatcaatctccttctgaaactttgtactgtaaaacactttagccgttcttccttgatcaaaactctctctcaaatttagacttctcagtgtcgtttccctgtgattctctcagagcactctgatggcctttttcttgttacttttggctgtgagggggataagagaagaatccttaatggacaaccttggcattttgcccaaagtctcaccatctttgctgctccatataattcttttcctatacccctaaaaatttgcattatgtccccttgttggttcaaatctatggtatcacttttcgatgcaagtcctatgaattggctaaacttattgccacaagtgtggatgaactgatttaagtggatagcactactgtgagggaaggaactggaccttatttgagggttcagtttcttgatgttaacaaactaatcaggagaggcatccatattcattttcttaaaatgggtagggaatttaccaaatggttagactttaagtatgaaaggctctctgatttctgcttttattgtggcaaactggaccatgccaagaaatactgccatgcttatcttcagaaatgtgatgaatcacttatcccacctatttggccttatgatattctccttcgtggaaaggaaaattcctctgagaagcctctccctttacggtaccctcatgccctagccattaccatagttgacttggacctctctgatctctctcaaggaggtcaaatgatgaatcctttcatgactcaatccattagttttgcgcctttcctcaattcaaatatggcatcctattcatgtttaagcgctcttagaaattctcaaagtatcatgattcccactcttatcaaccctaacaattccatggattgtgtatcttttggcacaacttgtaacagttcttattctatgtctcattcttcacatcttgcctcgatctccactgattcatttattgttagtgatagtctggctttaaccaatcctgaattagtgcatgctacccactctcttgcagaagctctgccctctctggctttgggctagaacaatgctgataattgaacctctaggatggatgttccccaacctgatccttaggttaaaggcaagggacttgcttgtgcctctggagttaaaagaccatcctttcaaaccttttaagccaatgttggaggctttatgcactccatgctcaagcgtgctagggctggtgaaaaagactctgatgttccttcttttgttgttgatcttgaagaggcgggtgatgctgagcacgcctgtccataaaaatgagtctcctgagttgaaatgctagaggtctggtgaatccttgagcattcaatcatctttccctcctggtcaagactcataggccaactcttcttttttaatggaaaccaggcttaagccccactttgttgataggtttaaaaggtctttaggttttgagtttcgttttgaggtccctaggcagcatttggtggggctacttcttttgtggagagttgatgtttatgttaatatttaaattattcctctaatcatatagactgtaatgttagttttaatattaatgacatgtgacattttacttatttttatggttctcctgttagtcatcaaaagcactttacttggaagttattacatgatattttttatactgctcctaatctaccttggttgatcattggtgaatttcatagctatcattttagtagtgataagattggtgggaatctccctgaccaactttctatgtctttttttttgccaattttctcagtgagtttgcaatgtttccttttccttacgttggtaataagtacacttggactaataaaaatatcagtgagaggttaaattgggttgtagtttcggagtgttggtgtgatctttatcctgataatagtcttcaccacttagggttttatggttcggatcatcgagctttaaagctcgttttagctacttctagtcctaatcctgttaatttcgtgaataagagatttagatttgaaaataactggcttgatgatcccagtttttacaggcttgttgatataacctggaatgcttgtcctgctctgagtcagcctaataaccatttccatagtttcgtttctaagtaaaaccactgtatttcttctcttaaaacttgaaataaatgcaacaaccatctttttaaaaccagaatccagcaccttactcatgatataaatagtatttagaataaggtttttcttagtgacattgataaaaatcgcctcatttagctgcaatctatgctagatgcaatgttgtataaagaggaagtttattgaaaataatgggctagaattaaatggcttaaggttggggataaaaatatgaaaattttcaaacatgcttcctttcgtaagaaaactaataatatcaagtaccttatagctgcaaatggtactgtgatcaatactcaggatagcattttagtttgataaacccttactttttctgaccttttttcttctcagaggagtgatattgaagttgctgcttcaatctttgattctctgggatccggtcttgaggaacaagatataggggttttttagcccaagacttcattgctgatgaggtgagaaaagttatctttcagctttctagtgacaaggctataggtttaaatggtctacatgcgtatttttatcaaaaaaaacttgtctattttgggtagggatatcaccaatgcagttttagattgtctcaatcagggagttgatttcactgatgttaattctaccctaatcattttaatccccaaaaaacagcatgctaatatactgaaggattttcgacctatcagcctttgtactacgttttacaaagtcatctcaaagacccttgctaatagactcaaattgattcttgataagattatctctcccttttagagtgtgtttgtctcgggtcgtgtcatttatgataatattatcattgctaacaagcttgttcatgccattactaataggaaagttggtaagagagggtgggctgctttaaagcttgacatggctaaagcctttgatcgagttgaatgagactttcttaggaatctcatatttcatttcaacttccccgttcgctgtgtctctctctgtaatgactgcatattagattatggattagaaaaagcaattagcattaattattagtgttttatgcttatatatgattttatattgtcgtggggctctatttttagaaataggcattagagttatagtttttcaattcttgaaattttattaaactctaagggctcgtttggtacgtaggattggactgaattggactgaaaaagattggacttgattggattatgctgaaagtaatcctgtgtttggtttaagaatagactggactatgttatttatttctttttagaaaaaaaaaacttaaattaaaataaaaatata

SEQ ID NO: 296425 - DNA, 2444 bp, Cannabis indica
aaataaaactaacactacgtggcttgacacgtaacaatcacctagtatatatatatatatatatatatgttgtttccatgattcctggttggcacaacacatttggtatattttttttttttctttttcacacacatatatcataattctttccatgattattggttggcatagctgtgtgaagaatgggatttttatttaggattaattacacatgctagtaagttgtaactgtgaaatggtttttggaatcactaatattggtgattaaacagcttattattggtgagtttgtggttacaccaaaacattcccattctgacataagaaagtgaatttgtgatgaaattcaagttcatacaggtcaagtttcatttgattttggtgttttgcagcagagcttttgaaatagttataatcgttgaagtagtgagactcttaaaagtgacattagagtctgactatatgttctagtagtagcagagaagcaaactctgttatgcatgttcagtctaggaaagcttcttctatttcaaagaaaactaaaggtgcttatatttttgtttctgttatatcttcatattaaagtttaatgccagacactatttgtttctgttatatatacaactgtaatcaatgtcaagtccctaaaactgttttcattgtcttatatgataattggaacttgaaaatattcaggttttattttatctttgcttaataggctgaaatgggtgtgagaaaatggcaaagtttatctttacacaatactagtgttatatcagatttcgtcaaagagactagaatgattaaatcttagagcctaatttaattagtggtcagcacactggtcattactttgacaaatcttcaatggtgaatatcatcttgtgtttcttcccaatcttcttgctggtgagatttttattgtttctttctttctttccaatatgggaatttgtttttttgtttctatgtacttatttcatagcaaataaaaagggtgctttcatatacacccctttcagttttgttcttttatcgtactttcataaaaacccccataaatttttaaaagttctttttacacacacaccaaacaaatttcaaaaggtgacattaagcttcaaatttcaaagttattttcttatttcaaatttcattaagcttcttaataatgactttcggggcaataatagaataattgtaattattctagatttgcgccattcaaatttcaaattgaaagcaaaattcgaccgttggaggggaagcgtggactgaagaagagcgtcaactactacaacagaagccatagttagcaaaagaaacaagaagatagtggcaaagaagataggagaagagagtgaccaaatgattattaccaggcgccatggctggcaacgtcctctccactctttgcaggttacacttcactcttaatttattgtactattatgaatgcatttattttccttgaattatatataaaaatatatatataagattgtgctacgaatttcagatcgtgggaatggcaattttcagcttcctggtggtggcattctatgctttcctgggtctttttcttggaaacagaactgcagaaattactgtcaccacaatcttctccattgcggtacaccttttcttatcatcttatctatgcaacactcaattcatcatcaagaacaaagcaaactaaaacaaagactgtattcctgttccactgcagtctctttcagtgatgggactcttcataaggtgcactgccattgacccaactgacaaaactggtgttaggaggaagaggaccaagaaaaaagtcaagtcccagatcaagctcaactatggcttcattctgggtcagattgttttaagattttttaggagagtggagaagaagatccttaggtccttcatcaggaggaagtatctggatccatggagtaccagctctgatcatttggacccatttcttccttttcctcttgtcctcaaggatgatgcagctgtcaacactcccaatccaaaccaagacgacatctccttttgccagctctgtgacatggaggtatagttatagtatgtttcataccaacttaatatcttatgctcccattgatcactggtttctaattcatttcacctttgtcttttcaggtcaaaaaacgtagcaagcactgccgcacctgcaaccgatgtgtggaaggctttgatcaccattgcagggtctgttgcatcccttaaaaactttctttgtcgtgtcctttgttttttttaattatgacttatcaccaatcccaaacttcttttgtttcttctcttccagtggttaaacactgcgttggcaaaaggattacacaacatttatcttctaatggtttttgtcttgtaatggtcagttgctttctaatctctcaaattctctaagtgaaaagtgg

SEQ ID NO: 296426 - DNA, 3385 bp, Cannabis indica
gcgacgccgtttccacatcgattcaacctagcaaagagtcagtacgtgttgaattgggaggaatcgggaatagaggcttcaagttactacattataaatcaagttttaattaaattgctgcaaggaaaaaaaagaatattaaacatattcacactaaggaaattaagtatcatagtatactgtcatacctgtcccttttcaatttcttgtctctaaaatctttgttggctgtttatgataagagtactcaacaacagaaaacaatattccaatgtgttggcaaatcttgtttcttattaccaataatcattacaagagcaaacaccattgacaaagtgatgaaaacgattggcatctctaacaattagttccctcctggctatcttggaaatgtatttagtcacattatgacaatcattacaaacacgtaggttcttggtaatcctaattgagcttcctgctggtgtgcttaaaagtccaaatgcaatagctagtctctcactatggccccatagcagcttaatcttcattggctcatcaacatcgcgaagaacacaacttgtatccggcacatagccagatgcttctacttctaatcttaaattctctaaatactcagaaatctctgcccagttaggatgcgaatcgtctgctgcaaaaaatgtataaactttactttctacctcgatcgagctatatcctggcgttttctttaatccttgtgttctcataaggcttcgaacatggtttactgcatcccattgttttgcttgggcatagatgtttgataagacaacataaatcccagaatttagagagtctaaactaagtaatctatcagctgttcgtaaacccaaatcgaagttcttgtgagttaaacatccatttaacaaaggttgaagaatagaacttccaggttcgaaaggcacttgtgtgaccaatgtctcagcttcttcaaaacgacctgctcggctcagaagatccacaaagctcgcatagtgcttatcggtaggcctgattttgtggtctctttccatgctatgaaataatcttattccctcttccacaagtcctgagtgactacaagcagttaaaagagcaagaaaagaggtttcatttggctcaactccttcaaccatcatttttcgatagagttcaacagctttttcgccatgaccatgaatactataagctgttatcatagagttccatataataacatcttcaaaaatggaaccttcattaaaaatcaattcagcaggtctgatttttccacactttgcatacatatcaatcaacgctgtcatgtgaacaacatcgaacgcatatccacaacgaatcaaatgagcatgaacacttcttcctttcctcaaacaacccaagtgagcacaagattgaactaaactaacaagagttactgaattggccacaaccccctctacttgcatttgatgaaacagtttcagggcttcctctgcaagcccattttgtgtcaatcctacaagcatagcagtccacatgacgacattcctcttttccattctatcgaagacgaaagttgcttgctttaaggcaccacatttagaatagagatcaacaattgcagtagacaaaatgacattcaattcaataccccttctgaaaatacaaccatgaaggatttttccacattttagatcagcaatttgagaacaaccttgaagaaggctcactatggttcgtgaatcaaatccgcaaccacttgtgactagtctattgaacaaggaaatagattcaagcaccaaaccattttgaacaaatcccaagatcatggcattccaggagaccaaatttctatttggcattgtctcaaacaccaagtgagcaccctcaatttcacccaaattactatacatattgatgaatgaagtaaccaccaaaacatcatttgtcatacccaattcaatggcacaaccatgaacacattttccaagctctaaattcccacttctagcacaagcttgaatcaaactaactatggttagtgcacttgggttaataccacaattccgcatcttaaagaacataaaaaatgcctcattaaactgaccagcttgaacataaccactaatcatagaattccaacaaacaacatctctttcaatcatcccatcaaaaacccttcttgcatcatctaatttaccaaacctcaccaaaaaattaattattgcagtccccaaaaacttctcccttccaattttcttatcaacagcaaatttgacaacttccaaacccaattcataatctgacaacccaatacaagacttaagcacaaaatgacaagtataactatcaatcttcaaattacaaaaccccatcattttaaacaactcaattgcctcaaaatacagctcatttttcaaatacccattaatcaaagcattgcacaaaatggtttttggttgagaaaattgatcaaacacattgtgggcaacactcaaactacccaaatcacaataaagagcaatgagttttgtacacaaatactgatccttggacatattatgagtaaagagctgtgcatggatggctttgatagaaacaagtgttcttccacatctttgtaagagagaaagaaatctattaacaacaggtgaagattggtggaattggggaattgtgatagaagcagtaccatagtaacggatatgaagaaagatttgatgatgaaaacgattcataagagaaaacaaatatgttcaaactagcaaattgtgagtgattgttgagatatatttaaaactaatttgtaatgatacgttaatggaatcttacctcctaaggagtagagaaagagagagagaggtgaaactccagaatgtctgctttatttggattaaggtggaattcgtagttttatggtaatccaaataaagaaacaggttgttacattcagttccaagtttcttggacagttagttatttcggttatgttcacactctcaagagcttgggtagttaagtttgttacaattctgtttttcgttttcatgtaagcctatatataaaggcatgttagctattactaagtgagatagagaagtaattagtctgattggagagtgaagaaacagagtgaggagtattgttcaaggtgtgttcttaaagtactcgagtgagagagttgggtttctcttgtattgctctgacagtttggttgtaactttgatcatggaatgaatgaaatgaataactaaggggtagcaggaagtaggcaattgtttttggcccttaacatttctcaatgtggttatcttgtaaattttataagggaaatttcattaattgaccctaataaaataccccatttcaaaaatatataccctccactaatttatacaaatta

SEQ ID NO: 296427 - DNA, 2875 bp, Cannabis indica
aaaaattcattcattgtatcttttatttgccaaatgaaataaggtttgttttcatcagttacattggtgttccttattgagagatttttttttttacagttttacatagtttataatctagtttatttgctagcaagctatgataaatattctcgaaaatttctttctttctttctttttatctgtttttaaataattgtggcttagaatttgtggttaccataaatttcactgcaaagaattttaatttataatctaattttcatttctccttctctaactaaccttgtattacatcttatagattcttcaaactaatataaccatagctcaataaattcataaattgctcgcaattaggtgctagctctttttaagtgaaactaaaattcaaatctgagcagctactagctatgattgatattttcgcataagtgtgtatgattcatgaagtgtttgacaactactactttttcttttctcatcaatggtattgtttctggacatgttaccctacagtgaggattccgctaaggagatccactttctccatatctatttcttatttgctctgagaggctctctagacttttgcaatttgaggaaagaattggtaggctcaaaggttatgctatcttacgaagagctccatcaatatcttatttcctgatgatagccttcttttttgccaagctgatgggtgttcatgtggagttgttaagagtgctttggatatttaccatcgagtgtctggccaggatcttaatttaaagaagtcaatcatgtttttttcaccaaatacaactgaagttgtcagaaattccttccaacaaattcttggaatccctgttagcgagtgtcatgagaaatatttgggattacctgcctactcggaaagaaataagaagctattctttggggatgttaaagagaaaatatggaagctcatgcattccaagaatgataagcttttttctattgggggaaagaagtcttattaaaagctgttgtccaatctattccaacatatgttatgagttgttttaaattgcctattactttctgtcgacagcttgagcaaatgatggctaagttttggtggggttcagatacagataaaaaaaagactcattggaagaaatggaaatcgctttgtaaaactaagttggaaggtggtatgggtttccgctctttcattcatttcaatcaggcattgttagcaaaacaagcttgacgactatttcaacaacctgattctcttcttggccgtgtacttaaaggtagatattttccccataataattttatgagtgctaaggaaggtggtatgtcttctctaacatagcagggcatgtactggggtagagaacttttatcttctagtttaagatataaagtggggaatggttgccagatcagatgtgatcttgatccttggatacctcgtacttcaacttttacttcattgggttacattggttgctccaataacttagtgtctcactatattacacacactaaggactggaacttggctttattgcagcacaatttttgccctgctgatgttgataatatacttaaaattcttttgtctcactcaaatgagtatgacagttggatttggtattactgcacttcgggggattatacggttcaatcaggataccatcttgctagctctttagaagataaacttcattcctctagttcatcatcctatgatgcctggtagaaattactttggagtctaaaactcccttctcttaagtgaagatctttgtttggagagtgtcccagaatgctcttcctgttgctggatccctctgctgtccgaaaatcattgatttagcgtgctgtagcccctgctttacttcgtgggaaaccgtggggcatgctatgtttggatgcaaacatgctaaagctgtgaggaagttgattggttttatgctggattttaatgcagcaactcatatgaaatatggagattatgtttcctatttgtctaccgtttatagcagaactgacttcgaactgctcccgtgtactatgtggtttatatggacagatagaaacaacttcattcatggtaaaaaactccagcaaccatctgaaatttgggtcaaatcacaagcctacatctacacttttcagcagcaccaacttcctgctgctacttcacgacaggttgcatctggtgtggctaatcataagccacgacaatcacctccttctaacaaacttaaaatgaatgttgatgtagccattgatgctttaaacaataaattgggagtaggtgctattatacgtgattctaagggacaagttcgggctgcttattccaaaccacttgtgggcaattttaaataagaagaagcaaaagctaaagctttatttcatagtctcatttgggcaaggaaatttcattttactgttgatttcattgagactggttcgttacttttggcttctattcttaatcatcaatctacgggccgatcatcttttcaagatttggtggctgatgttaaacatcaattatcctatctctcttcagtttgtgtatttcatgttaggcgagatactaaccaagccgctcatagtttagctaaacaaactttagtgttggataatgactgtgattggttagaagatttttcttttactatttttttttttttcttgttgttgtaaatgactttgtgtaatttataaattataataacagttttttctaaaaaaataaataaaataaataccttttttatattaaagaaaaagaattgagtatatctaaaagtaaagaataattatctttttaccccccgtacttatgacactatactattatgcccttaactctattcagcttgtt

SEQ ID NO: 296428 - DNA, 2023 bp, Cannabis indica
taaggtgtgattaattagcatttctatatagatatgaaattacactaacatgatccaacattaagtagatatggtaagaacactatgtttttttggggtacttgggcaccttaaaatatcttttagcatatgggttaaggtgccaagcacagcaaatgtgcaatttaatataaggtttaatatattttaatttaatatataatataaaaaattgtgaattaaggtgcgtagcgatatatagcaatgttttatatttttaaaatttctgtatttgcttaacttaaagttaaatgtctaacagtttctgatttgttcaattaatttaaatatactaattataaaatgacatttggataggacttacttaatgatgttaggtattattactattaaaatttaaatttaaatacttatgttacaaattatttggaatttaatgtgctaaagtcgtgcattagaaatatgagattcttaataagataattataattacgatagtgtcagaatgcaaaaattggtattgggtcgctgcactactaattatatatagtgaaatactcgatcaaaaagtctcatatatttatatatgagaccaatgacattatatatatgtaacaccccttttatgtatgtgtataaaattaacagcatacttgactgtatggaagtattcagtaaaggaatccaccgagcaatggtaccacaagacagccaaatgaacaacatatcaggtgtagagcttgtagagtcagcctcatcctacaaaatgctcactcaaatggacctcttagtctttttgaaacaacacgacttcgaactcaacacaatcacatcaaaatcaatcactgaattgggtgcaataactgacactatttttgcaatatctgatcgtaccaaagttattgatgccatcaagtctatgcgtatgggtttactcaatgctgttcccataattcaatcccaagatacccttgaagaagatcccaaacaactaataaatgtatgtcactttgtcacttgaaattattaactctgttttcatatcatattatatatgttataatgtgttattattaattgcaggggagaggtagaaagattatagggacattttcggcaactgatttaagggggtgtcacttgtcttcaatgcaaacatggttgccactaactgctctagaattcacagaggcaatctccacaagccctttgtttcagtcgaataattcagcagagcccccaaaaagggaaattgtggcttgtgggattgaatccactcttgcccaagttatcgaaaaggcggtaactaactatgttcaccgagtttgggtggttgattccaatggtttacttcgtggccttgtttctcttactgatataatcagggtgttgaggctctccctcctatcctagtttagacttgttttgttcaattagtttttttttatgcaagtttgttcgatgaagtttagaaggattaatagttcaaattttgtgctcataactcttttgttcagtataagacagggttgtaccaataactagttgattggattttgggatttgattatgagagacaaaaaaatggttgaatagaatcgttttttcttgtttttgtaacagaggaaataacactacgtacactttgactaaccaagtctatgaatgaattcaatatctatagagaagtccaagttgtcgattaaacttaaaccatttcatacttaaacaaaaactggtatatacctcagaactgagagtggggcacatcaatcgagaatgatagcttgttagttatttattggtcaaatttactatttcaattcaattttacataatcaaagatgacaaaaaaatcattacttccgacaaatatgtaagatatctaaggttttgcattgagctacaaatatattgttggatgatggtgtgagaaagtcaactttcacgtgttttgcttactacatcacacgtgatgtgatgtgattattttttatatcacataattggaattggaattccc

SEQ ID NO: 296429 - DNA, 7283 bp, Cannabis indica
actcttgtgtttattttgatgaaaagaatctgagttaaggattgaaaataacatatttttgtatcactggtgatctcattaatggctaactcgattttggttggttgaatacagagtaacatggttcaggtttccatgatatcagaatatgacatgggagcagaaggtgatctattcaaagctccagaaccaattatagaagaagcagccatgggacttgatccagtgacagcagcagctatttcaatggtatcttgtggagaagatgtcatatcacggcaagcactcaaggttgcagacattgaatcatttcaaaaggagcagcttttgagtgaggtcttgtatgagtgtgaaaaggatctgttagaacaagcagccatggatatgccactgtctgaagtcctggatattaagattccttctctaaggatagacgaaaacttcatccaagaaaacaaactgttttcggattcatcattccagaaaagcatcagctcagaatgtttaagctcaatggagtggatgcaaggacctgtgactaagccaaatttccttgatttcccaggaatggatctcggtgctgctgcttatggaatgcgccgtgcatttagtgaaggagacattaaggtcagactctattgttcatatagttttttacaatatgaaattgtgttgtatttgaggtttaaggtagttagaaaagaatagaatagaatagaaattatgtagttcatttgaaaacccgatgtgggattggccggaaagcgctatgcaaattgaaattgagtgagtgtggcaattgttgaattgggtaactaaagttaggaactgagaagtgtttagatgtttctggtcatttccacaggatggggctggatcattgattctgagtttttatgacagactcttggcaatggtaacataagcctcatccattctccccagcagccgatgatcatcagcaaaagcatctcggaggaacgcaaggaaaagctttcgagatacaggaataagaagacaaagaggaactttggcaggaaaatcaaggtcactaccaatcattcatttatggattataaataaaaactctttacatattaacaacaccatgaaactgactactactttttattacagtatgcttgcaggaaggctcttgctgacaaccaaccaaggattcgaggaaggtttgcgaaaaccgaagaatctgatggaaagaggcaataactttgatttttacataataagattgagaatcatcttaggaataaagtagctaggtaggtcctggtcctgtgatgtttctcaataaaccccctcatgatcatcctcctccaaaattctgcatagtagtagatatgttttattgctgtaataacctcctctgttgaccaactttggccttgtagagttgtaaatagggtataattaataatatgctaaataaaaaggggagaccaaaacaaagctgtacttgttcatataatatgttatgaaatgtaatatgttgagttttttttcctactactaaatcacttttgaaaaaaataaaattaaatgttatttaggatattttttctcttgaaatttgacacgtattaaatcatgttttttgaatttttttaactgttaaaagttttctctgaattattaaaattgttggatttaatgatttttttttaattttatttaattttactaatttagtgattgttttgtattaaattatgctcttgaaattttaatatttattaaattatgtacttcaaatattgacatgtactaaattatgcttctaaattttgattcatattaaatttttttattaaaattgaataaaaaattttaaattcaacaatctcgataatttaagagaatttttaacggttaaaaagactaaaaaaatataatttagtatatattaaagttcgagatggaaaaaaaaaagttgaagtagagtagtaaaactccatgtccatacctccaattaatattattatgcttcaagtttcaacctctgccaagaatattctttgctttgttgatttggtgttatttattggggttgtttgatccaaacttggaaggagagccttgtaaccaaacaagagccccaaacacatgtcatatattaattaaggagaattttagtgtcactccataaaagtgaaaatacacctcattaaattttttcttttatataaagtaaaattttctttaacctactcactttttttcttttcttttttcacattcttcaaaagtaaaaatataattaaaatatattttaagtataaggaaaagaattaaataaaaaaaaatataaacattattaaagtaaaaataaatatacagttttttgaaagagacactaatccaatttttgaaacagtcagtatatagattcaaagttatgatacttgatattactataggtaaaaagctagttattattattagaattccaataattacatattcaatttaatttatagatgaatacgcaagtgtgttatgcttgtttgagtaataagcataagattccccaatgaatagttagaatttttttaaaaatatattattcatttaataagaaataaaaaagaatattgaaaattcaagtagttgaagcttagactccaatttaattaggcatgtaagttaaaattagatagtttatatatactttttggtaagttacaaaaggtagagcctagaaaatgatggggtcatccatagatgaattatttggttaccatgcattgagatgcattacaattggatttttgtgcatacaagagtatgtcatcgatcaaccaaccatgtcagaagttgttttgatgttgagtaatgaaacaaagcttcctaatccaaaacaacctgcatttgtatttaagagaagttcaacttcaaatatgtacattttacatatataacaatttcttaatcgtaatctgcttgtgctaagtaaatttatgttgccaaccaatttagttcaaaatttctagttggcaggcgattgaatttgtacaaaaaaattaagctatagtgtcactccaccaatctggaagaataatacgcctaatcttaccatgaaaatcgcttgaaatttcctgcaaagtgcaaagtgacagagacaaatcaaccgttgaggcagcgatttcgctctttgttattaccaatggcctgtttcgaaaatgaaatgaaatgaaactcaaatcatgatatctaatataagataattagagcatcaacatacacaaaacaagcaaaagcagaacaggtttacctggagttaaggcagcaaaatactaaattcaatcagttgataatttaactctaaatcccatcagtcatatcaattaccagcaatcaccacaggagcaaattccatcctgaaagttatggaaccggttgatatctctgacaacaatctctctcttcacaatcttggatatagacttcattacagcatggcaatcaatgcatatccgcagatttttaatgatgcgtatagggctcccgggtggtgttctaatcaacccaaatgctagagctaatctctcgctgtgtaaccacaaaaggcgttctttttcatcctcctccacttgaagcagaatagccttgcaattaggaacatatcccgtcttccaggtttttatgttcaaccattcaagcattcctcttataagtttcatatcagaatgagaattgtctcccacacagaaataatgaaccgcgccttggttttcaatccagcttaggcctagttccttctttactcctttctttttcatgtttttcctaacaaaagccacattattccacctctttgcattggcatataagtttgacaataacacgtgtgtagcatcatcatggggatcgatttcaagtattcgctcagcagattgttttccaagttcaacatcattatgaataacacaagccccaagcagagcacgccagagcataatgctagggtcatatgggatttcctcaatcaatttcacagccttatcaagatgacctaatcttccgaaaagtccaaccatgcaagtataatgttctatgcacggttcaatcccgtattcttgtgtcatggaattaaaataagcttgtccttgctccagtagtcctgcattgctacatgctgatagaacaccgacaaaagtcaacttgctcggtttacaccttgttttctgcatcatttcaaacagttctagagcctccacacctaggccgtgcatagaataccctgaaatcatagcattccatgatacttcatcttgtttgtttaacttgtcaaacatcaatcgggcatctttgattcttccacacttggcatacatatctatcagagaattaccaactgcaacatccttgtggtgtaatgttttaattgccaaggaatgaatctgaagtccgggatccaaggctgatatactagcacatgcacgaagagtactagagtacgtgactcccgttgctgggatttgtaacctaagcattctagaaaataaacttaacgccttctcgtcatcccctagttgcacaaatcctacaatcattgtattccaactcacatcatttctattcggcgattcaacaaatagtttcatagagttatctatctctccacacttagcatagacatccattagtgcatttgaaacaaacacatttgtgtcgagacaaaccttggttacatgagcatgaatttgcttccctaaaactaaatttccttttgtagaacatgcttgaagcacactggcatgtgcaaattcattgggggaaactaaagcttgcctcatcttaaggaacaaatcaatagcctcatcacactggtccttttgagcatatctcgcaatcatgaagctccaaggcaccacgtcagttttgggcatttcttcgaatacccgacaagcatcacctatgtcccctgacttggtgtaaaggtcaagcaaagcaagaccaacaaacttatcgtcgtgataatgtgattttataacaaatgcatgcatactttgccctgcatccaaggcctcaagaccaacgtaggccttaagcaaggaagcaaaagtaaaattatttggtttgaaaccaactatcctcatcctaaagaaaagctccaatgcatcttcaaaacactcattctcagtataacaagtaatcataccagtccaagataccatatccttgaaaattatcccattgaaaacatggctagcaatatcaacgtgcccgcaaatggagtaggcatcaattagagcagttgcaacaaaagcattagaatcgtgccctaacttaaagatacaagcatggagattccaaccaagctcagcacgtcccatcttcacaagcaacttcaacattgtagtaaaaacaaacccattaagctcatgaccttctctatgcagcctaacaaataagttaatcccctccacaaaatgctgagattccgatataccttgaatcaaagtaacaaatgaaatagtatttagtctaggcatttctttgaacaggttgtgtgcatcagaaagtaagtttgatttgacatacatgttgagaagaatgttattagcaaacaagtccaaacaaccgcctctttttaaaatttcacagtgaagtcccattccccttctgggtttgcgattttcgatggagtcttgaagcatgtcagcatatttgaaagaatcaaaaccaaaatcaggcaactctagaagacttctgctttgttgggccaagcaaatagcttgggaagaaaacccacaatgtaaggaacttgtccaaattcttatacatgggaagtttctaatcagcaacctgcaaatatttgtgagaaagtgagggaataaacaaaactatatgccaaataaaaaatgaaaatatcatcctacaagatatctaaactcagccatagagaatttcaaatttcaataagcctaaagcactaaaaagtttgtggctaaaagttttagccacaatgaaaataatgttgttctacttaaattcagtaaacagagccaattttaatccaaacttgttttttcatataaatcatatcaaggaaagaaatacaaacagtttgattcacctttcccaactcattctgtcttagcttgatgaacccagccccgtcgttccacctcgtgtagctagtacccttgtcgcctccttgagccactgcaagatcttcgcttttaatatcacctttcaataatgccagagccaaatacattggcaagagcatcatgatcgatttaagttgaaaatatatagtgattgttaccattgacccatttagctaggttggcacaatgcaatgaatattaaaccataatagaagtacctacataataacaataacttagtatcagtgaccaattcatgtgagagcaaggtacatgagttcaaatcatcagaattcattcaataaccaatgcaatgctatcttcaatatagatgaccaacaaaagaaagattcgtaaaaccatatcattacaaattgtcaaacaatatagatattaaaagagtaaagtcatacttagtacttgatagaaatattatgtaatgttaatcttaaggtaagcaccaaacttagtcacagtacaaaagcaaattccttttatttcaaattaattgcatgaacacttaagctgaatgcttatgatatatatttttacctgtctagcagaacaaccataataagtattagaaacttcaaaagtactataaattcttttaagctcaaaactgtgtctaagaacacaggacagtaaaatggagcaaaaacctcaaatgttatgtgctaagaaagatattgctaggaaccatgaagtgattttagaaatggaaacaaaatgatacaaacaaagatttattcttttcaaaaatcagaatattacctgttcaaaaccaaaggacaagacttgcccactgtaatcgcgattggagacacttggacgctgccggagttgccgcggatggaagcgacggagagagaggtttgggccgtggatggccggaggtggtggtgcggccttggtctgaacggagaagaagaaacggtaaggagggagagaaacgagcggaagaggaagtgtaagagaaagaaaaaaaacctatattcttattttattttatttaaggatatttgtggctaaaccattttattatttgtaattaggctaattagtattttttttcccagaattttaacatgtattaaattattttttttgaattttttttggcggatagaaattcccccgaactattga

SEQ ID NO: 296430 - DNA, 3090 bp, Cannabis indica
atacgtgtcgtgtaaataggcttgtgtattttattgctcaaaatgtaagcataataattgactcctaaaaagtgaatttgaaaggactttttaatcataaataggggattatacaatactttctatgcatattgagtaagttttactatggcgattttatttttttgagaaaaatctctgcatgcaattaatgtcgtcttttcaactaatttatgggttaattaccgttgattaattattattattacaatcgaatagtgcccataaggcgattataaccagtcatatttactcttcatcgtcacttttgctattttcacgaccagagcaagcttagagtaaatatgaaaaacccaatatctcctttcctggtaaatgccctctctatctctattatatttccttcgaatgatagtaattatttttttgatacccagatcgtggtacataccagacccttgatatcgtagatttttggtgagaaattcatctagaatgccatgtattcgaaaaactggtaattatcgaagtcctttctcctttgaaactttgtatgtatatcatttctcagttttggtcactctaaagtttagctcttgaatttttaaagaatcttacgatattttttataaaagaaaatgcttttatctaattccaagtgtgaatatccaaactttctagaataagaaattggatatttacttgttttacccattgaaccaaaccaaaattttaaaacaaaacttttcgataatgatgagcgaattagggaacatattgattgtttaaatcacacagatgtatctgctcgttataaatatttcataaatgaaattattgaggatagacctcgttatttatgagatgcagcttagcctaacttgtatcaactgcttaaaaaccccttagccaaacctttacttttaccttccgttaatgttctttattcaccaggtgccttaaattttcagataatggctcctcctagagcttttaagcctaggttactccaagaccctactgtaaaatttaaggctaaattttttaagtctaagataacttctattggcctatgcgtcgggcctttaataatgttgtgtgacataaagcaaggaaacagttttgtgtgtcgatttgtacagcttgacgagaagagttgctaccctccaaactgttttaatgaggatgttgagtgtagcacgagcgactcttccaaagttggggcttagattgtagaacacattaaggctatggaaatccttccactaaaggattatatgaaagtttattctaactatgtgaccatttccccattttaattaatcccaaatgggtataagattttgtcttgtttgatgtctctttaccacgtgatgtgatgggaaggaccgtcgccatatgatatcacttatttgtatactctaaaagtgaatctagggaggaagaattgttctagggggttcttttatctaggaatctattcttatgaacataagatcattgttgatctttctaacaaaaaagagttcaaagatcaattcaatccgtgtgcttataccacttttcaaaaacctcgtaagtcatgttgcttttgtctttgttaaatcattcgctcgccaagagttcactaatcacatcaaaaacctatctcgaatgaatcacatagtgcaagagaaatgatgaatgttacgaccttataataattgagcaggattctaccttggaaaggattacttttctataagcaaaaacaactaaaataaaacagttgaaggaaaaagtcaaggtcaaaattgaagagctaaagaagaatttgctcgccaagaaggagaaagcaggaaaggatttagcttcccacgaggaggatacccaaagaaggttaacgaaatggcctagttgtctctttatagaatctggtagaaggaaaaaaccatgaatacgtccttcttggagccttatgtcaaggacaacattaggacttttgtgaagatgagggagaggaaaaggccaggaaagcttaggagttcaagtaggagttggatgctaaggaagaggaaggtgcaattgaagtcgaggatgttgcatctaagtctcctaaccagggggcttagtttattattttaatttttgtttttcttgagcaacattaagaatgtggtttgaaatccaacacaatcttcgtgatatcatttttattgatgaagttttaattttatagtttgaatttagaaacttttgcctagttttgatggccaactagattgttgtattttgatgttaaaacttatatgcatatatttattcttacacatgttttttcaacgcatttctcacttatgaaaaatctaaaaattgcttgtgacatcttagttgttccaattactattgttgcttctgaggtggttttctccactggagggtgtattttaaatccttttaagagctcattgagttcgacaattgtggaggctatgttatgtttgaaaaattagtggagtcaatcacattaacctatagttgttcatgaatataaagatgaaaaactagatctatcgacaatagaaaacattgttattagtataataatattctataattttatattttatattttatatagattataattatttaattaagttctattaatatttatactaatagctttgttattaaaaatagatgatactactctctctactatcgataccaccaccactacctcaggcacttctaatttattagtgtaatcagcttcagttagaggattttaatagtaagaaataagtattattaattaagtaaatatttattaaaatatatttacttaaggttttaattctttaatttttgattaaaaagatgtgaaactttgaaatatagatgatgtcatgacataaagagatgagccaaagcctaagcctaaggccctataggaaagtttgaagtttagagagccaagccattataaatatttattttataaatataagcatttataagcatggacattaaatttataaatacttttttgtagatgctatcttagtcttgacatctgtcatggtttgtttgttttctctctgtttc

SEQ ID NO: 296431 - DNA, 1822 bp, Cannabis indica
ttagccgtctggagctgcttcagcagccttcacgaaccgaccctttacacgcttcctagtatcagctcttgcttttctcgactcataccttatgtgtttatcatatctacaatttgttttaaataaataaaaaaaaaccactagttaagataagacacaaatcatgagcaaagaattatataatattaataagcagagtttatatagagaaaaataccttctgtttttcttcttttccttgtaacgttgcatagcattgcctctgttgtgagccaaaacctccaactcttcctttgatgttgcacctgttttcatagtgtcatttctcacaagaaaaggttgttccatgaaatacacctctctcgacgcactacactcttcgtttttgtgcttacccaaagctgaagtactagacgatgacccctttccaataggtagattgttgctctccgaggttgctgctccttggctactattctgtattataacaaatcaatatgattacacatacaaaacaaagtcttctagtatttttctagtcaactatcacaaactatgatttacattgatagtcatgtcatctggtgcaacagggcaattcagaagatcacaaaagttcttaatcataaaccctccatcattaggcccgtatgaaatttctggttcttcattaaccctcaatctccctgaatggaaatcccatatctgcaaaagttataaccacttctttttcaggagactaaacatggtgtttgccaaattgaggcagattaaaataaatctttaggaataatacttaataatataacacctgagtggttggaccattggggttggtatcccacattgccaaatcaccatcgtcaatgccatcattttctttcaattcacagtgcattggcatcattagtagagacgtgaatggagtcgaagatggctgagctgcaaaagcaacatcatcaacagcatcacagccatcacccaaactgagtgctgcttcagcatttcgttgccaactactccgatttgaattctccggcattaagctctcaacaccaccaccaccactacaaccgttgtctcctccgcaaccatcatcgccaagttcgtcattttcaggggccaccaaatccctcttaagcaactccaccaactgcttatacatcacctgtttcttcttcccgcagcagctggcacccattccactctgtttctttccctcttctctaacaaggccgttcccggtcggtacaataaggtcctgaaaattcactccagaccaagatgtgtcctcagcctcaggcatagccatacccaactcgtaattctgaactgtggaatcgggccgacccgatttcttttccccaagatgaaaaccccaaaccgaggcgagctcgagggccgatgggcaaccggagaatccatcgacggaattccgttcgtgtgccggggagacagaacaagttccgtgagcgtcccaatcacagtcatggcaaaggacaagattctcggtagagcaacggacggagacgggttcggagccacaattgtcacagatctgagatcggagatgcttacgtgaaagaaggttggctgagtgaacgtgttggtcgcagaacaagcatagcttagcagagtcagctctacagaagagaacagcaacctgttcactacagaaatcacagggcacactgttacccgttcgagatctgggactattcaccatgttcttattcgtagtaatgctagaaaagaaaaagaaaaggacagagagagagagagagagagagagagagagagagagagagaggagagagagaga

SEQ ID NO: 296432 - DNA, 4472 bp, Cannabis indica
gtaattctccttcatagaaaaaaacagacccattttataattaagttttctttcttttttgtctactttgctttatctttaattacatcacttttaaagggctgtcctccagcatactaatagaaacaaaatatgaaaaaaaaaaaatcagtgtcatacctgaggattggaagagtaactcacaagcttgtcagcaagagcttcaagtccaccagcttccataataagcactttattatttgtatgaaaagagcctattagagatagcagccacaaggcagcagtagcccccaatacagtggctgcatcaggaacatcaaaggcatacccttcctggtctgccattttttccatgaatgctttaggagttctgacttcaatttctaaagaggagcagctagaacttttcttcatcatttcaactaaagagaatacaagggatttaacatatcccaactcatcaagttcttccatgcattgttgtttatgctcttttacagcacaaataagcaatgcagctcctccaacactaacttctaaacttgatgagtttattatcctatcagccagtgaactcatagatccagatctagcaactagtaaatcagcaagcacaactggatgatcactgcagagccttgaaagaatttctatggccttatcctgcagtgtaggaggcccctcaactaggcagcgaactatagattctaggcttgagggaacttctgcaagggaagaccaaggggggtatgtaaagtttacaccttgttttgacctagccaaaagtgccatgacttctaaagcatcggcagcatcattcccattcatatccattgaatttaaggagtcaacaagtccaataacaacaagacgacattggctgtatcctggcagcacatctcctattgcaaaatgcattagtagttgatgaagagcacgtgatgcatttttcttaccttctgaagttccatctcttaatactcttgtcaatgcagacacaacatcttctgtcaaggcttctgcaccgatttgtgggtcacacagaaagttggccagagcagcaactgcagtttcagcagtgtcaatggaagacgttttagcaagcttgattaaaggcttgacatccccttttgtgatataagacactttgtttgttgagcttccctttgttggacgggacagagcacttaatgctcgagcagactgtgtagcaacaacttgagtattgctggtcaaaagcttcatgcaaggattcacaatctcatctgttgcaagactatcacagatatcttgtcttgtgctaaatagatcggcaagaacagaagctgcacactcttgtgtctcttcattagatgaattgagaacttggacaagagatctcaaccctttattgggtgcagaacccacttgcacaaggtccttatgtgatgccattatgagaacgtgacccaaaactctaataatgttagcttttgagcttggagtgtcgccaaggagcagtgctagtaattgattgatggtggcagaatctgctgttcgaacaagcttagtaagtgcaagtgttgaggcctctcgccctcttgatccaccacttctcaagagccataaaaaagcttggattgcaccagcactttcaacacaagcacgtatatcttcactgtgacaacacaagttccacaaaacatgtgcagcatcctcctttgccttctgagaacctgtctctagtagctgcaccaatggaggaatcccaccagcagcagtgatagcccatttgctgtcatcaacctgatcagttatgattgccagcaattcaacagcatactctcgatgttgctcgcttgacaggcctaacagtgacataagcaattgaattccttccctctttcctatggcttcccagatgccaacaccatcaccgcacaagcttgtcaaaaagagtatcaaatgttcttgcacatcagtagcagccattgttataagtccaataagaaccttcttggcttctgcatgactaatccattttgaaagataattgtttccatataaactagctaaggcctcaagaacacggtcttgaaccagcttattatcacgaggcttgagtagcatcactagaatatcttctaattgtcttgtattaaatggctcctgatccaaaccagatttcatttcaaacaccattagagtgtatgctagagctccaataatatcagaaactggagctgttagaagaggggattgagaaagctctccaagatataaaaccagagaagacatcccaccacaaatatttgctaaagctcgtgtagcatgctcctgtagggcatgaccatactccccttgtatacactctttggatggagcaactatagcttcaatgagaattggaataccatttgcatcaacaacaactttcttggctctggctgatttggacaaaagggcttccaacgcatctgcagcacttgcacgtacagaaatatcattttcccgacaaacaagctgaagcaaaacttttactgctccagagtctattacttttgtgatgctatcactgaaagccaacataagacgggccaacagagaagctgcattagactgagcagcagcattatcagaagacagaagactcacaattatatccactcgtccagcctcaaatgtttctctccaattaccatccttgtcaccacaaagatttctcaaagccccagttacaaatccttctacaactttgtcctggtttttcttcggattgagttgatcccataacgttggtacaacaccttcagtaacaaatattttcataccaacatgatcatcggaaagcccgccagaggaaacttcataaatagcctctgccgcagcttttctggcttcagtagattcagacttcaaaagcgatagtaaaggtggaatgcaccctcctagaagtaccttaagacgtaaatcttcatctttgcacaaaacacttagggttgcagcaacgttaactttagccacatgggtccctctcctgagaatgctaacaaacaatggcattgcctgggcatgagaaccaataattaccctagcatcctttctagttctagcaatctctaataattttgctgtgataagttctttctcatgaggtgaagacatgctggcatgtagttgctcaacaaactgagcaactgttgccatggtagattctgcatcatccatttctgctatttcatctaaatccctgtatataatatataagtctaaatcaggattccaatcttagtgcatcaaaagattatatatacaaattataccagatttgacttcttaactaagaaacccataaaaaagatattgaattctaaaaaattaaaaacaatttatgaaaaacagtgctaatcagttctcttttccagttaattagtatttctcattttacacgaaaaaaaattgcaaatttgtcactgaccagtccagtaataccagaaaaagacaccaaatttagaagctacagactgaaaattactgacctaaaccgagaagtagatgagggtactgcctcttggcgttttggagtgggagactttgacatttgcaatataagcccaccttgaatttcaccttggcttcctgaatcaaaattacccataaatcttcactaaattagccaaagaaaaaagaagatgattacattcatacattgccctcaaccaaaaaaaaccccaattcataattcactccagagattccacacccaaatatccaaaactcttcacattgccattgcaaccccaaaccttcatttctttaataaattaaaaaaagaagaagagaagtacctcgcctggcaatgcaaatgccgaagaactcccttaaatttgagttccaactaacttaaagcacagaactttagccagaaaaccatcattaccagaattcctcaacccaattatccaccatagctgctttaagtgtcacttactgataatacaaagctccaaaaaactctaaacaaaaaacaaataataaccaaagatcaaactacaatcgctaccagatctttcaacaaatataacaaaacactataatataatcaaattcactaataaatatgattaatttcattttaaacatccaaatgtgattaattaaaaactaataaactactaattatagagatttaaaaaaaggaaaaagaaaaaaaagtaacagagatcagatcagagcagaggatcatcatcatatttcacaaaaatctagggcaacagaaaacgtccttttcttaaaatgtcaaatgaaattaacaattgaaaaatcgaacacacacaaaattgctctgaatcaccatgatttaaatttaaatcagaataagaaaaaaggttggaaaattcaccaagtgagaatgtagcttaggaagaaatgggagctacgtcaatggtggctgaaccagagagagtgaagcggaggagagagagagagagaga

SEQ ID NO: 296433 - DNA, 1978 bp, Cannabis indica
tcagcactgatttttctcctgcactgctgcttctgccagtgttgttgctcctgctgataccactgctacaccagcagtaagttttcctacaccagcagtaagtttcctacaccagcagtcagttttcctacaccagcttctcctcctggttcttctactgatgtcccagctgctcctgcactttctctgcaaaatgttgtctctcccaacattcagcaatctgtttcagagactctgcagattaattctcctaccagcagcagcaatctgttgtctactggttcagcagcagctattgtgccaccagctcctcgaactcattccatggttactcgatccatgagggggatttacaagcctaaagcctatctagcaaccaaatataggctacccgaatcattgctgccccaagaaccaaaatccctgcaatcagctctcaaaagtcctatatggaatggctctatgtctcaagaaattagtgcactcaaatctcaaggaacatggatcttggttccttatgagcctcatatggttttaattgataacaaatgggtgtatagagtaaagttaaatgcagatggcacacttgacaaatgcaaatcaaggctggttgctagaggttatctacaacaaccgggtattgactttcaggacactttcagtccagttgtgaaaccggttactgtgaggctggttctagcattggctgtcactttcaattggcaagtgagacaattggatgtgtctaatgcttttcttcatggtgaattaagtgaaatcgtgtatatgactcagcctaaaggttttgaagatcctaagtttcccactcatgtgtgtaagttgaacaaagctatatatgggttaaagcaagcaccaagggcttggaatgataaattgaaaaagactttgttcagttggggtttcaaggaatctaaatcagatacatcattgtatatctatgggcaaggagacactcaaataatcttgctcgtatatgtagatgatattctactaactggacccgattcaattctcattcaacaattcattgacaagcttcataatcggttttctttgaaagacatgggtgaggttcactacttccttggtgtagagattcatagaaacaccacaggtatgtacttatctcaaagcaagtacatctcggatttattggtcaaactccatttggatggcataaaaccgtgcaccagtcctactagcagtacacacaaactgtctttaacagaggggcttccttttgaggataaaactctctatagaagtactttgggtgcccttcagtatttgacacttacaaggcctgatgtagcctttataatcaacaaattatcacagtttattcatgctcctacaactgtgcactgggaggcttgcaaaagattgctgaggtacttgaaaggcactatttctgatggtctatttctttcacctgccactcacttctctgttgaagcttactcagacgctgattgggcaagttgccctgatgaccgtaaatctacaggtggatatgctgttttccttggcccaaatttgctctcttggtctgcaaagaagcaacatgttgttgcacggtcttcaactgagtcagagtttcgtgctcttgccaatactgcagctgaattaaaatggttaaactcactctttactgaacttcaactacactttgctgcaactcccataatttgggttgataatcaaggggctgctgcacttgctgccaaccctgtgtttcatgctaggtgcaagcacattgaaattgatcaacactttgttcgtgatcagattatcaacaatgaactttcagttcggtatgtgccttcggttgatcaagttgcagacgttctcacgaaatcactgcccaaggatcgatttcactatcttaaagccaaactcaaagtggtatcttccccttttcgtttgaggggggatgataaccaactaactacaagtc

SEQ ID NO: 296434 - DNA, 7353 bp, Cannabis indica
atgcatttaatattaatcaaaaaattattgtttaattgttaccgaataagcaagcacttactatatcttaaattattattattattattatctaatgtatttatagaataaaagaaattatagagtgaatatatattaatagtgatatcgatgaaggaacaaagaattaaaagtgcatgaataacatcgatctcaattctcagttctccacacaaataatattgtatacaataagtacctactatatatttacatgtatatataaaaatcatatatacatacatatggtgtataaactatacaagcccatcacatttttttaataataattaggaacttatgtcaattacgactctttgatgtgctctatttttttttttaagttattaaaaatattagtataaaataaaagccaaaacagactgtaaaaactaacccaacatttggtgatgcattattagtggtcacataacaaaagcttctacttgctttgtttgttactctttcctatctactattacatacttatcctaaaattgtggttactactccaactaacttttttatttgtttttaactggtttaaattataaatatatagtactttagtacaaaagtttttttactttttacatttagaagcaattttttttttgttttatatttatacagaaacatataaagtaattaataaagcaatataaaccgcaatttaaattcaatccacgcgaaaaatattttagttaacattataaaagaaaatgtaaacattgatcagaaattgtttataagttaagtcttcaacaaaattataattagaacatgcattagataaagacatttcaaagtctctgattaatcccttttaacatcactaatacttttgtatctactttttaaatataaaaaataattgtaatttagataataataatagtatactaggacctcccattttaatttgtgtgtgattgtaaataatgatacatacaatatgatatgatatcgaaaagagtacgtactattgttatttagtattagtagtgcctattatttttttattagtggcgctctataattagttatatttttatatgagactcgatatttaattataccaataacagtatgacactaagaaatatattaagcccaaacagtattttttaacaattttttataaaaacaaatagtgtgtaatttgaaaataattaatctatcattacaaaaattgtgataacttttaatcataatactcttttttgttactaaatgtcttttttattaacaaaaatatacatatataccaaaaagaaatcttatcactaataagaatctacacatttggtgtcatgttattatttactatttagtaatcaaatttgaacctagctaaaacactaaattatatatatatagagagagaatttgaatttataaatatacaacaattaatcattatggaaaacacatgtatttttaatttgatgataaattgtttagtgactgaaaaatatgtagtgaataatgttggggacccatttataaataattgatatataatatatataatatatggagggaggaggatatatcaaagtcatgacccattatgtgtaacatgctcttataatcactgcaacaatattttgtgatctatacctaaatcatcattgtggtcccttaattttaaggaatatatattcacataactcatcctacctaggattaagattaacaccatccaaaattatttcatccctaactattttatatatctttataggccgataatgtaatgaaaaaaaatacagaaggagaacttttatttttatagtaaaatttataaaaataaacagtttagagtaactaattatctttgtatataattagaagtgtaactatttatcattttcatttatattaactattttaaattttttgtttaaacctattagtgtaggtgtatttgctttaattatgaatcgatacaaaaatattattgtttgtgttgtatcgattacaacaattatcaaattctttatatgtgacttaaaactaattagcatccgtacactattatttactttgattatgaactgatgtacaaattatatatattatttttattttggtatcagtgacaccaactagtaaatattttaggctaattatgatttttgccccctgaattttgacatgtatcaaatcatgccccctaaacttttaaaacaattgaaaatgccccctaaactattgagattgttagatttaaggacttttgtctaattttattcaattttactatttcaatgattgtttatgtactaaaccatgttccctagactttgatatctaccaaatcatgtctttcgaactttgacgtgcactaaattatgtcccctaaactttcatccatgttagacttttttactaaaattagaaaaaagtccttaaatctaacaatctcaatagttcaggggacaaaaatcctaattagccaatattttatgtgacttaaaaatcgaattaattttttttttatagtagtgaatttttagaaatggtataaaactttgtatataaatgtgaatttcacactaaaaaacagaaagaaataaagattaatgtgacaaaatctaacatatgatctatagcaattgaagatatatattgaacaaaatgtgagctatataggtagataggtatctaaatgaacagaagagatccacaattaaatatcaactgaaaagggaactgaatggttcaaaaaagtcttgattgggaatgtgactacactactactacaaatattatgtactcagaataaatcaaagagaatcaaattttttttgagatcttcatctcttttttttcttcttattctttccctttttctttattctacaatgaaaaaacaaacaagtaatcaaagatatatattgctcccagataccaagaataaagagatatcttatcattcaaaattatctactaaaaattatatatgtatttcaagcaaaaaattattacatattatatacatttgatttccttttgctttttccaccccaaattttggaatatacggccgattacctgtaatcttaaatagatctctatttagtaattataacatcaaagtccactagccattcagaaataacttatttataaatttatgtatacactaaaacaaaatagttatttttttttaatagcaacataatttttgtatgtacgacttttaatcacaatataaaaaataatttgtgattaaaatatagtaattaaatataaagttatcattaatttagttttaattataataaatatttcgactaaaaatatatttaatcacaataaattataatttttgtgattaatacttacatgtcttatatatatatatttttagaaaaacttaccgaacttattttttttattatttttttttagaagaaatggtgacattttatgagtaaattgcatcaaccattacaatattcaaaagatccaccggagcattatttagtcacaataaattataatttttgtaattaatattttcagtcacgaattttttagtcacaatataaaaataatttataatttgtcactaattttttttttaattttaatcacaaattttattattactaaaattaaaaaaaattctagtaattttatttcaagaagaaaaatatatttgtataagtttatcgtgattgaattagatatgtttatattaaaaattaatatatgtatatatagaatgaataaattaataatttttcaaataatcattagaaataaaaaaaaattgttagatataaattaggattaattgtggctaactttttgtattctaacaattggcatagttgatcattttgatttttactttcatagatgtggatatcacagggatattcttcaaactcacaaagaaacaagaaagtgagtagatagggaaaaaaaaaaaaagaagaagaaattaaagcaaccctatcaccaaaagaaacacgttttttttaaattcatatcttttttaaaatatttttcttccattgatctctattttgtgtaattttatggttggtttgggaggtcttagttttgctctagataatcaaattaaagcaagcagccttttcacttctaaataaacttttttctatgttcagcaaaaaaaaataaattgaacgtagaaaagaatttgtagatattttctatgtccagcattgatagacatgaaaaaaatttaatcgtgtctaataatattggatataaaaagcgagaggggacatgatatggcaaaaattttaattaaaaaatttaattaaaaaattaattttttttttttcggagaatgtgaacgccacatgaccaccacgtgtcgttcacatcaagctttgttggacgcggcccgcatgcatgtcacctccgacaatattggtcgtgggcctcaataaaacgtattcaaacccccaaatccatatcttcttcttccttcttagccatttcgcgatttcgaactaggaggaaatggcagcatcgaacacaacatttaaggggtgcagaggtcctatttgagctccgaaaatgtaagttttcatgaattattcatgcggttttgtttagaactatgaatataagctattttctgttttattttgataaataagctatgttttggtagaaatttgatgagtggttatcttttagagtttgaagttaggttttaaaggaaaactcatacatttgaggatttgttgttattttgtaaggtaatatcaatttatttacaaagtttgtagttgttaggtttttttaattatttttaattttatctgaatttatatgcatacatatataatttgaaatttaagaaacaatatcaatgatatagaatctgttgatacgagctctcgaatgatcataccaaaagaatgaaaaaaaaaacaagatagagaatgaattgcaagtttgtaaaaaggaaagttgatatatttgaataacatgtccaggttttaggttttgtttggtgctgtgtaatgagttttgttttaagaggaaatataatatgttttacttttttacttacgattatgttatttttattattttatttgtatatttagctatagcattgaattatggataattttttttgttttacataataaaattaatgatacttagacccgaccctagactcatacccaaatttgaaccctagacctgaaccccagacccgggtcccaaacccagaacccacaatcgaacctgaggttcgggtcccagtttaagtgtgtgtacagggtttgagtttgggtccgggattcggtttgcggttcgatttcagggtttaagtcgtggtttgggtctgaggtccggctccatgtccaaggtgcggaactgggtttgggcctgggtccgagtttggatccgggttcgggtttgaatctagggttcgagatccaagtttgggtctgggtctgggtgtgggtctgggtttgggtttgggtacgtatatggggtccaagtttgggtttggggtccgggtttggggttcggagtttgggtctagggtctggggtccagggtctcggtcctagtccaagtttatgtccggatttatgaccgagtctgggtccgggtacggagtctagggtttggggctggggcagggaacccactccgggtctggggtccgggtctgcgtccgaggtccgtgtttagggtccacatccgaggtccgcgccaagggtcggtccgaggtccagtgccggtttcgggtttgggtccaggtcaggtgttcaagtttggggtttggatctgggttcggggtccagaaccagtttcaggttcgtatccatttttggtgttcggggctgggtctgggatctggggttcgggtctaggtctgggtctgagtccatggtcagggtatggattcgagtccgagaggtctggtcacaatcggggttgaccccagaccatttgtaaacattataatacaaactaatatgggtcatttgttatgtattaaataatacgactcatattgtattaaaatttatggtcataataactaatacaataaaatattttatccaaaatagtattttttattatttaatataatacaattcttatacagtctacttaacgagccattaatatatataacaaaaacacataatttttttcaaataaaaaaaaaaaaacaattaaaatttttggcctaaggctccaattggtttgagccacgtgtatattttttattacaaatatatattataattaactaaaatatatatatttttttcattaatttttttaatggtgattttcgcttttatttaggtccgtctttttgtttttcttgttaaatataattaaatcatctgttcattatgttttgatgtttaataaataatttaactaatttgattttaaaacactagaggtacttttatatgttggaattgcagataatggtgtttggaagaataatagataaaccagcaaaggaatagagatcagttgttgtttgggcagagaatcttagaaagtgcactttatatatataaaggtttctttattcttatttctatatcatcaaagataattaagttggtacgtggagtccaaaggatcaaccaatgttggattttggcctataataataatatatatatagaccccacatttcatgattcagtcttatgtatatatgatgagaagatcttttaaatatatacatatattatatagtaggaatttcagacattgtatctttgctactgctaacttgtttaactttgagtattattgagtacaatttgagtatattttttatattatttattaaatcagaggtgcaatattgatttggactattatttcttttaatatttgatactttaaagtgttcgttaacattttgtttttacagtacattgtgttttgcataattcaatatatgttagatatataaatattaaaattattaattcagcattttttaacaatgatcctgatgattaccaatgcaatttatatctctatatattatttatggtaaataaaaaatgtcgattaattcataaatgttatattttgttactaataaataataaataatgagtatattattatttattacactgatactatctcttaattacactaatatttctcaatgtcgaaatgtgtgaatgaataattgtcacttttctagttgttactcaatggctgagtacattaattttgtttatttttttttctaaatttattagccatatattaatttgtgtaattcgtaaaataaactcacttcccacc

SEQ ID NO: 296435 - DNA, 4339 bp, Cannabis indica
ttttgttcttatttctaaaaacaattttttaaaacaaaaaacagaaaataataccaaacatgctctaagtaattttgcaactaaaaaaatttctttcttcatactacttagcctgccaaaaattatatattcattctattatataaatcacatttaatgtatcactaacatataaacacaaagctaaagaccatttctttcttcatacttagcctgcctaaaaatatatatttatatttataatagggtagtgaagccgaacaagatgctagcatagtgacaatgacatttacttggagatgtttattggggtttgattaataatcattgatgaaaaaagtgatatatactagtagtacatgacatgggactttcataacaaagttcaggaactactagtgtatatatatatatatatataatatttatatataatgtaatttattattttaattaaaaaaccgacatgggattagcttaggatgaaaatgtaggaaataggactgggtctaccaactcctaacgaaacggcatctactttccccacccttagaaaactccttcccctatgcaaaagaggttattacttccctactcatttcccacccttcattcctatcaaccttcttcaactaaagatccatattcaatggaaaactattaataccaagccaaacccctacgccctccaaaaaaaaaaattaaactacctgattaattaattaatggtaacaaaatctggatgatttatacaatcccctaaattaattgtccatcggcttaaaaggcaatttaaatcacaaaattaatatcaatcttttttatttcggttatgatttatggatgaaaatgtagggcccacctatgatatggtctggtggtgacacgtccatttggttggtgcgcgtggtgctctcaatacaatggtgtgtgtttgttattgattacaggtcacagctgggtgatgtttaaattaagctggatcgtttttttttctttttcttttttattttttgaggacacccttcgatatgtttttatttctgctccgtcgttacaacaaacctagcagtttccttgacttggacacgcaagccaccagtttattctggtaaccttatacttaattacttaattaccctttccctataattattaatttaagaaaaacctttattaagtaaaagaagtatgctacaaaaacaagaaaacgacgactaattatatatttttagcataataatttatttgatttatcttttgaagttatatgttagaggtcaataagggtagttttggaaataaaaaaagggttaaattgtaggaaagagggtgggaataaatacagaaacgggcaaggttcgcatgttacatgtcgctcttttctcccttcatgcatacgctttaattaaattaaaatctaaatttatttatttttttctggccgttttttatggaataaatgggaaatattaacagcgaaattacaataacaaaaataaaaaataataaaaacagagaaaggaatttttttttttttttgctgtaacttttggtatatatctctctcttggtggaggaatgcttgtcacctactcctttttagtttccactctctctcataaacaatcgaaacaaaagaaaaacaacatatagctctcaagaacctcccaaacaaagttcggccatagccatttagctgcgcttctgctctctgtttcaatggagaagcataagtgtaagctctgctttagaagcttctctaatggcagagctttagggggtcatatgaggtctcatatgttgaatcttccaattcctccgaagcaagaaggggatgagcagcagcagaagcagaagcctcgaccacctcagacaccgcctgaactcagtgactccgctgagtcagcttcgtcttcggaggatgatgaagcagaagaagaagaaattgaggaaagggaactgatagatgaaaagggtgtgtattatgggctgagagagaatccaaagaggagtattcgattgggagatcctgaattttcgtttgctgtggtagatgctggctctgttgtccttcaagaccgagagagcgagaccgagtcctccaaaaacccaactcggagacgatccaagagagctcggaaatcttgtgggtttgacagacaccaccatcaccaccaacaccaccaccaccaccaccatcctcatcatgaacaacggcaataccataaaattgaccaccatcatcaatatcaagaagagaatgattctttaaagaagataaagcttagcaagctaagtaataagaccgagtcttgggctgagccagaaccggtaagttctgtctctgatgctactactgaagaagatgttgctttttgtcttatgatgctgtcgagggacaaatggaggagagaagagaaccaaccccgagtcatcgaagaagacttggaggaggaggaggaagaagatgaagaagaagaagaagaagaagaagaaagatccatggatgacagtgatcaatcagaggagctcaaatcaacgaggactattgttaatgtaagtagaacaagatgtaaatataagtgtgagacgtgcaagaaagtgtttcgatcttatcaagctttagggggacatagagccagtcacaaaaagatcaaagcttcaaatgttgttactactactaccactgctttgaatgagcctgaagaaaatgccgctactactgctactactgctacgttaatggcggagaagaaagtccatcaatgccctgtttgtttcagagttttctcatctgggcaagcccttggtggccataaaagatcacatgttacgggttcatacacaattactactactactactcatactcaagctactaagagctcaagaaaggtcgtggaaagcttgttagatcttaatcttccagctccagtcgatgaagatgaagttagccaaattgaacactcggccgtttctgatgcagaattcgttaactccattaggcattgaacagttttttttttctcgtccacattggattattcttcatcccaagaatagctttgtttggttcgattatcaaggtagaacaattttttggcccgctttgcttggatctgatattacgaccaagttgtttattgcaaacaaaggtgaagttcgttttgctttgcttttactataattataaactttatcttctttcatctctctttctttttctttcattctctaactgtaatccatttttctcaactctgtttttcgtactgcaactaattccaaattcccaacaatgaagtaacaaagctataagttgtttttagaagttaggttttattatattatatttatagtaccattctggttgcacaatttaaaaaataggaaaaaactaacaattattatggttaatgagttattgtgtgtaatttaacttgtgctttgttttagcttcctagaacttctaaataactgctccaccattcttttggctcttccttttatttcttcataattttttattgctctaaatattatatttgaaaaggtcattctcaaacaagttgatcgaccaatatgtttttatttctaaaataataataaaaagaaaatgaaaatcccattttatatttttttccattcgtactgacattgtacagttcatggagaggaagctaattctctgttatctaccactgtaccactctgtctttgtctgagagtgttacacaccttacttatatagatctgcatttagagtaaggaagtagtatcaaatgactaaaatagccttcaaaaatacattttatattattattaagattttttttcggcaactcattgaattcaacaattttttcttccatacgtgggaattctggaaagttgatatgtgagcaatggcaaatcccatggtttactgaagagaatatagtttttggtttggcttgagcaaaagtatcttcttatgcaaatactgtccaaagtaaatataaaaactcaaccaagttcttttctcttctttttttacaccttataatttgattcaatttgaattagtagtgttttaaaaactatttcgaattgtttgtgatactaggtcatgattaaccaaacgtctgtttaatattagatagtgtaattcctattttaatattcaattgagaattactatgaaggtttttaattgttttaaagctaacttttatcaatatctattctatataaaatgtggttatataatagaattgttggtttataataaattatagggtgactttttttttttaagttttttattcaaaaaaaaaaatgttataaatattaataa

SEQ ID NO: 296436 - DNA, 6168 bp, Cannabis indica
aatatttaagcttaaaaagttaattgcaaataaattgatagtttagagagtttaaaaaaagaaaaaaaactctaattcacaatatgtcacactagtattacctaatttaccttcacttcaatatggaatccaaaaagaagagagaataaatggaaatggaattttgttcttttacttttttttttttttgtatggaaaacgacaacaaataatatcaacttctagtcgatccacctgatcataccaccacattctccttttaaaacttctcttttctcgccaaagtctccttttaaaggtgtttttatgcatcgaagtttgaacttcatcattgcttcgaagtccgccatagccaaacgcctctctcagccacactttgtctcgtttctttcctaaaataatatcaaacaaggtccttccttatgacgtcatgcagtcggtgcttggcttccaacggtgttacctcggatggtctgatccgtatccggcttcctccgagagccacactggcagcggcaaagatctcgattcttcctcgaaatttaggcgaactgcggccggggaacgttctccggtcgaggcatttacgcgggcttatgcctccggtggaggtggttgccgccggagcagggtgggagaggtcttcggacgggggagagggggagaaggagaaggttggcgtgtgttcgtacacgattggcgatcagagagtgtcggatgtggaaacaagtggcggcgagtttgatcggaggaaggggttggaaatcgtggcagcggcggctgttacggtgctgcttggagttggaaatcgagtgttgtataagctcgcgttggttcctctgaaacagtaccctttttttctcgcccagctcgctactttcgggtacttcaacgtaaatgtaatactgtaaatttgtaaattattactcttttcatgtttctccaaaaaaaatatatatatgttttttcgactgaaaataccacctttgcatagtaacattgcgcatatttatcatttaatggagtcccaaattaatctatagatatacatgttgttcttctctttctctcttatttcaaacactataataaattatgggaattagttttggtcttgatttaatgatgttaaacttacttgctctgttttccccttgcaatttgcattacagatacgtaattgtatacttctctatcttgtatatacggtatcatgctggcattgttactgatgagatgctttccatgccgaaagctccatttcttgcagtaggcctgttagaagcacttggtgctgctactggaatggcagctggaggtaaccatcttatattctttcttttccttcattttgcttcataattaccagtttaggttctagccaatacttgtgttttgctgaatcttgttcctcttagttgatagctctgtgatactattcaatatgcatgaagatcttattttgtttttattccaaactttagtttgagttttagtaaatccgttactcatgtgtttaaatgtatgaaaaatgttctgcttactgttacctcatgctggtgttctggctaaacagataatcaagttctattatatgagtcaatactaattgtttatttatcgtattttctgtgtccttgatcagctattctatctggagcatcaattccaattttgtcccaggtaagcagacttcacttttttcatgttcttcatttgttttacaataacattgggtgtaggtgtaaattcttattctgctagtgttctgttctctcatgtcctctgattaacacatctgtgaattacattagctacccagcctgccatgacctcttgaggctagctggaagtggttggtgagtgggttaaagggtttggggttcaggtttgtttcctatttttatgtttaaacaaggtctgattaccactctaatgttgaactttggagaactaatccagtatgaccatcctgttcataatctaaactgtcagttcaatgaaatcatagatgtgaaagtattggcgtatgcctgttcgattatgtagaatgaataactgcaaaaaacatttaaggtagatttgtaaataacaaagtacatcagcattgtgcttagaagttgttctggtgagattctgttagagtactaaaacaggattgagaaaatgggaggagcagaatggacatgctgttaaaaatgttgatagaacattaatttttttggaccaatagaaattatagaatatggatactatcattataggctgtagccttgagattatttttcatctcatatttttttatgtatgaagtggaagttggataaatataattgactgagacctatgttaactttgcagacttttcttgtttggcaaattctcctgtcagttattttccttgggaggagatatagagtaaatcagcttttagggtgctttcttgtaactattggtgtaatcataacagtagcaaggtaaacattgttcacatccttttgattttgaatttttatataggatggtaaatatgattgtctgtagattatggagttttgatggagatttatttgaagaacggtcaatattgtctgggaaatatttgtaaataacagttttctccaagatttacttattctttggtgatattattcgcgttgaaccaacatgcattgtagtttatatttgtagtggttttagtcaataataataatggaaattaacttatcggatcttaaattggagagcacatttatccataaacaatagaatattcaacgatgtgaagagaatgtacaggcaatatttaggagagtcaagtattgggtggttatgtggattttcattgtaacgagtttaatgctttttgcttttcaatgctctacttagtgagtggaatacatgtaatatgtgatagtctttttgtttagaactagactccaatttgttttattaggttgcaatttggatgataccttaacatttcttattaattcacaacctgtgtttcttatgaaaaggcaaaaggacaaagcttttcttgtgcattaaaagttttgatagttcagttgatctatcaattaacatgattttttttgcaaatttggttttcttactagttttatttcaatcaattaaacagaaagttgtagtcgatcaagctgaaccaaaaaccatattacagttcctctgaacttttattatgtctcagcactgtgcataattggtgtgcttagctctgaattatttttgcagtgggtctagtgctggacattcattgaaagaagcgggtattttttggagtcttttgatgatagtttcgtttttgttccaagcagctgatacagtgttaaaggttagaatttctgaatgcttaatcatttttttcctgttaagaacattgtatgcctatgtgacaacatccttttgaaaatttgcaggaagtaatttttcttgatgctgctcaacgactaaaggtaccatttgtgattatttttatatgtatatgtcaagcagaagcagatattgttttgacagtttattaagataaaccaataaacaaatctttctttcacatactgaaactaacttttctctttggtgcaggggaaaacagttgatctatttgttgtaaattcttttggatctgctttccaagtaggtatcaagtaatcataattaattttgataatattgtttgttggaagaagctactcttccaaattatctttctttacttagtattagaaactaatgggcctgtgtccatgtcaattgcaggcactctttatatgtatactcttaccctttttatcaaaactatggggcataccatttgcccagctaccaaactatctaaaagatggtgcagcttgcttcttaaacattggtggattatccaaaggtaagctttcttttattatgatattctcttttctgatcatctcttatgaatgattattgaaaaaattcaattatttaaataataaaaagaacagaagaagggggaataaacagatatggctgggtaactgggtctgtgatttcttcattagttaaagtgcttgactattccattcaagtttaatctatgtttacaggaatagatagatagatatctctgggttaatatttaataacttaggaaaccgttgactatggcatgtagctgacaaattttaatgtacgttagcagctctattatcgttcagtagtttacatagcatgaaataatcaggcaagaaactggaaagaaaagtttaattgtaaaaaaggtttcttgaatttcgcctaatgacattatatttgaactggaagaattgaagtggttacattgattaacttactacaggctgtgatggagctccgttgctacctttgctttttgttattgttaacatgggtttcaacatttctctgctgcatctgcttaagatctcgtctgcggtggtttcttgtctcgcctcaacattctcaggtacttcatttaacaacttatgaaatcagtgccagttttaagtgtatccacataattccatatattttgtacatgaatatgggagggtcaaaagttcaaaactactggtttagttggagaacgcataaaagagaagcctcagttatatatgggcattgagagagaattacatgtagacagggaaaaagaaacacaagtttagaaagtgaaaaggatgaaacggtaggaaaatcctttgctcaccaaactacaagttcagtctgggtttgaaaaggttatataagctatataggatgctcaaactgttttaatgttctctctcttaccacttacacaacccacatcacactagcctgagtttggccaaaaaggtgagatttgatcctaagttgttaagtttaacaccccaatgactaccaactcgcacatttggctcaaaatggatttgagaattggatttatgaacctgaggaagggtttgaacttctaaaagagtctaaaatcattagatattattgtgattagcttaataagatgctacagatgagcaataaatagttatgatactacggaaattatgctgtactattgagttgatcgactcagtttgagcattttgcaagatttcattaaaaggttgccacaaagttttgttccattatttgttaaaatgttatagaactgcttgattattttagcttcttttgtgggctttattatcttttaataaaagctttagttcttgtgggaatttgttttatactaatcaatatgttcatacatggcagtaccaatttctgtgtatctctttacactgccacttccatatcttggagtggcatcatccctgccaaaaggctttgtggctggagccattgttcttgttatgggtttgctcatctattcttggacaccttcagtgagttcctcgaatgcctccacagctcctactaacctctaaaatctgatcactgtcattgactcattggcaccccttagctccaactccaacacctacaatggctaaatcaaagccttgtttttttggtagtgaaaaataatattttgttgtaatcgtatttcaattgttccataatgtaaaatgcctaataatgtgcattcatgatcttaaaacaattaaagatcgcacatcacatcacatcaattaagtttgtgtggaatgtggattcttggttttaaaggaagacgaatagaaattgagttaggatgttcgtagtttttgtagtaattttgactagctttaattatgaattaataaattggatgataaattattggtattgattatatcaatggactacaaaaaagaattttgtaagtataattttatattgtctaagagtgcattccatatttaaagtggagtaataatagaattaatactagattattttattaatgagatcaatagtaatctcgagtttattggagcttgaaagtataagcttttagttttaaattgcctctacatgacactatgcaatgaggattgattatttggagaaagaattacttttgtaagaatattatttttgagggcaaaatagtatttttatacaaattattactttaaattttattgtttaattgagaattaaataaataaaggatttaattatttagttttatttgttttttttttttgaggaaaagtctgttattataaatca

SEQ ID NO: 296437 - DNA, 8781 bp, Cannabis indica
ttagtaaaaaaaatactaacatgcatgaaagtttaaggggcgtgatctagtatatgtcaaagttcgaaggacatgatttggtagatatcaaagtctggggagcatgatttagtacataaacaatctctgaaatagtaaaattgaattaaattaaacaaaagtctttaaatctaacaatctcaaaagttcagggggaatttttaactgtcagaaaaattcaggggacataatttggtatatcttaaaatttagggggttaaaaatcctaattagcctataatgaaagcctaacaaaattcaaaccaaattggaaggtaagtacaaaccatattatgtatgtatataaattgaacttttatgagaagtaacacaaataagagttacttttttttttggtgatagatttaaacataaagtagcatttattaaattgccaaaatcttactatgaggttataacttggccagagataccttttaattagtcgatagtctgcaaaaactgcaaaaattatcaaattttttgttttatagccttcccaccaattggatagagtcaaatcaattcgagaccacatttcaaacatgtcatccaacatttttcatataaataaatttcgctactttctgacattcttggaataaaatctaaggacaacataaaacaagaggcgatatagaactccccaagcgagcaatatcaaaacatcataccataagttttcatgctcgatatccatggagaacaacacatcttctccaatcaacgcgcatggttgttgtaacactgtcctgttatgaatatgcaattcacttatcttgatttctcctagaggacctggcgagagatcttgaagagggccattgtaacaacgcgttcctttgaattcattggtcaacatcgcctcaaatggatacttaattgctgacaagtagtgtaaccatctccaaaagattggaatttgcgttcgcttaaggaaaaatccgcatgtgaggaagaaaagagctgtcgttgcgattactactgcgtaacctgtaatggaaaagtaatatgaacaagtttagtggtgagtaatgatatttagaagggaattctcacatatttttaggaaatttcaaataatttaagatatcgaaatcaagactcaaacaacttgttgtatgcatgcttgtttatgcaagtgcaacaggttgtttgaatatttattttaacatcttaaattatctaaatttttgggaaaatctctttagttatgttatataccgttgtgtaaaataaatagagttacaatttatatttgtaccaaaaataagggaaatttgcagtaaaattttttatgtagttcattttgttgcacttaaattcttatatagttaattttattgcacttaaatctctatgtaaattttttgatagtgaaaattcctatgtagttcgcctttcgcaacaaaaatttcaaccgttacatatttgatgcaacattagtccctgagttggagacaacaaagggactaatattataacaaaatgacttcatagagatttttaagtgtaacaaaataaactacataagtatttacgctgtaaatatccataaaaataactatagatagtgattaaaatcaatcaatactatagcaatatccatatatttacctgttatataacttggaacaagagcactgacgagcatcacataagcattggtagtaatgagagaagcatagagaatgatccaaaagtaaaagaggttggctctaagcttaagtatgaaggtggttatggctgcaaatgtaaatccttgaattgcgaaaaacggtaggtaaactatgagagaggagatgacataggacgaggctctataagcattgtgtgaagtctctcttataaagatgaaacgctcgagtataaacgttggaacggcgtcgtttgaggagaagaacacaagacaaaccgaaaagatgtaaaaattcaaaagcctatttatgtccttaaatgaatcgtgattcaatttcttgaaaagactcgcaagaataagggccattactgtcaagacaatctctctagagagaaaaagctctggtgttctaatcacattcaatgctgacctccatgaaaggatgaacacttctcttaaccacggatttgcatattttggtccgagatcaatctcatcgagtacttcttcttcataatcatcgtcgtcgtcgtactcttccatttcaaactcttcaacaaatgaagatgagttgaaggttgttgagggggttttagctatagagttgttattattattagggttactatttggttgattataaggagtaggatattgactcgaaacgaagcttcttgagccagaccttgaagttttccgggcaggtgtttgcccaggagttctagctggggtccacgacggaggtcgtcgtggagttcccttaacaccattgtaaacccaagaagagaagtctttataaaattgtgaagctaaaggaggagggttattataactactactaaaaactccactatgaagtggagtctgaggtggccttcttcggccacgctctaaagatttgttaaaatcttcatcatcatcttcatcttcgtcgtagtagtccatgaaattgttagcacttgttggtccagatgtcatgtttgatgaagagaagccttgttggcttcgaagattgaccaagtgagtacttgaataattaccgcttctgtatggtgttcttaaggcttttgggggtttgggaattggtgttctggctgcttggtctggctttgtaccgtcgcgttggtaaagcacaagggggtctagtcctatggttgcttcatcatactctttgatcacgtcgagaagatactcgaggttattttcagtgtctggaactggcctaccaaagccgtctaggtaggccgagaggccgttagggcttcccatgtatactaatcttcctctgccacatgaatatatacataaaattgaaatagttacaatgatgaatacaaataagcatatgtatatatttgtgtaaatgttattttggatcctatattttgtaaaatttattgattggactatctgttaagtaacaaattggttttcatatttttcaaaataatacttgagctgatttgttttgtcaaaataaaatttaataataactcattctagaggtgttatgaaaagactgattatattttttatatttgtttgtgttagaaattatcttcaagtttgttatattaaaaaataattataaaaaattaaactcatggtactatttagtaccattttagttaaatacaaggtctaatttatcatttaacaaaacagatgatttgatcagtaattttaacaaaacacaaagtctaaaatagtattaattctatatattttttaaaaaaaaaaagttgtaaaggaagagtattttctttatattatatatagatatgcaatttgtataatcttgtttgcatatttggttttcatacaccctacacttagtttggatttcagacaaaaatcattttgtttaaaaaaaatatcaaaaagaatattgttttaaataaaaatttgtatgaatgttaagaattgaagaatatttatgttataaatcattttatagttttgatatttcaaaatgacttcttttaatgtttcatttttcttttacaaaagtaggcattgagaatttttcactaggtatctaaaattttcaacaaagtattaataaaaggcctcaacaatatccattttgtaaaaacctatcaaaaagagacttatgtattaattatgtgttatgaaaattttcagtaatgaaaatatatgtaatttgtgtgtgcaaatattattatataccttgctaggacagtgatgcgatcaagaagaatttgaatgcgaaaagaaggttgatggatggtcataagtacaatgctaccacctcgagcgatgtccttgactttttcgactacactatacgcactggttgagtccaaaccggaggtaggttcgtcgagaaacaacaatgacggtttgtgaattatatcgattcctatagaaaccctacgcctttctcctcccgacacacctctccttccttcatccccaatatacgtatgtgttgcactctgcaacatccatccatacaatacaaaacataatatttaaaaaaaaaaaaacaattcatatttcatttacaaaaaaattaaaaggaaaacacaccctataccttaagatgtgtcatatgtgcaggtaaatgttggattttatatttcaatttaaattaaaaaaaaaaattgaaacccgaaatcattgaaaaaaaaattgaaacccgaaatcattgaatgatactatgccatattctatgatgttgacaccataggtagcttatatcgatacgatttttatggaacatttttcaatgaatattacacattcataattactaaaaaataactataaataattttagaaatattaaatcattagattttgattaatgagccaaaaagaaaatttaagcttttatgtttagtttagttacttaattaaaaaatatatctttttatactatattaaaaatatatttatattataaatatttaactcaaacctaatttttttttatctttctcagtcgataaaacaatcttagcacatatatatatattttaattggtaaataaaaattaaaacataaaatttttaaaattttcctaatattacccatttataggtaaaactcattaaaaatattcgatatacagggccaactctggacttctgcgccaagggcccacctaacctagggcccaaagaaaagttttttctttttaaaaacacacatattctaaggcttaatatatctcagggtcgaccctatttataaatatcggtacctgcaagccaagttgagcaaggagctcatggactcttttcttcttttcaggtgtggaaatggaaggaggaagtctgacctcagctgcaaacatgaaagtctcaaacacagtcaacattggaaacaattgatcatcttgcatcacataagatgacaccctcttcatgtagcttgttgtaacctatttatagtacaaaaaaaaccataatcaacaaatattagttaattactatataattgtacctctaatcaaattataatgtttaatgtgcacattatataaaatattacaacttgttacttttgataaagtgagtgttttctaaactaaataatattgttactttgtgtaatactttagtacatattttgttgtattcacatcttattattagataaaagatgttagtgatgtctatgatattacttaaaagtattatattattattaatgtaatttaatatcaaattttatttattttaatttaaaaattactataaaaaatcgtaaattacttattcaccttatattagtattaaacactcacgacatatgtacactaaaatattacaaattgttacttgacaaatacttttgagaaagtgagtcttttctatactaaatattattggtccaaaaaagttagtacattaccatgtgtaatatttcaatgcatattttgtatgcagatattattactcgagaaatgctaaaggatgcaagtgatgcccaatactatctaagagtattatattgttattagtacaatttaacttcaagttttatttattttaatttaataattactaaaaaaattaataactatttgtaagatatattaccttatgatggtattgaaaactgctaatctctaataacaatattgaatcatttttactcaaatagagatatatttgataaattaactttttagtcactctacacaagaatttacttttcgatgattttcttacaaaatagtctaatccagagacacccaaacaactttctcgataccctgtcgaaaggctattttgtaaaaaattatggatcaaagactatatttgtttaaatatagtactataaaaaggttatttttatcacgtactctacaaaaattcatatattatttactaaccggttttccatcaattctaacagaaccctctaagctcccttgagcaattcttccagccaatgcatcaagaaaagtagatttaccagctccacttggccccataatagccataatttctcctctcatcgcttgaccagaaatatcattaagtagataagcttgcttgtcgatccaaactccttctcttttttgtttctttatgatactataagaaaggttcttgaactctaggccgtggcctggaatcatatttctcggttgaactgcaacattaccatttctcgacgtgttatccatgtcgagaagtgtctctaggtttttgttcgtttcattcttcttcatcatggcgagtttattattattcgccatgataatcacaaacaaaacaataataataagaagaagaagaagaagagaagacttagggtttttttaaggcttaagagaaattagggttgtgaaagagttttaaagtaatgaaatttgataatgtggacaaatttagtgacgggtaaaattatttcatttcattgtagtgagacatataaagtagtgttttgagaattgtggacaaaagaaatgtagtgagaattattatgagacggctacataatatataaatgtattattttgtaatttctttggatttatcattcactagctagctttgataatatcactacaatcatattttggcttatatgtatttcacataaaatacatcaagtatataaatcaagtacaaatagaatattcatatgggactcactaagaataaaattatttagtgtaccttttttattaaaacatatattattttgtaattaaaaattacttttagtcacaagtcaagttattactattagtttgttatgtatagtgataattttattagtaaatatcattttagatcttatattttgtaaaaatttattaattgtactctttatttttcaaaatagtactatgagctgattttttgttataataaaacttaataataatttaattttgtggtgatgtgacaaaaattagttatattttctacattgttcgtactaaaaattatttcaagttggttatattaaaaaaaaaaatcaaaaattgagcttagggtaccattctgtatcattttaaaaaatacagggttcaatttaccatttaataaaacagagagtctattatgtatttttacaaaatatacataatccaaaatggtattaatactaattttgttataataaaaaaatatatttaattacaacaaattataagttttaccacttataattttaacaaaatatattataagtatgattaatgatatattatattgtgtaaataatgattggttggttgtaattaaaatatatcaatcaagtggtggtgttagattgttaaaaaaaatggtggaattgtacaattaagatttttgccaccacatgtactaaattaaacatttcaggtcgttaattttttttttaactattaaaattgtttgatttgaggattttcgtttaattttactaatgaaagtctaacgtggatgaaagttcagaagatgcgttttagtacatgccaaagtttggagacatgattagatacatattaaagtttgggaggcacaatttagtacaagagcaatcatcacgttagtaaaattaaacgaaattagataatagtacttgaatctaacaatcttaatagttcaggatgtatgatttggtatatgttaaagtttgaaaagtcaaaaatcctaattagcttaaattcaatacaaatatataaggacattgtttgggcctactattttattttatttttttggaggtcgttgtttaaaagaaatatggtaatattgagaattatcagaaaaatatgtagatttttgcaaattaatttttttttgacctctagctaggcttaatgggtataaaactttaggctttgtctgttgaggaaattacattgtatacctatttttttatttcttattttaatttgtacctttcttttattactaatttatacctagttttataggtcatatccctattatgtacgttagggattctaatttggataaattatgtgaggttatgtttgttactttgattataaaagagagaatttatcaattaaaattattttgcaattatatttagttaaagtgtaataaaaataagttttcaacttatgcctggtatgattggcattcccaattgttgcatgagaattttggattagttttttatcaaaagtgaagatagtatagatatattatttatgaacacttctccttcatatttctcattgatcattgtttagattctagggtttatgagagtgaattataaaatcattgatcaaatttatgaagatatggaggtttttattcatatttatttgcaaattactcaatagccaaatttatttagtattctatgtttgtcttttgaaatccaacaattttccttgtgcattttacttcatgtaaataatttggttaagatatgtcaaattctactaagtatactacatacctagtaaaacaaatagaatctatccatacaatccacctctttcaaaatgtatggataaattggctcaaatttaataataataataataataataatataataataataatagttagaagataaatgtcgacggagctattttcgaaagtgaaaatcgttttggttttgggttcatagttagagattcggctgg

SEQ ID NO: 296438 - DNA, 5273 bp, Cannabis indica
tgaaatcccttgaagatgcattatctcaggctcagactgagttactttacttagtgaacaaaataatgatgctcaagtctgtataactgatttggaaaatgaaatgaagaagctgcaagaggaagttagctcacaggccagcaagcttgcagatatggatgtaaccaaaaagtcattggaagagtcattgttgagggcagagaataatatctccatactcgagggagagaaggcgaatgctgaaggagctatattagcactaaattcaaagttaaatgcatgcatggaagagttggctggaactactggcagcatagaaagcaaatctgtggagctgtctggttatctgcatgatgttcaagtacttatgaatgataagacgctgctgtctttaattaaagggtttgagaagaaatttgatggccttaaaaatatggatatcattcttcaacggataagggaccattttggtggtttgggttttgaagtgatggaaaaccatgacatggaggtatgtttttggattactaattcttgtgccaagtgctttcttcgttcttaaatgcatgctgttttgtggatctgcgtatgcattactttgttttgcatctttcaaccataacacagacttaaattactttataatttcacctagtaaaagcatgagctattgttgcatttttctcttcttcttgctaattagcttctatactatgcatttcaggatttacatacgacaaactccataccagatgatattggggatatgtttaatattgaaaaggataattatgagatcagtgttgtagatggtgacctcgtttcatcttttaataagattacggaaggatttcaattgagaaacaaaattcttgctgaaaaatttggacatttctcttcctttctagatgagtttattgcagctttgttggggaaactacaggtaacaagtgatgaagtcatggttgtatttgaacacattgagtctttaaaacagaaggtaaatggtttggagatgcataaacaagaacaagataatgaaattgctttgttagaaaataatttgaagactttattatctgcttgtactgatgctacgagtgaactacaattcgaggtgaggaacaatttattggagcttagctctcttcctgacgttgaaaaactgagacaaagtttcttccaagtgattgaagaaaccggtgtagcctctggtcaaaagggtcaccaaaaccttgaaggcagcaagtatggtaaagcagcagagatgatgttgcttgctaccagaaaagttcaagctctgtgtaagcattttgagagcaccactgaagttgcagcctctacaattgtagatttgcaaaatgatttgatagaagctcgaaaattttctgagaaagcaattgaggaaagtgatctaaaacaaaatacaatttccaagttggaggcagatgttgaagcttttagaacctcatgtagtgagctgaggcttatagtagaagattatcaggccaaagaggtggcgttaaaagaaagagaggcaaaagttttatcattgcacaattcattgtcgaagaaagaaagaggtctgtttactttcctccattgtcattctcaactacccttgccttttggttaatcattcgttctaataagttattttttttttccattttttctgtttcagaggctggagacaccctcttgtcagcatctcaagtcaatactctgtacaaaaagattggagagcttgagattcctgtggtagggtccaaagtaggagatacagagctccaaaattcttctcagttaaagaagctcttctacatcattgataatttctctgacctgcaacatcaatgtatctcaatttctatggagaaggaaaacctacagatggctcttgaaacacagatgctcgagaatgagcagctgaaggaggaagttgaaaaacacgctgcagatgaacaagcgacagaaaagatgagatatgaactttccgaacttatgtttggtttggagaaaattgttggtatcttaggaggtgacagtttgattaaggaccaaaattcttctgttattaagggatctctggtggcattagagaaacgggttatgactttactatcagaatatgaaagttcaaaatcaaaaacccaggatcttggtagcaagttggtgcaaagccaaaaggatgttgatgaattatcaatgaaggttaagttactagaagattcacttcaaggtagggatacccagccagagattatccaggaaaggagcatgtatgaaggaacatcaatgcccaccaatccagaaatatccgaagttgaagatgtggtaaatgttaaagcttatatttatctactctagttacatatatgctgcattgtttttcaaatgttgttttttttccttttaaatttatgatttttatttttgtgtttttttcttggttcgtatctagattatgtgattagatttttgtttaaaaatgttaagagcaatatgttattaaccctctcttttaatatttgtgcagggatcacttggaaagaaagcagtatcatctgttccattggcagcccatgtacgaactatgcgaaaggggtctactgaccatctggctcttgatattgatggagagactaatcgtttaatcaccgatgaagaaactgatgaggacaaaggttcaaaccttacaattttagttatttttaccccatcatatccaagtatattctcttaattttttttcctttgccaggtcatatattcaagtctcttaatacctctggtcttgtgccaagacaagggaggttgattgcagatcgagttgacggaatctggtaagaattattaaaatttggtagagattcttacttatttctcgtattggtattagagagcggaatacacaaagatccaagctttcttttactgctatttcatttattgctattattgtgatatcttaattccaactagataaaataagaagataactgaaattattagttggaaaatagtaaaaggtttcccatggaccatgagcaggattaaggctcccttttggctaattttgcatctctgctaagtacttggtggcatggtcttaagatgtattagaagtgaaaattgatgataatttgttggtgatattgcagggtatctggtgggagagtcttaatgagtcgtccaagggcaagacttggtgttattgcctattgtctccttgtgcacatatggctattagggaccattttgtaattaaaatggtcaagtgtagcgtatagtcagtcagatagtgccattttttttttcttcctgcaattcttttctcagtaaactttttgttcatatatgtaaagtgtaattgattctccacaatcacattttaaggttccggagaatccaagcaaatgtgtttacttagcagtgaattatatatagcctcactcaaattggacttcttttatgttatggattttaaatatatattttttttttctctgttgtaataaaagaataccagcaataatacataccaaatttgaaggatgtattctgaagattttgtaggttattttcattttcctatttttctttctgatcataatgtttttgattaatatggcaaagataaatctgcctgatgatattggttttggcttaaatataatagacttgtaatacttgttttaatgaatcttatcagtggtggtgcaaaaatgggccttgtttttgtgagctcacatggatgaagaaagtgatcgagtccttttatgttgagtaaaatttacacttcattgattgtggctgccaaagccgactatgtaaagcagtttggcacaaactttagtaccaaaacataaattatctattggcaagcttctaataaacaacttttaactcgggatcatttgagtaaattcatgagcattccctctgttttatgtcctgtttgtgagatggatatagagtcgcatagctatctgtttatggagtgtattttcaccaagaaagttgttgcagaaatcgaaagctggctgggttgtttccgctggcttagagactttggtgagctgttgcaacggtgctcgacgaaaacagccggtttttgtcattatgttgtaaatgctgtaatttctgctgccttttatttgatctggaaaaaataggaactgttgtgttttcgagttggtttgttgttctgctaaggcaattagtagggagattaaaggttttgttaaagctagagtgttgggtctcaactagttaagatgtaacaaaagagttcattatcacaatatgttttaaattgtatagagggctggtagttgttgtttgaggctttgagcagtggctttggctgcttgctttggtttgtatctttgttctgttttgaataaaagttatttctcttgttaaaaataaatttatacttaaatctattacacttgttcaaccatgagagcttcaaaaagatagctaactatgttttaaatctctacaaataaatttcactaggacatctctaactataaaaacactaatttggtattgaaccaacacaaaaattgtatgattttaatacaaagtatgttctttttattattataatatattacttttatttaataaataaaaaatattatgtaaaagaattgatattataatttatataaataaaagaaaaatacaattattaaggttacactatagtctactaagtgttccgtaactatatttagtgaaacaccgtaaatacagcaaaaataataaaatttttagtaagttatttttttgccattttaacactacttttgtgttgagaaatgttataaaataccaataaagcatattgctattagtgcaattaaatatcaaattttatataatttaatataataatttttatgaaatatttgtaaccaatagtaagatattaattttagtgcttaataacaatattcttttgtgtttttgtgtttttgtgttttattggagttggactaaaaagaagcaaagtattaagactgaatttaagattaccaaaatctaatacgagcaagttcaatagcttgttgccttacttattgaaaaagtatgatcatatagacaatcttcgttgccaataccaacagtatataacagtgcttggattattttttatttttctttaagagaaaagttgaacccaaagcaactttaaccgtaccttgtaattgtattagggaaatttcatattttggccttaataatacaacccatat

SEQ ID NO: 296439 - DNA, 3004 bp, Cannabis indica
aaaaaaaaacaaattgttgtattatacatcaatatttcatatattgcttataatcttattatggttagttataagaatattaaaatacaaaatccactttacttcttatgttcttctttttttattaattagcttatatgcatacgttaggcatcactaaaatgtatcaaaagtacatttaaaaattaaaacagtgaagaagttcaacatttttatatttttctatgcaatgtttagattcatcttaccaaaactcaatcattggccttagattagcaattcattgttagattgaaataagtttattatctagccgaaagatatacaaagtcaaaatacgagtcgattggtgaataattaattatgtttttactttatatgaatttttgtagttgtgataatgggaggtgtggtggtgcaagagaaggcagatgcagctatgccaataacaacattatcaccaccagaaggcaacacaacatttctagatgggctaacatggtgtgtggcccatgctggggtctctcaaattgatcttcagaatgcattggattgggcctgtgggcttggaatggctgattgtaagcccattcaagagggaggcccatgttatgaaccagacaatcttgtctctcatgcttcttatgctttcaataattattatcaacaaaatgggaattctgatattgcttgcaattttggtggaactgctgttttaaccaaacataacccaagtaagctaatcttacctttttctttttgttattataattagatccaatgagatttactttttggggtttttattagatctatttttctggtggttttctttaagtatataaataaatgaagaaagaagtatactatacttgtttgaacaattcttttgttttacttagaaaagtagttttttgatgatttcattaaaaaagaaagaaagaaaaaaagttcaaaaaattactctcccacttataaaaaaaatatgcaagaaagtgatatcttgttactttccatgaacatgaacaacttaataagatacactttatgttttctcactcaagtgaatattaaatattaattagaatatcatgaccttcggatctaactttgttctctcctcattgaataaaagaaatatatcattactaagcattgccattgggtcatgtcgccttgttatgaggtacttatagtgtctagcaccacaaaaaagtatcgctctataattagttagcgattttttataatatttattaaagtgaaacaagtgggacgcgatattaaattacacaaataacgatattacaccttataagagtgttagacattatgggtgtcatttcgcatttttctacattaaattatataagactcaatacttattgaaccaatagcgatattgtcataagagaatattaggcactactggtattttttagcatttctcttttaataatattattttaagttataaataatgatttatcaaacaaattggaaaaaagtgaaaaatgactttttatttatatatttatacacacaaatactgatctagctttatttattatcaaatattacaggttatggaaaatgcaactatgcaggaccagggtatgttaataatttttttttttttttttgtctatgttaattgttttattttgaattatttttcttgttttttttttgggtatatattataaaaagagaataataatgatgtgtttttcagatctgtaagctcaacctcagcaccctcacttttcattttgaagaactctcagagctttgtttggtggaaaattgcagggacacttctcttgcttttgtattttggaagataacatcctttggttatatatgccacttaggaaaaaagaacccaaaaaaaaaacaaatatgtatggatccaagcatatgatctgggtcattattagagattattatgatttttgtatttgggatttgctaacttattccttttataatacctttgctttaggtttaggaatctaatttaaatatagctattatatatgtctttgcaaatctcatctcaccttttcttttgttattttattttagtattattatctagtgctttattttgtgaaggggttgtaataatgcaactctttctcctccttttatacattaatatatataggtaatagaattagtcctccttttaatacaaacagatgtagtaaacgtaatgttttgtcataatacatctagattatattattattatattattattaaattttattttgacaaaaaattagtttaatgtactatttagtactattttgaaaaatacatgattcaatttgtcatttattaaaacaaaaagtccaattagtaacttttacaaaacacagtatctaaaatagtatataccttactcaaaaaaaaaaaaatagtatatacctggataataattattatgaaatatcactaactagaagacactagggtgttcatctgatttaatccataatattttgctcataatgtatccaatttaaactaagttcaggtttcatattttgaattagttactttttaatattgaactatttaatatttattaatattatttttttacataactgccaataaaataaaataaattattattatttcatgttagtaaattcaaagtcaaagtaagaaaaaaaaattgtatatataaagaaatatttaattttattttagactatatttttcttataaataaaaataaaatatacatttgatctattatattttaaaatatatttattttatatatattagatttttaaattattatttttatattaaaatattatttaaaaatatatataaatatatcagttgcctatttttatatatcaataaatattcaatttgtacaagtataaattttaaacttgtgccaatattcccattttgtggatttgatattttataaacactactagatcttgtagcaattagggttgtacaaaaaaaa

SEQ ID NO: 296440 - DNA, 2677 bp, Cannabis indica
tctgccaagtcctcagaggtagctgctactttcaagaaacgacgaagagcagatattattaaatggctgaatccttcactgtataacccaaaagtaggcaagacataaagacactgaactacaaacacagctggtccacaggggggactattttgcaatactaaatggacttgttgctgaagagctcggaacttcttagttgctttacatgtccctatgtaatgtttattaaaaaaaaaagtaacaaattaacaataagaatgcactgaagcaaataataaatccaaaaagctacatgtttatcaacagaagattagccactgactgaataacttctcatacaatcagctagcttgataatcaaatagtcaggtggcagatctacaggtataaaggtatatagcaagtttctttatgttaacatgtgtttgtgccaattgatattaaagaaggagaaactgaaaggtatcaaataattatagtacatccccattacaaccggattacttttagtcatgatagaaatttgcagtgaagaaagcataacacataccatgaatataacattctttcaaaaggtataaaaataccactggagaaatatatgtcagatcaaaaaaggcatgcttgcaaacagtcaatgtctgcagagttttctctttatcattgtgcatatgtagttctgccaacatttcctgcaattccatttccatcccagatgacacaataatggtcctagaaactgaatgaatgttagtttgaggctttaaacatttcaagtaatctaccaaatacacaaactgtatcacccaagtacattgcaacaatcagtaaggaaatccctctcaaatagaaaataattcataaaaaaaagcccaaccaactttagaagccattaactttctaacactgtagtataggcagaacacacgtggagtacgaattggaaaacccagctcaatcaattttatgtaaattacagtactaactttcgccttcagttgaaaaggactttacaaattaagcaaatgcaacaaatttacccattacatcgtctatcaactagtaccaaacattaccatcaaaccagttattgcaatgaaaacaagaatgaaacaccaccactcgaatacaaataaataaatgatcgggctccaccatgccttcagtttatgttatttcaatatttaacgaaaaaaaagaagaaaagcatgattcagcatcaaatttcataactttttgttttccaaaatataaaatacttcaaatctatactatttcctcttgaacattaccaaaattattgaaatgaagaaacaaatcactggaaattttaagctttgctctacaaggaagacaaacataattatgttaaatacatatatcatatataataaccacaaacaagaagtgtaaaaatgagttccaatacagctccatgaatgaacaataccatgaagcttttttaaataaattatctaataacgataaaaacaacgaaatggatccaaattcctgtgaaaacctacatgttaagctctgttcgattcccgagaccaaaatgcaagaacaagaaaatcataaaataaacagcaaagtgtataaataacaaaatcaagatagtaattagtaatgaagaaaaagtaaataactggttggtttcattcaaagactttctcgggaaccaaacagtaaaaaacaagaaactcaccaccaaatttgtagacgttctcttctcactcctccagcgccttctttctcctcttcgctttcttgctcttctcgtctctatatctatatatatatacatctacatctgtcagtatatgcaataatatgaccaaaaatcacatttttttactcaataaaataaattattattttattatttttaatagaaaaaaatatatagagagataggtgttagaagaggtaaaaatacagtgtgtgctggcccaccgaatcttttcctaaaatgtgcaaaaaaggaatgagttggggctttggttggtgtctctttcttcttggcttaatttgtttaccattctctaacctataacacccacctttgctatctccactttctcatttgttgtattatatgccattgtttgtgtgcaggtgaatgcaccatctaaggggcattttggacatttgaatgcttgtttattgtgagctgattttagtagtgatttgtcacttcggtgtcttatactattgtacatacggtggtaaagaaatggagcttatctttccaactcgtggcatccgacaaagagattcattgtctctatatttatttacaatatgtattgagggtctttcatcatcgattcgagtctttgaatctcgaaagtggattagaatttaaaagaatcaaagtttgtaggcaagctcctgttgtttctcgtatgtttttttgttgatgatagttatattttttgtaaagcttcctttgaagatgctacgagaattttagagttgtttcataaatttgaggaagtattatatcagcaagttcatttggcaatataaaacttaagtgttagaatggattaacattactaccattgtaatttaaaatgtaggatctatttaaaaacacaaatctcttggtttattgtgtggacattgtcctacatggaataaatggtagagaattgagccatatataaga

SEQ ID NO: 296441 - DNA, 961 bp, Cannabis indica
  modified_base (57)..(57): a, c, t, g, unknown or other
tatatatatatatatatatatatatatatatatataaaaggtacatagaaaaaaacngttaaagggattggccatctaaagtgaaccaaggtgattgtgagtggtataacacgttgtgatggatagtcaaaagttgtaattagatattttcatgcgttaattggtgttgtagtttgtaatgttttggaagtgaataatataagtatatgattcatttgaaaaaaatactttcatgttaaattgagtattaaagacatacaataattaagactttggggagccattattttttgaggtttgagacttatttatatttagaactttttgaaatcacttttgccataattttttctagagggtattattcataaacctatattataaattgtaattttttttttcagctttgatgaatttcacgatttattcccgtttatagaaagagttgaattcctatgatgaacggtcatttttattcataaattaatcaacaagtggcatgcttaataagattttattatgttaaaagtagagtttgacttctttttcttacatgttaagagggttatgtatagattaattttgacggctttctatgcttaatagaattaaaacaaaagacaggttacaatatagagaacttgagaattttaaatgttttttttgcaacactgaagatgagaccgtgccttattattattttttttttagtgttcttttttcgtggaatgcttggaaaaggtgaaatcatggctgaattggagattcgctactactaccttacaaaaaattgtaaggtggatataaggagcgcaaaattaaacaaggcgaagaagtcaattttagttgctgtcgttgcagccctcgtctacgaaatatgtgttgggtccgcccctttattggtgggctggaccaataagggcttaggcccattttatttgaatcaattaagaaaaaaaaa

SEQ ID NO: 296442 - DNA, 3584 bp, Cannabis indica
cttttccaatttgttttaagcatcaaatttggttctctctacatatacgggtttctctagatggttcgcattgttatattggtgttcttagttttcaacattaaaaaaaatgctgtatttttttggaagttacctcattgaattgaagtatgttatgaacaaattataatatctccgggcgttgatttattaattctttgcatcatacttactgtatttcttttttcttgggcattcactactttattttattatttttaatataacattacaatgagagcaggtctgagaagatttcagttcttgctatgttgattaagaagacaaatgcacaagaaatgaagtggatcatcatgatcattttaaaaggtgccacctttaacatttgtaaattttattttcatgttacttttcttaactaacttgcatattactaatgtagatttgaagttaggaatcagtgaaaaaagtatatttcatgaattccatccagatgcagaggacttgtttaatgtcacctgtgacttgaaattggtttgtgaaaagcttagtgaccgaagtcaacggcataagcggcaggtgcagtacaatataaatatattataacttttaaatgtatccattaatttttaaaaatatttaggacctctgctagtatgagggagatgattataaactaattggctgagggctcgtttggaacgccgtactaggtcgtattgtattgtattgtattatattgaattgtattttatgcaatatttttatgtaaaactatatgtggtattaacttttatggacacctaaatatataatattttagtataaattatagtttaacatagtattatataaaaatatgatatataatccaagacaatataatacaatacaatacgacctaatacggcattccaaacgagccctgacaggtttattatgtaaaccaactcttttatcagtagcatttattttgatattattctttgaaggtatttgtgctgctttccgagaaataattataaagctattgttttaaccaaaggtttgcttttacatgtgtattgctcatgaagagaatccatataagcctccctttgccacttgagctagcctcaagtagtgcatatgctagagttttcttcttctaaattgttttatctttaacaaacattctggatatgtcatcttttgtgctgcttttattttcttctacttcatcatttccatataagcccccctttgccacttgagctagcctcaagtagtgcacatgctagagttttcttcttctaaattgttttatccttaacaaacactctggatatgtcattttttgttgccgcttttattttgttctacttcaccatttccataacatactttgtatctctgtctttgagctgcatcttattttttgttttgttttgtttttgtttttagacaaacatgttagtttattgctacttccctattataattttcttgataatcctaaatagtatttatttatttatttttgataagtaacagttgacctgattccagtccttatatcatgtaatgaaggaaattggtggtgcctcttgtttctactttgtgcaatgtatattctctgatggactaacatcacatctttgttgtataatgtcccttaaatttgtatctttttatttaaaaagaaatttattcttcctctccttatatcatagtataaagagaattggtggtgctacttgttccacatttggcccttagtaactaaacatatgtctgcttttttttttcttcgtctcttcattgaacttttccaaattatttatttttcaaaaagatatatctaataaaagtttatacttgtttttataggatattgaagttggaaaggcagtgcgtcctcaactagctatgagagttgccgatgcaactgttgcatggaaaaaggtttagttcccttgatgtcctgtttttctttacaccgtttacatttcccaaaaatgggttagcggtgggccgggggctacattttttttttttaaagtttgattaatcacttattttgttctctgttctctttgctgctaatttttgctgacagtgagaactcttcaataaaattatggtctcgtcaataaaatatggttggaaaatcttaaatttaataatcaaaagtgataagctcgtaaaactttaaaagaaaaaatttgagaagataagttgctgaatagtagtgaaaaaaactcatatattgctctttaattgtgttctcatacaaaatttccaaccccttttcagttggggtgaggtgctttttgtagttagctctcatgtctcagcttacattgcggtcgaccgtcacaactcagcccaatgttagggacatttggaggtgtcaggacacaaaattggtggtgttgaggtagtgatagtcaggtgtcaggtgttctagtgggatggtgttaactgccactacttgtaccgtttgtgtcttaactactagttgggtgcatgtcaaggtggtacaaaccgttcatgaaccccttatcctttgtcttgcataggcatgttggggaaaccctcccttgcccttgtttcaccccaacttctcctgtatttatttggttttatgaagtcaaatatttggacaatccaagttcgtatagggtgcttagactccacctggctaagttgaactttgattattagaccatgctttgctgtagaccttactggtggcacctacttggagacccaagcaagaggatggattgacactacataataggcgagccatggggcggtggagtgaccttggaccacaatgtaagatgagcatgaaagctcactctatatagcacttcttcccagttgaaaaggagttgaaattttttacatgagaacacccttaaagaacaatatacaagttcttttcactactacttagtaactttaccaacttaaatttccttgagtcttttaaagttttactaatttatcacttaagttctcatagaacaattttttcctgccattcttgctaatgtacttatgttatgtcattgttatctgaatcacatgctgcaattttgctgtctttagcttcatggtaaggaggtggttgttgaatgcaaatttgatggtgatcgcatacaaattcataagaatggaactgaaatacactacttctcgaggtagttacacatgctctttatatctcttttagcaaaattagcaatcatcctcaacttttgaaaattactaaattctgaatcaaaatttagttaaaattaaatagtaaaaggctaaagtacaattgtacaaatgtaagtttcaaacttcaaaaatgtaaatagaaactaaaaaaatagttcaaactcttgtcaaatgaaaataatgataaaccaatccactttatataaatatatatatatatttatttatggatagattaatatgtattttttaatattcatttcaaatttagaattaattttagcttcgattattgtgtgctttgttttggctgctgtaggttttagtgtaatttatgctaaaacttttgtaaccacggttttcctccgtca

SEQ ID NO: 296443 - DNA, 4769 bp, Cannabis indica
aagtgttaccaaacgccactaaaacttttacaaaaatattactttatatcctattactttacttacggtatttatgcaaacccggaagttaggccttacagaaagcccaaaagcccaaaactggttcaagtaaaggccaggcccatattgaactgaattagggatagtgagtgagtttatatgatggctctgctagggttagggtttaaggctgccttcatcgtagcagagagagagagaaagagagagaaagagtagagagtagagatgaagacaatcctttcctcggagaccatggacatccctgaggggatccagatcaaggtccacgctaagatcatcgaagttgagggacctcgaggcaaacttgtccgtaacttcaagcatctcaacctcgatttcgagctcatcaccgatgaagaaggaaaacgtaagcttaagattgagtcgtggttcggtacccgcaagaccagcgccgccatccgtactgctctaagccacgttgagaatctcatcactggtgtcaccaaaggttaccgctacaagatgcgtttcgtatatgctcattttcctatcaacgcttccatcaccaactccaacaagtctattgagatccgtaactttttggcgagaaaaaggtcatcttttttttctttttttctgttgttagattgattagacaatgctaggttatttctgtaactttcatatatgtgtgtgtgtgtttttgtgatgtagatttttgattgtttgtgcttggcagatcatgaaaaaggtcattttttggttaagaactgattaatgggttggttttcattttcccatagattagatgaaataatgaacaaaatttagaaatgctcggttgtttctgtaactttcttatatctgtgtgaagtgtaaatttttgattgttgtgtttggaagagcacgtaaaattgtttgagcactttcatatgactactttcatatatctgtatttgtgtagtgtagtgtggattttttgattgtttgtgcttggcagagcatgaaaaatgtgtttttccttttctttttgctaagaattgatttatgggctgattttcttttttccatttctgttttagagtatatgaaataatgaaccaatgttagaaatgctaggttgtgtctgtaactttcatacatatgtgtggtgtaaagttttgattgtttgtgtttggcagagcatgcaaaatttgtgtttagttacaatgtcttatgcatatggtccatttccattgttgtaagttgtatgttacaatgttaataataataatgataatatgcagcatatcatatgactacttgtgttggtttcctaaaatttatccatttttgtttgataatcaggtgagaaaggtggatatgcttgatggagtgacaatcctccgatctgagaaggttaaggatgagcttgttttggatggtaatgatattgaacttgtctcaagatcttgcgctctcattaaccaggtatgctatctctctattatgtgtattttgttaaaataacatagaaaggaactgagattttgatttatttttttcccttgacagaaatgccatgtgaagaacaaggatatcaggaaatttctggatggtatctatgtcagcgagaagggaactatcgcaaatgaggaatgatcttttgttataggaatactcattttagtctttcgaactagtttaatttcatttcttgatgtgattgggtaagttaagttttatttaattgcagattttgtctgaaagacttgtataagcttggttttaaattgagatttggatctctacgattttggcttgtctcatttcatttttaactatgttatggttttgtttagtcatttacttctttgggaaaaatataaaatatcatgtgtgaagattatcttgaaattaattttttgtgtatgattatggttttctttcactctaatgcaaaattaagacaacatgagcaaattacaaaaatgattaatgaagaaaagtttgcaatggatcatggctaattttgtcaaacatccccaaattctttagaagatttattatgagattaaggaggttgtaaggctaagggtaaagaaggagaatattgaaattgaaaaggaggatttgcagaagatgagttatttgaaagctgtgattgtgggagggctcactttgtgagtgaggctgttgttgtgggtagacatttggtgcccaagaatgggaatattaacttcatggctaagatgggttgggatccaaaggtcctatcttatggagtttaagccacagaggtttattaatggtgatggtggtaaggttgagtttgatataacacttaggcactagaccaaacctaactaccaaatctatttatttaggactagaaattgtatctcaagataattaagttgaacaataaacaaacacagtatttatgctttcatattcataataaaattgctagtgtgatgttaagacacacacaccacacacatatatagaattaaaaactttataaacaattgaattgaagaagcctccaacacctcattatgaatgttatagtcctctgcattggaaatgggaattaacactacaattttatttgtttggtattcattgcataaataatctaaatatgacaacatgttttgatacatacagatagagaaagcttggaactttccttgttctcttcctaagggaaaatggtccgtaaagtcatactatatagatgagtaagtgaagaaaatatattattttgtataagataattaattaagctggtttcaactacaatcttcaaatccatactatacaacaccatagaataaatggtatataaaaggttgaagatatttttgaatgaaattaattaaatgtgctatcattaagtatgagtatgagccaaagattggttatggatggacaccatgaaaatgaagagaggaataagcaggtgtgttagagtgactttcccaaagaatcagatatggtcataatcaatgtcaatactatacagcaattagcttccaaaagagttctagtaaagaagctttagttgtcttgtgatattcttacatgggattttgtatgaagcagaagaacaacaaccaaaacaataatattcagcccttcatacctggttcagttattattttgttttgttattattttcagttatgcttggtatgactgcttatgttggttttttcgagattttgtgtccgaaaaaaaagggaaaatgtgttcatttctgcagcagcagaaggagttttggtgaggttgttgggagtgctggaaccgaagaaaaggttgagttgttgaagaacacattgggctttctttgatgaggttttcgattataaacaacacacttaatgataattctaatttctaattttgtatgtatgttgttttgattggattggaaaaacaatgtcaacaacaacaatggcaacatgcatcttccacaagcaatagatatatagtttgacaatgttggagaaaagaacatcagaaccaatgatgcttgaattgttgtgttggggaatgatctcacagtacaaccttcatcaacaacaacatcacggtgatgatcacttgcagttgtaccccaagtttagtttgttgaatatgtcaattcatatattcctttcgtgttcttggttcatagattttgatttgatgtgttaccaacatagcattttctgttatgaaacattgacaaaacatacttccacacatcctcactaccaaactcacttctttctaattaagttatgtttcagctcaaaataatgcaaaaaataacaaacattgacctcaaaaataatactaacaaatcaaacaaatttaatactaataaataaaataatgttcatatttattactactaattaagtaattatgattgacacgatttggagggctcgaaataacaaggttcatactaatactatgggtagtttgaaacattatattgactctatatattattgttgattatggatccagtttgctcaagtctcgacaggttgatggtactttgggttggtcccccgcctgaggattgggtcaagatcaactgcgatgtcagggttggggtggaaaccatgtgtgcagtggcgattgccagagatcattcggaatcgattttgtgggtggcgactaacgagcttcacttctctgaccctcttctcggggaagcagtggcttgtatgctagctttggagaaggcgaccacaatgcatcaccattttgttatggtggagagtgattctaagatggtaatcaagaacctaaagggagtcgaatccttttggcgacttgagaactacacaagacaatgcaagcatctctctacttttttcattagctgtaattttgcttatatttctagaaactgtaattttgcggcccataatgtggccaattgggcatttgccaacaatatgtctggtatggtagaagtttctactattccgagtattatattttataatgactgtgagggttgactgtttgggtccctctaatataaaaacactttattttcaaaaaagaaaaagtaattatggatgaaattgttatagtaaactatttatttgggtctgtttcatttttttttataattttgatattttatttataattttacagtataaatttttgttttaaaaaatatatttataaagttttaggtgattctacgcacccccttaaaagggatgtaccttaacttgtttcggcatcca

SEQ ID NO: 296444 - DNA, 5400 bp, Cannabis indica
ttcagaacagtggtcatacttaggattaatttagtggagacagtaatgggtggattagtaggccaattcacaaaaccagtttccaatgattaaaatacatggtggattgggtgggtatgttgctattatgtttggcaagggaccaagatcaggtatgaaaatactagacaaatcagaaattttttatctagtggcagtgatggttagtgagaaagtttttgttgattttggtgtcttaattcccacaagttttggagcaaaattagttaattttgctggtgcaaaaacacccttagcatagtgtgcatttattgaattggaagtggaatttccatgagaagcttgagaagatttattggtagaatgatgagagattatgcgaaatcaccaatacccatacactatgagtgttgtgaagattgtccttgtattagaggttgttgcaatggattcctctatttgaaactagcggaactgttgttgttaacaaactttgggccaaatgtgcgagaagtggccaagcatttcctttggaaaaattaatttgaatctatcatagccagtcgtgggaagggcggagcctttcaattctgggccaaaaggcaatttcggttcaataccgttatctattttttccatccacactgtacatttctaaaatagatgaccaagacaaccacattccatacaccattcaggtagcctttcataacgtaactcaacccataattcatctctaactttttgaagttggatcatatgaccccttaacaaaggttttgtcacatccaatttaactctaattctcgaaaaaggaccccaaccttcttgaagtgaattttcatgcacttcaagaaattcacctaagatatctccaagtgctttagccaatgccttagacttactaagaaaaagaagcctataatattggacccaaaaaggggagtaaatgagattttccatcgagacattctccagagcatttgcgtgtataacacaatatggtggtactgaaagtccttaaggagtaccctacacttatccccttcacaaccaaatatgagtacaaacatatcatgtagtttttttagtaatcttggtgtggtacctacaattccaacgatcctttatttgcttctatagtgtagaaagatagacagatttagcggtaagtattggagcaacaaggacattgtttctattagaagccacattctaatcgtcgtcttcatcatcaatggttgctgttagtttttcttctttagattggctcatgatgcctttcattttatctgtgagtggattcatagcagcagggatggaagattatggttgaataacggcatacactctcataatccttctccctctaaactttggattggtaaagagagacgacaaatcactcgtttttggaatacaatgaaatatggtagagagaaaaagtcattattgaaaagaatatatattactttaaataactttctgtgatatatgattttattgtattatatgatttatctttgtgctaatgagataagaaatgttgatctcagatttggccaatcgacagcgaagtcgtatttattactaatatcactacgtgtacataatgagaacaggaaagtaaaagagacacaatatttttatagaggttcgatccctttagttagtgagtaatgaccttgtaactccctaacctatagggatgtcacgtgtgtgatttaataagctaatttagtaataataaattaattaactattaaaatctgtgataatattaaaaactttactaaaacaaaacaatagtaattaataacgtaatgacactaaaaatttattttggagatccctgttacaaaagttttacaaaaggactatatacagtagttagtcaaaatacacaacagatacaacccaggttaactcttgacaacttagccacacagccagaagggtcaatatatacattcgccagagaagaccgtcgcctcatggcttctctaacatttccttgcccttaatgcactacagagcacatgtgagtcacaaggactcaacaagaaaagtaataagggaaagacacatgataattaattatctattttatcatcataaaataattaaaaaataatattccaatctatataatattaccaactatatttattagactgagaagtaatcacctttattccatcacattgcctaatcaggcaagtcgatgctttaacttgatatccatttatcgcattgcctaatcaggcaaatgccacaacctggcatccataaatcatattgcttaatcaggccagcccatgccataactttgcattcacatatcacattgcctaatcatacaagcccatgccataatctgcattcacatattgtattacctaatcaggcaagcccatgccataacctggcattcaaatatcgcattgccattatctaaccacataatcgacaatcaagaaacctaacaacaatttcacatgatgtcctgattttaattcaccttaacggtaatcaccatttctttatctcgatcataattgagtcattactataattatcgtaacctgtcaggccatgtggtataaatatacttttttttacctcaagtttcggtttaggtatgttgactgatctatatggagaatgatcaacgatcccgggccctatgtcataacaacaaaagaataattaaccaagcaatctaacctattccatctcaaaaaaattcattcccaaggatcttctataggtcactagggtaccgactacttcaaacctcaagaaaataatgaaaaacggggttaaaaaacgaagtactagaaatagtgtgttgttttgggaaatgattaaccgttttccctggatttcctggcaagaaacgactagttgttttatccaaaatggttgactgttttctgcaagaaacgagaatcccaaatttcgcacctctcaaaagtctactgaaacctatccaaatcatttcaaacttcacatgacacatatatatcatccatacaacaattccaacataacagaaataaaaaaacaagtctttaaatgaaaaacaccattaaagctcaatctttgagctccagactccagcataggcatcacgccccaaggggaagacctctagaggtgggaagcaaatctacaatagaggaacaaatgctccatagtttcctcatcctctctgcatgagggggcaagaaacctcatcaatgtgaattctactagcaagatccgacctgattggtaaggcacttgaaaggatactccaccataaaaccttatggcgctccaatatcgtagagttccaaagcttgttccaaagtgtgggcaccaccaaaataggcggtgctctttctaaggccagagtaagacaggcaaattttgaagaaaactgaccagttgaatccaaagtccaaatccatttatcactgccttgtcccccccgacctaaatcctttaaggatattattggtggtcacttggtcaaacatggagttaagcctggatacatcccagttcccatcctcagtaagtaaatccgcaactttattccaaccctcacgacgactattttttagattgggatagaaattttgaccgtgaatcacccacggatcctcccaaatatcggtatctttcccatccataatgagtttgcatgcatttctcttaattaagtccttggattttactacattcttccaaaactaggagtcagagttcttataggagcatttcaataagggtttacccttgaggtacttcgcatgtaacactttgcagcacaacaagtcaactttggtgagtagagcccaccctcatttagcaagaaacgcctgattcatttctgtggtctttcgaaaaccgagcccacctttggatttcaggaggcacagtttatctcatgcctttagatacaggctacgattgcctttatcacagccctacaaaaaaactctaactatgccatctatcttagaaactagcttcttgaatacaacttcgtcgtttgcatagtatattaataaatgaataaattctactttcataaatctatgcaaaaaatgtaatgaggatatttatttttgacacatatttatgaaaccatttggttatgattattgatatttgattttttaaagtattcaatatcatattaatataatagtttataattagttaataattttatatatagtaaattaaaatatataagactcgatattaaaatttactaatatggatatattattatactatttgttgtggtactgaataccttcagatacaccgttgtgcttagcatttctcattgattataatgatctctagccgaactttactttttgttaagactactttatgtgtcgtctctttccaagtttccattatctaatatctatccattcaaaaaaggcaaacaacttttagagttgttttattataattgctattatttagtagtagtttgaggtgtaatatgttgggagctgattattggtcatgcaagaaggactttggttgtatgagtatcatgtaacgtttgataagggtttataacgtttgataagggtttataaacgcccccaaccctcacctcccactcccattcccactcccaccatgcaccataagataaacggtcttgaaatgctaaaggacaacttaaaataccaaatactacaagaggtcacacacctataatttaatatcaatcttatacaccttaattaaataaataatatagaaattttttaaccaatcataacatgttgtttaggtacttaaaagtactcgcattttattagctaaaatagctcaaaaaataaaaatataacgaaatattgttcaaaagaggctttatcaagtcagctaaaatagtttaaatttttagcttataaatagtacttttctacatgtagagaaacactatttattagtgtggactttgcttttaaccaacaacaatgagtctttttgcgagcgataaaagatatgttgtaatgaatatataataaagcaataataagacacgagaattttatagaggttcagccccgagcagtttggtaatagcctaatcctcgttatttgtattgacttaagaacaaagaagaagattcattttcttatagctcttacaacagtatctctgaatatataattcttagataataatatagtcttagcttagttgcgtatcgacttttaatttcttggtccccttgcccaatgaacattcctcactatttatagggctgggaaacttgaggaggaagagtctcctctctcgttacaatgcacataaacagaaagatcgtgtgatcaatgctgaatgcaaggatcatgggattgaggctgagtaca

SEQ ID NO: 296445 - DNA, 1116 bp, Cannabis indica
actctgcaatgatattattttttcaccttatttttgacagatttccttcaagatctgtacaaagaactggcactacattctggaaaaagaaaaagaaaacaaatagaaatgttacagaccccttaatatgaaatgactaaaagttcagtgttgttacctgatatacaaaggaaagcacaattattggtatactcataggaactgcttgaaagttggcttttagaagagcatcccattgtaaatctccacttgcaactgcctaagaaagaaaattaatacttgctaatcataaaagcaaaccatgtagaaaatgtcaatttgtagtactcaaaacttattttaattatgaaataattcaaaaggtctggatgagataattcagacaagagatgacataatagaacttcaatccaacaatataactcaatttgttgtatttatttattttttttaaactaggatccccgtctaactctacaatatttagagaccaccacgaaactatagcaattgttgtgtaagttcaggaagatagaaaattaccacaagagctccaaatgaaaccatgattccaagtacaagaaccccattaatggcaccgataaagcgctggctagatttgaaaacaaaaccagtcaattccagcaattcgcaaccacaatttagatgcaattttgtataaatcacaaaatgatattggcaatatacttgtgtggcctcaccaaggaagaatatacatatcctcttaagccaatacatcttaatctatttgtgtagagatttttatatcttaaactaagtaataatatttttttagaaaaagaaatagcaacataatttgctaaaagtgattgttaagagtttggaagtgtggtgaagaaagtagaataaagtgagtgtatggtaagatgggttctatctcaaaactatttagtaatgacagaagtagtccatgcatcttatatatgatttttagtttctacatgttagagtattagctgtatattaggtgtaaaagaattagggtaacttgtatttagtagtttcctattttgttggtagtttcctatttcctagtcttctagctttgtatataaatatgtactattctatgaa

SEQ ID NO: 296446 - DNA, 4908 bp, Cannabis indica
gatgttaatgaaacatacttgttagtatatctagattctggtaaaataattccaacacatgcatcaaccattctagacatacacatacatgtttaatttttttgtacagccgtaaaattgtacttacttttgcctggtctacgaggttttttgtgatacttgtttctaggaacatcttttagcatagcaatatatttaggctttgacatttgcaatgtatagttgcttgttaagggttttttttgaagtgtgtggttccaacggccatcactccaactttttgacatttatggactttctatccctctactagcttaggaggtactcaagaagtacctacttccttttgttaggagagataatcttgatcctttttaaaaatttctcgagacaactaatgctattgaaaacatgaatggtttcccatggagctccaagataaccttattttcacaagactttgatattttttcaggcgctagggccttttttttatctaagaaggtcggtttcacacgctatggattttggatggtattttggtaacgataataccaaaatctattggagctcaagtgaagccttaatagttttaatctttttatatgaacattcttataaaagtttctgagaaggaattcaagcaagtatctcccaattgagtgtatatattaagcttcaagaaggaattcaagcagttgttcctttgcttaaggaactttgttgaaaacggatcctattttaagcaaagaatcatcaaaaaataaattgaacataatgcgacacaccgtacgttttttggggcacaatcaacttggcacaatcaactaggtatgataccctcaaagtgagctaagaagtgtggatgtctccaccttactggtcacttgtttaaaacacaacttgtggcctaaaaacataatgtaaaatgttagcataaaatacttttgttctcattggatgatgcatggaggcaatttgtccagaagttaattacataaactgtttacaaaaacactccaaattaaatcactgcccggtgtgtatcgcctatttgtaatatcggcataaatgatccgcattctaggggttggggaccctcgatccatccatcaattttagacaaaagtaccttgtcccaccttctcaagtatcccttaggggccttcctagtttgggctaagcacccccactcctcgttcctaggaagctaggaagactcttcgcagtacaagattgccaatatcgaaggtacgacttttcacctttgagttgaaatgccagcgatctttccttggtacattttgagctagacctgggagttatcccagacctcgtctattaagtctagtgactcctgaagcagagagtgtcaacgggaagggtcgtaggtgtcttactgattggatgggattgtagtctctacttggattactgcttcgcatccataggccattgcatatggcgtatgccccgtcatagttcttttggtcattctataggcccatagaacttgagggagttcctcgaccaatgggctttacaagcttgcagcttcttcttcaacgtggtcttcagaattttgttgacagcttccacttgtccattagcttgtggtcgagctatagtagagaagcctttcataatttcgtgctggacacagaagttggtgaaatgctcactattaaactgcttcccattctctgacagaatcttataggggagtgcgtatcagtaaatgatatttttgataacaaaatccagcgccttcttgaaggtaaccgtattcataggttcagccgcaacccacatggtgaagtagtcaacaacgacaatggcgtatttgagtccacctttactggtggggagggattctactaatcaatgcccccaattgtaaaaggccaagggattctcattagggtgatttctgttggtggtgcgcgcaagacattagtgaatcgatcacacttcctcacgtattccatgcaatccttcttcatggtgggccagaagtacccttgccttaggattttcttggaaatgctaggtccagaagtgtgatctccgtagaaaacttcatggacctcatgccttactacgctaatttttgtcttagtgatgcacctctaatatggcatagaaaaccccctgcgatatagcttctcgtccattatcacatagcgaggagcttggtattggactctaacaccctaacaagcttaatcaacgaggttattgaaactcgtgaataattaaaatttgcttagctaattagaaacataaaggaatacatccattaaattccgagatcccgttacaaattaaatttacaaaattttactagtttaatacaaaagttttgtcgcctagcgattgtcagcaaaagccttgatgtcccctaagattgtacactcaggccgaaccgccctaacatgtacaatcttcatatgctcgttctcacggctccacagctttagccttgcctttacctacacatgaaaatagcccggtgcgactcagtaagaaaagcataacataaaacatactaatatccctggttataacctagcgcccatacacccgatcataaccttaatccccgtgtcccacacggtactgagtctagaacgttcatacgaaaatactatcgaccatagtgtcagcctatactcaatatgctagtcatactctagccatattgatgtgacaacatcgatcagtatttcagccaacatacatttatcagtaatcagtacaactctatgtacactattactgctatccatgtaatctaacaggcacaaacaacatgtacgctaaacatgtaataacatatgcatgacattatactaatcttacctcaattccgaattcaggtgtaccggccaacctgagtggaacaactgctcggcgaattataggctcctaaatcacatcgacaataatcacaaataagtgactctcaaaccactaccgggacttaggtttaaacaaaaaccctatctactacaaaataatatggcaataccctaaactagcagggagttaaccaacctgaaacctgaaactaacgtgaaacgataacctgaaattttcaagaatccctactgcaaaaaccggttaccaagttttacaggcccctgtaaaaccggttagccggttttccccagaaaaaccaaaaaatttcaaaccctaaccaaatcgtttccaaaccttaccaaaccttccagatctgcatattataccccaataaaccatgtccaagcaacaaaacaactatctaagctcagaattgaaaaacaccattaaaggtccaagattgagttctaaaactcaaaagttgattaaccctactaacaaccccttaattcatgctcaaatcaacataaaacaacataactaaacttcagaaaacaaaaccaaacactaacagcaaccacatagctcaatttctcaaaatcatgcaaaatccaaactttgaaacttaagaaaactaaagaaagagttgcgtaaagacttaccttgatttaaatcctcttagaactgctagaaatcacaacaattgatggacaaacaaggaacccttcctggtctagggggttcgaaaagagagagagagagagacttgagagataagttgatttttgattaacatttgatttttttacgtaaaatgagatataaattgtttgttttattaaaaataatctgtcaactaaacataaaaatcaaattattaaataaaacaaagtccactaaaggacaaaacacaactgggcaaaaagaccaaattgcccttgcccacactaaacaatcacaaaatcacttaggggtattttcgaaaattctaaaatctcgaccccgctatactaaaaaaaatactaggatgtgattctaatagccaaacaccgcgttcaaatgttgccggacagaaaacatgcaaaaattatgaaatttctatatatgacataaaaatgcattctgaattcaaataaatcaacataaataaataattaaatattttcataattaggccctaattatatgctaatttccaaattaaagctaagcagtttttacatggacctttcgggatgcagcccaatctacggggagttatcccgtgctaaacaactgataaattcgtgccatccatgagtgtgaattatcaactagtgcactcaacccctggacgtcgatgctggatctttttaggtgactaacatggactattccgtgttctacaattttttgatttgtagccaacttagccaatatgtcagcgaatgaatttgttccctcgtgatttgccttatattataacccttaaatccctatagtaactcacgcaacattaggacataggaagccattcactcgccttttgtctgatactcacgggagacctgattcaccactagctgggaatcactttaaatatccaccttgttagcgcctacttctttcgctagcttcaaccctactatcatagcttcctcttctacatcattgttcgaggcacggaacccaaaacgtagggcactttggagctggtgtccctatggagagattaaaattaagaaagctccaacccctttctcattggacacaccatcaacatagatcttccaagtgggtagcttagaaatgggctcttttgggaggtcgttgaagctttgtgcagtttgctacaaagtcagtgagggcctattattttattgacacctgtggctggtaatggatgtcaaattggctaagttccatagcccacttcagtaatttgccagacaattctggcttttacagtatttgtcgtggtcctggaagtatggtcgtagcttatgcaatgctattagtatacaaaaggttagtgttgaccgaggttttcggcaactattaaaatat

SEQ ID NO: 296447 - DNA, 2975 bp, Cannabis indica
tgcatattgttctcatgccccattcttaatccaacaggaggcagattagcctgcggaccatgcattgctgatgggtctctctcattctgtagcctactgccatgtgggttataaaccgaatcagtaccacctggctgcaactgacccattgcagcaggttgttgcatattgtgcaaagtgccaccaaactgttgagcctgacctgaatgaggacccatctgtagcatctgagttgaattagctcctgaaggaaaattctgagcacctgagccacttggttgctgaaactgggaaggggaaaacccaatttgatttctgttttgaaaatcatcttcttccctttttgagtatcctgagttatactcttgttgatttgcaaatgtctgcacttgagggccatgctgagtttgttgctgctgcgtactctggtgcccttgaggagggatgccttgttgattataacccatatactgcaacggtggctgatgtggatattgctgtgtttgtggtggtccagccatttgggagccttgactctgtggtggttgttgccccattggctgggacatttgatggcctgaagtttggggaatctgctgatacatttgatgctgcatttgttgagacggatgctgcatcatttgcccatgttgttgcacttgaccatgctgttgttgtggcattaaatgtccatgttggttcccttgctgcggctgttgctgagttccttgcatcatttgctgcccatactgagataagccattattctgctgcgaaaccgaatgagccaccggaattggagccaacttaggcgtaggagctgccgtcggtggtggcccagctggcaatggtggagctgcgctagcaggtttctcatattgagttacattagtttcagggttccagtagtaaagtaaacctgtacttccatctatcaaacccttccaaggtttcggaagtgtaggatcatcgggtgcatatcgcggaccagtagaaaccgatgcaggctctgcagttgccatgctcaagattttaccgattgaaaacctagaacaactaaagaaataagaccaatctgtacttcaacaacaaaattaaccataataacacactgaaaacttaactaacaaacccaacaatcaaaaacagtaacccaattccaaatacctatagaaataactaacaactccacaactcaaaacacaagattatcataaattacataacaatttctcaatcaaaataaacacattaatttcaatatcaaaaacaatgcattttctaaattaaacaaccatatccaaaattacgttcaagtaaaataaaaacgaatccccaagaaatatgaaaataaagcaaaatctttaaggaaagaatgttgaaataacgtacctttgcgcagtgattatggataatatgcgatgtaagaatggattgaatataaaaccctaaaatctgagcttcttcccaatggagaattttggggaagaaattcttggagaaaaagctcgaaaggcctatttcaatgttagggttaagcatgagaaaggttagaaactattagctacagtggcggtacactctaactacgatgcaccttcactccttgatttgtttgggcttcgtaatcgtatcttgggctctcagattttgaatggcccaacccaatcaatccatcataaatttcatcttcaagagaagagtttattttagagataattacaataattactatcttttgtaattttttcatatttaaagattttttttaacatttttatactcttataaaaaaataacacaaaaataataaaaaaattatataaaattaacaagattttaatatctaaataataataaaaaatcaaattgtaatgtcgtaaggtgcgtgtactgaaaataataataaaattacacgaaaataactacgatgcacttttgaaatgtaggtgtattgatacacttttatctattttaacatttaagagttcgtttagaacatcgtattaactcgtattgtattgtattgtattatattaaattgaattatttatcatatttttatataatattatgttaaactttaatttatactaaaatgttatatatttaggtgcctataaaagttaataccacatataattttatataaaaatattgcataaaatacagtttaatataatactatacaatacaatacgatgtaatgcggcataccaaacgaaccctaagaaaattttttagtctaatttttttataattatgtatgttgtagttatttaaatttaaaaatatttaacatgtcgaaaacatagtttaagcaatctatttcacacgtgacacttttattttatacgcgtgtgaaatagactattatatattgtaaattattctgaacctctcaaaattttacatgacattttaaataactataacatatatgactatgaaaaaactatactagttttttttatggcaaaatagataaggagtgcattacagaagaacctttttttttttctattttacatttttcataatattatttttgttattttttggttgtttttatatttgtgctatgatgtagtgtaaatttagtccatactatattttgtgtcaaatttaatataatttttagtaaatatggagaaaatacaaatcttgttgtactccactccatgaatcttttgctttgaaagagttagattctttgttgagagtgatgttgaagtcccactgcatacctctaatgatcacatggttgagctttagttaagaaggactaggtgcatgcttagaatccactcaatccaaggtgttagaatatggaagtaagaataaggaagtgtgtggtatagaaaatatgtgagtgtatggcagggccgaccctaagtaatattcggtccaagaaatttattgagtgtctgttttatctaaaataaaagagaaatttacatagtatactaattttt

SEQ ID NO: 296448 - DNA, 1587 bp, Cannabis indica
aaaattcaataacaaataacacgtacaataattactataacaaaaccaaaaaaatacaaaaaaattactagttaagtcttaaaatgaaaaactaagttacataaaaagttaaatttaaacgaaaaatacttaattaatagtgagtctgtgaggattaggaggtaaaagtctaaacatataaagaaggcataaacctggtaaggatgatagtaagtgtgagtctgtcacgattttgttacttagaggctgaagagatgatgcctcaattgtttgtggtttttaaggtttcatttatctttccgtttatatttacaaggcatattcttagtaacgagtaaagtagctctgaaaataagaccaagtgaggccagaaaaataacagtccgatcacacaaaacaaagccaaaagctgaggcgtagagctcattggcctgacatgcacctcatttgtttgaggtgtacatggcatttgttagctagcatatagagaatggacaagataaagaagcaaatataacaacatagattgaagaacagaaacataattatagaataatgagatacaaagttataaattgaaaggaaagttgaggcaagtaaaacacactttttttttaaagtagataaatttgttccctttttacctgttagaggatatgtgagcaatcactttctgagatataataactaacgagtagatcaatacaccactgaaaaagacaataaataagaagactagagagtttttgagtgtaacattcttatttagtgtgttttgaatgaaagaagaagcctctttttattgatttatatgaggtggaatactaaatgtcaacataaggggcaaaatatttcacaaaattattgatattgattaatcacaatattcataataatttctcatatcaattaaaatattaattaatatatcgattcctattctcacatcagcttaaattagatattaataatacatttgaaatataatttttccagcctcaataacaacagcatatgcctcaactgctctcgtgtcaatgatcattaaaattagtttgatattgtagacatagttttttttaagggtgatattgtagatatagttgacatcttccaataaaacagtaattaaaaactgtatacaattatcttattatataaaagttcttttaaaacataactatattaatatatacaacaaataaaattcttctgtaagaaacaaaaggaaaaaaacttacaattaataatagaactctagttaattatgtgactacactgatcaatatctttgattaattacctcgcttttaatcaaacttgttttcatttaataatatcgttaatctagtcaagaactaaattctataacaaacattcaatggacattacatgaacttaaaattagtcgtgtgcatccgatctaatctaacttttttttcttatccgatccaatccaattagtaatccgattagcaattagtaatttgatcggttttttaattggatatccaattataaacttaaattttaatattaacttaaaaatatgaagaaaaaaaaattaagtttaatacttcatataca

SEQ ID NO: 296449 - DNA, 4058 bp, Cannabis indica
taagaaataaaaataactaaaaaaaccgtgcatataaataaaatgtcatatatagtgaaaagcagaaagataactgtctctaagctaaaatgatctgagagatttttcttttcttaatttcccaataagttccttttcccaactcttgagatattgaatgtgttttcttttgtttttaccatcatctgattccagcatcttgacataataaatcttcttcaagttagcaacttttggatagtgaagtattgtaaccactttgctggcaattaaaactcttcagctcttagcttgttttgttttgctagttatctaaaatctttacctactttgtctatctctgttgttaagaaaatatttgtgcaccaataaaagttctcttcaaacttttaactaagatttatcaatatattcctgacatatatacacacacacacacacatatatatatatatataaagtaaaaggtataataaaagtacatttcatagtttgagaaagtattcaaccaaaattgtgccaatatatttgtgttcttggtttatgaattacttgatgtatagagcatcaacaaataacaatacataatttaaaagctataaattctaatctcacacttaaaaagagtcttcgctcaaaatatcagtaagctgtttaagtgatatacagattacacaaaatatatatttagcatttcaataagtctagcttaaactatacatgcagaaaatatattgttctttaaagaaagtctgcctaatattatttatttgatttctttacttcagtgcaaccgatgtagaactttttcctgtccatgttcctatctaataaaggtgaatttacatatcaagtttttataagcagccagacattttgccaagcagtcataatcatctaagttcagtaaatattcctaatgactgttcactttaattatttgcatacacatgattttatgcatcaaagaaaatagtagaggtgcagcaatttgaaagttaataaagcaaagaatgaaataattgtaatagtatccttgttgcaaagactattccaaaccataggggaagaaaaacagtaacaaatatcaaattggaatagtttttggcatgtgaaatcagtttctcaaacataatctataagaagttccttatttgtagcaatgaaaaggaaataatgaatcaatgatagatgattatatttttgaaaatttacccaaagaaatgtctgcaaatactttataacttcttttgtagagcaaaaatgtctaccttggtcaaaacaaccagcaaagctattaaccaaatgtgtttgctgaaccaaatatcctcgcctctctcttgctcttatgcctataatttgatactcagcagacacattctttatgcattttgtgcatatctactactcaccaataaagaaaaggaggagaaaagaaaccgtccaaacactgaagaaagatcagatacttacaactaactaaagtaatttcatcatgatcataatttagatataaccaaaagcttaataatgctttactgaatgacattaggagatgaaagtcttttggttttatgcataatgaaaaagcttttatctgcacaaaacaatgtcctaactaatcctcttttaaaacttccaacattcagtagataggactataaattcacaacttgctgaaaccctatatatagaacataagcaacctatgattcgaatcctttctatttcacgaacaagagcttaatcagaagattcctgcatataactatccataaacaacctacatccatgcctagattttatattctaaaacacccaacaactctacatttgctgaatgataacacagaaaacactttctcaattattttgagaaataataaagaaatgtgtatcttataaaacttaaagctcaatagaagccaaagtgcgcagtataataatctagaaacatcatttgatcttcaaatctcgaaaaaaaaaaaaatcctcattaccatcttatgaaatcttaatactatcattctctgagtcattaagtcaaagaaaaacagaactttaaggtgaagtggataacattaaaagaaggattagggattcctcttgtatgtaaccaaatacatttgttgctaataccaagtattggtttgaatgagaaaataaagcataaagctaattgattttgacaaaactgaattcaacccatcaactagaatttcatccaatgcagaaaataaccaacaaacctatcagaatatgacagttcaacaagagcaatatcaattatcaagaatcacacacgagataaacagaagcaaacataagaagagaaacaataacaaccaaaaaatgagatgaaacatagaaaagtatataagaaaatataccattaattctcctcaataattcatcccaccaatcaagaggaccatccctctcagatgacccagaaccataagcattttcctcaggcttcttttctgtcttcttcctctttttagagcctctaacaggagccatcacatcagggtgaaacgacccaattaaatcaaaacccagaagaaccagcagcttcaaacgaccaaagtcaaacaaacttcactataattcacagaaaaaccaatacccatttaataaaaaagacagagagagtaaaaaaatagatatatgtatttcatcccctcaaacacataaagatcacgaaagaagcagtgactcaaaacatgcacaagagttcgcgaatgagaataggcaaaaatgttaaacttgcaactgtgtttatattatatattatatatctaaatatatatatatttatggaagaaaaaaaaaaagaatgctttgcgttgttgggtatctgaaacatgcaaatgaaacaaacaatatcaataataaaaataataataataggggaagaaagattatgtgtgtgtgtgtatagatagatacagaagctacaagggtaagtgatggaaaatccaagctacatatgtgttaaggacaatgtggcaagaaaagtgagaaacactagttatttggcgaagagttctctctcactagacaaaacattatagatttcagagagagaaactgaacactagaaagagagagggagagacaaagggtagtctactaaacatgtcaaatttcttcgagtttccttaattttttcttttcttttttttttttttttttgtgagcgagtttccttaaatttaagcaaaaatgaatgaaatcatttgcctcgtgccttttatatgttattatataaataaataaatataaaagaataattaaatcataataagcgaagagcgaattgaaaacctggaatagaaagaatttactcttgaaaaactatatacggtcaagaaaaagaatgttacatttggtttatatgaatttatatatcaaatattagaaatgtaatgtatctttcctaaaataaaaaagaaatgtaatttatccatatatgtacgtacgtttgagttctcaattgctgtagctttttgatttcaagagaaaaaaaggagagggtttaactcgttttcttgacaatgtgattaacttttgtgtgacacctgttattttttttatttataataatactaagaacagaaatgttacgagtgacaaattattattcgaatccacttttatatattttgatttagaaactactaattaattataaagagtcatattagtatagtatttagtagggttgaataatatccaatttaatttaattgaattgaactgaattcatctaatttaatagaacaaaaatttgatatataattataattagattggattgaatgaaaaaaattagattctaattagattggattaattattaaatgtcaatctcaaaattcaattaaaaaatgatccaatttaactatatttatacacattaaaaaaattatttataagtaataaatatatattaatttgttataaaataatataacataatatagaatagatgagaagaaagaagaagagagaaagagaaagtgaataagaatttctgagttgtttattccaat

SEQ ID NO: 296450 - DNA, 4359 bp, Cannabis indica
aaaaaaaaaaaaaaattacacatgaaaataaaacaacaaacaatagtagttattaagaaataaagaaaagaaacaattaacagtacctgaaatatttcaatctatcacttacttactgaatccgcacccaaattccctcactgggaactccacgataaactacaaacaaaatataataacccggtggagccaaaaccgccgtcgccggcgccgttacagaaaccttataccgccccttcaaaacacggctgatatctttcagttccaaaacaaccagcctctgattcatcgagtacccatgcgtcgtaaacggcggcgggtacattgtcaccttgatctcggccgcgctagtccgcggccctttcagcacaaaatcaatgtacaaattctgtccgtacgaaaggaccgccgctctcttcgccgactcctccatgatttttggtctgtgtttcgccagctctgccgccaagtacggcggagcaaaagactcaatccggagctccgtcgggtactttgcagtataattgtacccaacattggtgttgctaccgccaatgagtactcttccgtcgggcagtaaggcggaagaggagtggtacatccgggggatatcgctcggttcgagctcttcaaaccgtttacccacgggttgatcaggccggtaaagaagaggcacgaaattgggatcctcagcgaaatcccaagctgcagtacctaaatgagcgccgttgacaatcaataaatcaccggcgggtaatattaacatgtctcccataacacgccgtgagggcattgtttcggtttcccacacggcgttagggtccgttataaccaagcggttacaatcgtccaaggcgggaatgaaagtgcctttaccagcgagagcgtaagcttcgtgtttggctcctccgcatataatgacttcagctggaacgacgtcgtttttgtcttggacgagatcgaggcgaatgggaaggagggctgacatgcctgatgccgggtagtttcgggcacccccgggcagtgggggcagctccctaacgacttggtgagtttttgggtcgaggaggatagagcggttgttggcgaagataaagacgttgccatcggtggagaggtagacaaatgggtagagattgttttcgtccaaatcagtggtttcgtcaagcattgctaggaatgtggcttgagtgtttgattctcccattgctggtacgaactcgtacgagtatgctcgcctccctcccaccaccagaaatctgccgtcgtcgaccgttatttgtgttgcataccttcaagtataacacccaattagattattaattctataaatgctcatattactatattaatgattaatgatataaagttgagtagttaccatcttgggtcggccaagggtttctggtattcaaggaaatcacaagtgtcgcagggtttgaaatatctaactgttttgactccattgtcccacccgccagttcctatcaatttaccgtccgctgtaaggcctcccgatgagcaccatgggtcatactttaactgtacacacgtattatatataatcattcacggcatgcatattataatacggtacgtaattaattacaatataggtatataaatgcaacccttcaaattatataggtgtaccaatcttgtatttaaatagtttgaaaatttcaatttatacatatagtaattatttaagaaattacacaaattttcaataaataaaaaaaattaatgtttcaaaaacaaaaattaaatgtttgaactaggtgtgctgcactaatccatccatctattagatgaattgatccaataaaaaaaattaatattaattttcatatacatatctattttttttaagttataacaacataatatctaattactattaaactaaataaaaatattaattaattttagtagatgttgaatgtattaaatttttgcacactacatgtaaacacccctgatttgattcaattagatatatattttaaaaataacatctaatctaatcagattacaattagatatctaatattaaacggtcaattataattaaattgatcaattattattatattaaatcaatttatgcacccctaatttgaagcctacttttaatatcataaatattactcaaaattttgctagaactcttacatatttggtttatatatatatatatgaaatgatgatatcgtagtatagtgtatacgttttgaatgaaagtatataaacaaaccttaagaggtcttatattattgcctcgctggcgaagaacatcgaattcgaccccatgagaccagcaatcttggagctgtttattagttttcttatctacgaaaggaacacattcaccatttgctaatcttatgtctgatatatgaaaagccgaagcatcatatattaaaaccttattgttaggaagaacaatcatatgcattgccgacacaccactattcttacaaactatactccaatttcctttgaaattcgttggaagatccggggccgcattcgggtcaaattgcccattatttgtatcgtcagccggagcacttgtatcatcccctggcggcggtgtatcatcaccatcgctgccaccaccgccattgtcactgccaccatcaccgccgggtggcgctagaggatcatccccaatgggcaagaaaggaaaatgtgatgagaagaagcctaaaccgtttccattactactaaagccttctccactactaagttgtccgggcaaaggatagaaactcggctgggctaacccattttgaatgaccaacaatataattacaactagtgaattaatgtggaataataaggtagccattgaagagaaacaaacaagttttcttcaatggcgattatatgaaatataattattatatatctatataattgtaattattaaagctcatttgtgagtgtattagttgggagaggctctctctcctctatcttttctctctatgcctctttctctctttttctcaatgttttttggttttcttcccctttcctagttttctctccatctctcttcaacttaaggtggcaatgagtcagttaattagctgcaaattagccaaaatagtataaatgtgttatacctagcttggtttaataagaaaaaaattgaaactatttaataacaatatatagaaacaaacaggaaaataaaaaactatgatatcactgtatacgacaaattattatgatttgttgatatagttactcctcaataaaaattaatttacgttttttcaataagttaattacaatattagttaataatataaaatgaaagaaaccggccgaccattttaatagtaaaatgtttgattatgttacaaatactatttattgaattaccaaattaaatcattaattattagttcttttgatcattcttttttgtggcaaattcttttgatgataattatatatatacaaaatctgttgtgtattctctcaccttcatcttctatattaataattatgtatatagtatattcataattaagatagcaattcttgttatcggctagtgttatcatgtatagttgtattcatgctgtgctattgtggattggcatgtcttaagccgtacataatccatttatatttcgtgttaaaaaatttaaattatattttgattcgtcattcatgttttaatctgttaaatttgtgtattcaataataataatgaattcatcacacaatataatatatatatagttattgatatatcttatatttgatttatttgagaatttttacgttaattatgtttaagtaatttaggaaaaaaactgtagtctatcactatactgcattaatatatttttccttaattatcttatatttgatttatttgagatttttttttcttaaatacatttaagtatttcaggaaaaaaaaatgtagtatatcactagcaattaatatgtgttaatatattattaaaaaaccaagtataatattgtaatatattttgaaaacatttagtataattacttaattaataaaatattataaaagtataacattcaacaaaatattataaaattacaacattcatataacatagagaagaagtagaagatgatgatgtagatcaagagacaaagtaaagagaatgagaatttcaacttgtagaggagaattcctatttatacaataaaaaaataagacttataaaatagagtaattaaaactatacaatcaataatttttattttagataactaattgattttaatctaaaatagagtaattgaaactatacaattaaacattcactacaaaaaactgctacttttatgataattttt

SEQ ID NO: 296451 - DNA, 1056 bp, Cannabis indica
gattttatttaagtcgagtttaaaattgggtggtgggtccaaatactgggccagatcttggttcagtttctaaagtctgagttggagtcagatcagtctaaaaaactgtttaaaaaattttgaaattgcaaaattatgtgatattctgtccaaagaactatgacgtcagaaaagatttaacataaatttggatggcaaaagttgaatgacttaatagttcggggagcaaattaagtactattaaaagtatcacgtcacaatttacaattcgaaaaaattcagaaggcatataagtcgaaagaatcaataattcgcagaagtagaaaagaatagcaatttgaccttattacgatgtatgtgttgagataaatgggttaattagcaatatatttgtggttgtaatacacaggctctgtctcacaggagggaaagaagtacatattgatgttatgagaagagtgcaggacttgtctgaggctttctcaggttgccatgaagaagtattggtaagtaaatttggtgattattcatctcttcttttatgcataaaatagaatatacgtatgtttatgtgtatgtgtacatgtataaaactttaatttattatttatatcttttattcagataaaacgtgaagaattgctccaatttgcccaaggtgctattgcaggactgaaaataaatgcagacattgctcggtgcttacttatcatatatctctagtttaaggagtgttatccattgaatagatacacgtatatttatacactttaaaatattattaattgttctcccacatcactaaattagttttgaggtggaagctcgtaaattttaacacaatataagagcaacgacaacgcatatggtccaaaatattagttagcgaaaagaacccttagggaatgttgagtttcttatgttcatgtatgagtttgtgtttcttcattcatttgtcatattgtgggatttgagaattatgggataagatgaatggagttccatcttaaaatagaagtttaattttttctctctgatacaatgttgagtaatcat

SEQ ID NO: 296452 - DNA, 13220 bp, Cannabis indica
aaataaattaaaaaaaaaaaatcgttagtgtccttataaatatattttttacaaataatatggtgcatattttccctaacaaaaaatgagtgaattatataagagacgaaggtaatacaaaatatgaaaattgctagattagcactaattatatatttttccatgtgaattattagattgatcttttaatatataaatatatatatatagtagttggtattttcataacaaaaacacattataaattatcgtccaattattcaattctgtatcctactctctgatggaaaaacttattataaaatatatatgtgataaatcaactattttctttttacaggccagtgaagaattcagagttttcagtttacaggtataatcatttgattaatataaataatgttttgtgtatcatatcaattgttattagtttagaattaatattaatgcttatattatagggtgaagaagtaggaagtattaaagtactagtaaagaattgtccacggctattagaaattaatatttcagatattaaaggctatgagaagcatgttatttacgaactcatcatggaaggtgtatctcacaagaacccctctttgccatgcaaaccactaccagacaactgccgaggtatataactaacattgttagttaattggagtgtcaataggattattctatgtattttattttgaattaaaatatataagtggatattaaattatactaatttacaatatataatagattctccatactatatattagaataaagtaatttgtgacataaatacttaagtttaacttcaagttgtaaataaatacttaagtttaatttttagcggtaataatacttaagttataattttggaacttctataagtacctgctcaattaaattgtcacgtgacaatccctgattgatccaagtcatttaatttttattatttaaaaaaaaaattagttcaaatatacgaataagaaaatgacatgtagatttaataggttaatatttaacggttaggtacctacagactttcagaaatataacttaggtattattaccgctaaaaattaaacttagatatttatttgcaactgaaaattaactgaaagttaaatttaagtatttatgctgcaaattactctagaataaatatacctttttactcctgctcatgcacgcacgttattgaattgtgagtcgtacgtacgttagttttttctcctattaaaaaaactaattataaattattaaaaatataatgaaaattttgttttatatttcattttagtaaattaaaatggaaaattaatttttattttagaaaaaaaaataatatttaaaatttaataaataaactttctttatgtcatatgagaggaaaatacatcatttttaagcatgtcgttagccaaatatatgactgaaattaactaagcaataccattacaattcaataaataaaacagtgttaggagaatttttaaaatattttatattttgtaaaatgtatgtatattatatatgttacaacagcaataatcttttatggagtggacaagctatcatcggacgccattctatacattaagtggctgttggaaaggtataatgtgtgtaataagatctttttctgctgttccgatgcttcaaagcttcaggcccttaaaactacttgcactgtggttcaactcttacccccttcaagaactgaggtagaaattatatatatactaactatacttagattagatatacagtaattaataagaaattattaaagcaactcttctcttttcgtgcatacatttcagataattaaagttttgaagctcattgctgataaggaagagatagatttgcctgataaattagctgaaaagattactgatgcttctaaaaaaaatcttcgccaagccattcgttcattcgaggcaacttggctaaaacagtaagcaaaactatacacaaaactttcgatgatatctttgcattgcattgaattgaatgcataaaatatatatatgttgtcctataacacacattattgttattattattattatcacagttatccctttacagaagatcaagtaattctgaatggttgggaagatgatattgccaatattgctaagaacatgattgaagagcaaggcccaaaactgtaagctatacaaaaacaaaatacaatattatgtattatacccttttctctgtcacgtcacgtttggatatttcagtctttagggagctagctagaagagaaaaatcatgtgtcaacttccaaatgagaatatattattattattattattgttcatgacagattatatatcatccggggaaagcttcaaaatcttgtagagcatgatgtgtctcctgagcttattttccaggtacacaatatttttctgaattacatattattttatataaataaatgcatttgttgagtgttctacttgtaataatcggcaattgttaatgcagtcattggcagaagaagtgatgaagcgtttggatgatgagacgtttaagagccgggttcataatctttatgcggaatacagtgtaagattattaaaaaccaaagctttggagatacgtataaataaaacttcttacataaacgtaagtttgcacgtataataatcttaattcggggaaattgttgtacgcagagaatagatgagagttatttggagagtagcaaagggcctgcacatacaagaaagagtactaatgctcagcagtacatgaggattgaaggtatctcaataactaaatcaatcaccacctaataaatagatcaattgccatattattaccttgttttatgattttgcaaagtaccatagtttctatttctacataaactaatcatttgtacacctctttcttggcagagtttatagccaaattcatgagctactataagactgaagctaccaaaatcatgcagcaggaaaatgaaagtcgtaatagtgaaatataaagggaatgatgatatccccttctcataaatatctagaaaaacaagagtagataataagtttttctaaaggaatatgtaatcttttatactatattgctggaaactaatggctttccgtacaactttgaacagcatactctgaaattacaaggaataagatacacaagatgtgaagaaaatgtttgttgaagcttaattactcccaacaaacagaaactttttctatgttaccccaaattcatttattttattgtcgatgtaccatacacctgagtaatactgatataattggagtaacaatgtcaatgtaacattaacgctttgtgtagtgtgtacatattcatgccatagccagcaaggtttgcacctatttcacaatacacatcttccttccaagattatagtcaataaattatgacgtttggaatagtcatagctacacatgaaaaattatcaaacgttagtgtacgaaactaacatagctgtacagaacatttaacagtcgataagaggtttatgaatcacagtaacattaaaagatagaaaacagaatccccacaaaagaggttgaatagtatgacaattcattttgatgtgggtggaaagtttttataattcaatctaagatttgaccacaatttaccctaactgactccactcacaataaattagaaaagaaaaatatgaagtagctggcaaaactatagagcccaaaccaaaacaatgctagtaaataataggaagcagtcagatgcataactgtacagacaaaaatgttaaaatgaaaagaattttacaaaactacaaagacattctcacgtgtttttattgaattgctaatctctggagatgatccaagaagacttcaaaactaacatcgtccgtaaagatgacatcccctccaggtagaggtgcgtcattgttatatgtagccgagggattcagtttcgccaaaagaaaccgagcctacacatgtacacaaaaatgcatcaagttatgctctatatatataacttagcagccaagtaatagaaccgacaaataacctggaagaaaaataaattttaacaccgttgaacacgagaaagcgtaagtgtgtgaaacatcagaatacctgagaaccatactgatcgcaaaccactaagcgaggaaccggaaatctttccttgactattgcatctgcgtcaacatgaggagcttcgagcaactgggcaaatgcctgcaagcacaaaacatttatgagctcatacttcatgattcaacatgacaactttattgaatgattttttaaacttttcttataattttttgtgtatattcatttaacccaagatctaggtgaattagatatctcagctagataagaacagagacttgaccgccattgctggataatatatgatggcaaaagaaatatgctataagtaagccatttgcaaccaaaacaaatttaaccaccaagttagagtaggaagaaaaggaggagaaagaaggtaggccgttagttgtgatgcaaaaagcttagcaggacatacaagataaattattgtagttgctagatgtgtaaatgcaataaatgagactaatagtaatcactacacgagtacaaaatacttatatgagatatctttcaaattctctaccaaaagagaatacctgatgttcaggcatagtatgatatccagcttttctccactgagcaatagttgaaccatgaaaaatcacaacagtaaaataagagtccaaaagtaaaatcctatcagctgcaatggcagcaacatcaagaagtgctggttctggggttgaatgaaatgagtatgagatcaacgaaggttgaatcatgacaactgaattggcaacattttcccgatttaggatcattctgaaatacgcagtctcatctgggctgttgttaaacacctgtaatgagtcgtatttaatttactagattttattagatggcagcatgataacaaccaaatgaaatcttttgaaagataaaacaatgcaggaacgtaaacgctaatatacctggacaaactgtgaacgtcttaaatgaaaaataaattgagggaatatagataatcgaggagataagctgaaagaagacggactgtctttttgataatctccaaaccgtgagcaaagatgtatcaatgctttatctaaccatctgataggatcaaactctgcctgaaatggaaatacttaagcttcatcaaaaatacacaaggcatgatcacaaaaaacaaaaagaaaaataaaatatttcaggcatcaactcaaatacagtacaattttgtgtatgaatcccatgcaacaaaaatggttacaaatgcagtcggttaaacacgactgacttggcaggtagccaatgaggggcttaggcttgccaaataaatctgaattctaaattagcacaggtgcaaagagacttgatggaagcaaacatagaaaaataacacttgatgtcaaatcaccttttgcccttatacaaagctgtagttggtgtaatttgttggttagagaaaatcatgagagattttctttgggaagcttgtgatggaaagggagtgatcatttttagctttagaggttgtttctcaatcttgttttcataagaaacaaacaaccatatttattttgaaatgaaataacagaaaagaggacaaggtatggtatcctcactaggaaaaggtaattattcaatccaagattaaggacagcagagagcgctgaagttctttgccacatacgccaaagagaaaccaattatttatctttttcttatagataaactaatgagatggcttagactattattggaaggctcaaatggtgttactataaacttgccaggatttttacattctaaaaacctagaggaaagtggtctgctattgcacttgcacatgagctgaagacgacaaaggaaatttagttggttagtatttctacatgttgctgaaaatccaagtatccatttcttttataaaccatgaaaatgtcccaaactcgatatggcccccagttcaaaaatggggcttctggcctaaccctacaatatttaaagagcagcaaactataacattttccatgtacgaactcgagtaacttaacaaccacaagcttgaatgtagacaagagattaacagaagttgaaataaaatttcgagtagataacttgttgtaaccagcatgcctatgattcaatgtgtaaaacaaatctgtattttgatccaacaacattacttccgaatttccgaaatataagtagaaaatctcttcctagattaattaattaattagtttgtttgcttatttatttatttatagttgtacttgtttgctcgttcagaaaataaaaaaaaaaaagacaaaagtaagaccatcggaaccaatagtttttattatcaatatataaatgaagcaagagcatatggtttccaagcattagagcagcaaaaagttattgaaatgaatggtacctctgtttccattttaaaagacaccaagcgtgccatgactgctgcagctgcttcttggtcaaatccagaaatcaattcctgccacacaagaaagcagagaaatgaaattacaaattagaataaataagtgtttacattgggaaacaatctcggtaaaagtatccaacagtagaaatattatttttaaatataaattaaacacgcatcaaggaacatcaaaaggaaagtctcacctgtacacttccttgtccggctacccatcttcttgacagagttgtaacacgtagtctcatttgaccactttgatgctgataactggaacagaaaaatatcttataagaacaataagcatttgcttttatgctattgctagcttaacagagagaaattactcaagaacgtgtaagtgggaattcatactaagttataaattggaaataaaactgattgctattggatggaaccatcccatctggattttctttcctaacaatctcaaacattagacacaacgatgtatctttgtcaaggccacacatcttccatgcacttgtacctccctgaccaacaactgtgtcagaacacaaaggacctttctgcacaaagtaaacaaagtaagaacacaaaattgatacagattaaaaagatttcaccataacactctggctaatagtctgttaccttttccatagatgcacaaggaccaatcacgccctgaacttttacatcctttgagcagtttatctcaaatataccactgcaagaagttcaaaagtcagatcacacaaattagtatttacaaaatatataacaataccagaaattacgttaaccaagaaaaaacaaaataataaacagtttgttgaagtcaacaaaatattttatttaaaaaataataagcatggaattgatccctaaccaaaatttattaattaaaaattactgtgcaatttaaccaatagttgttaatttaatgaacttcttccagcttactttgctgctaaaccaagatcttgatcacccaactggaaaacacgtttaagcgaatccttaaatactgaatggccaaaactctctgcaagtacaacaagccctccagttttctcaacagcacccttaagttcagcaatccccacctgaaagagagaccaaatgaagtttaggggaaaataaatatgaacaaggcaagaaaatattgagaattctacatagaggtccaagaaatattggatcaataattttctctattacctaatcgaatgtttaagatagggtgtacaataaaggaacaacaaagaacgattcaaaaattacctggtcaagggcacaagcaaaaagatcaagtacatgtccttgattaacaagctgctttgaaagtccctcgtagaacttaacagctttatgaaaatgaggagcagaatctttatcgaggtctttgtgtgaacgaattggttcagatagatttttcgaaacaatctaccaaaaagaaaaaacatgaacacctcagctgatatatcaataatcagaaaaaattcagttaaaatactagaaataattataatattgatacagaaattaaaaacggagccaggaagttttaacagatgtacaaagaaacaagagaaaaatgcacaaaagcacagccaaaatggagcaagaaattctccaaaataataaatcataagatattctgttaattatcccaaacaggattatcaaaggctgcaaaaccaaaatatttgaagaataaacccgccactaagaaacaatgctcaattgaagatagactatgcattttcgaacaagtccaaaagccacaagtgatccaaaatctgctatttactttaacttacagaatagcatagctttgctcaaaataaatcttcggccaccaaacaccaaaactatcaaaactttggaacatttgaaaatgatgcacaatagttggagtcttttcacaagattataatttacacaacaatatataagggactaacaccaatttagaatccaactgtttctcttggaaccaacttggtagcctgttgtgcacttaataccattttaatactttgtatattgtaaataagctcaaaagtgtaacttttcactaattttaagaaatgttttattgagaaaattttaaaaacatgttttaattctaaaaaagaatttgaatgaaaaaaatatacatatttgtaagtcttttgtctaaaatatgtataccaaaagtagtgaaaatgtgcaattttgaactactaattgacaatatacaaggtattacaagaaacaataaggcactaaaatagtatattgtcaaacacgaacttgatacgaattattgtaggatagggtcacgaaaagtagagggggttgaaattggatcgaacccaaatgacacgataattatttggttgggttaggttaagttagggtcaacctaggggggcaattcaagttagacacaataacatgacacgaactcgctacgaattattcgaactcgatgcaaattattgcgagttaaggtcataaaaaatagacgtgggttgaaattgagtcgtacccaaataacatgaaattatttgggttgagttaggttaagttaaggtcaacctgtgtgacacgaaattgatacgacatcaattcaatatattttaaaaaaaatctaaaatagaaagaaaattacttaaaaaaatataagatatcttctttccacttgatattaagattaagtaattatattatttatttgcaactttatatatttttatcaagtgtattattcaaatgagtctaacaaaataatacaaggggtgtgcataaatcgacccaattcaatgagaaccgaccgattcaattacaaccgaccgccaaacattggatattcaattgtgatcggattggattggatgttatttttaaatatccacttggatcggatcggatggtggatgggctgtccaaaaatccaatacatccaatatccaatcgaactaattagtattttcatttaatttggaagagtaattatatttcatattgtaatacttagaatccatacatatatatgaaaattaacattaaaattatactctttttttttggatttgatggatccagtccaatccaatacattctggacttaaaatattgaatggattcgatccgatccaaaaaaatactaggtctaaaaatatttgttaaattcaaattaaattaataaatatatatgaaatacatcttgttatagtgcgaatttttcgcctagaagtacgagtacagcctcgcataaaactgacatgtggacccagttcctgatagaaaggatgacatgttaaaaaatagctcctatgagctaacctcgtttggtgagaacttgcaagaagatgcgaccgagacagggtctagctgcatacggtgtgtcgcatagtcaaaagaataagcaggaccaagaggatttaatactggtcgcatatatgccaattatatgcgatgaccaagtagacctctcctgtgactagtaaagatcgattctttacacaggagtggtccgagtgactaatgtgttcgataaaccgtcagggactcgcatgttctacgttgtcaacacatggaatgtccgtctatgcgatcaaaaatgaacgcaaacattcaaacaataggcctaaaggccaccctgtgagtacaaacaccatagagcctgcgagctcgtgtgttggaatatgaacagaaaactcgcggcttatcaagttacatatgttgctgcacttaatacaagaacggattaaattgtttttcatttattctttaggcatttactttgattaaatactataatttattgaaaaaacagttataaactgatcaactatgtaatcctaaaggacacttactttctatataaaggagtgatccaaatcaaataaacaaagcaaaaaatccttgcaacagtggactaagtatactaagctctgactgaaccattataattttcttcttttttctttatttatgcttttattttgtttatctagtagccaataatttgagtattcgctgttctaagtgaatactcgcacatctgtaataaggtatccttattctctttgaatactctcacaaatttagtgttgtccaaattcttccgacaacatttagcgctatgtgtggaaaagaagtgtttctaaagatttttttagtagagtcaagatggctacagatcagacaaacgtaaacaacaacactggatccttcaacgtcgagactattaatgttcttatttttggtggagggacaactcctgttgaggccgttataggaggagtagggcatactcgtgtcaccccctcaatctgtttcatgaaatagcaagacatgctagagaaacttcgataccaacagccagtgtggggcattttccaccattcacacctgtcgttacatccgagggtattatcaagctcataacctcgcaggaataagtacggacattgcaagcagagatcgcgaggagagatcaaattcaagcccgacatccgccacgaatccccaatcgacgtcgcgatgataatcacgtaactgataacactagatgtcgtaatgaacgtcctaacaatgcttataattgcagggaacatttaggcgaaaatggccaaagactcgacctaaaccaactccttcgcgactctacacgtggtagagggcccgttgctcctgatacaagtcgaaaacctagttgaaaggaggaaagaccacaggaagaggaccctaaacaacacaacccatcgtgcgcagccacgaactaaggtaaacgatggtgactctcactcttcttctttgagaactgatagtcattcccctagtgtttataccaggccagaaataatatttacaaggctaggagaaagatatcatgtacatagaggtgacctacgaaattgcctcaatgaagtgtttcgggcccgatcgtagactccaaggaattgcaataatgaggaggaaccccatgatccccaattggccggatcaaggtatccccctgcgaacgcaaacatgcaacgaatgcagtaaacttgccaatcgcaccagctgcacccaatgacgtagtggtacccacgaactagcaacaatggccacactgccaacaagaaaccaaacagcacttaccaacaatctcattctgccaagagaggtcgatcaagaaaatctcttgcgaacactgagaatgattgagcaacagttaaagcccatatacaagctacatgaaacgtcacccttcgccgaagaagtgcgacaggccaggctccataaaggcttcagactctctgaatcactcaagtatataggtatcactaatcctatcaattatcttgataagtttaatacgattatgaaagttgatcaggtaccccaattgactaaatgtcgtatacccgacgcaactctggaggacaacgcacatgattggttcggtcaattacctgaagtgtccatctcaacatgggagacattcatggatttatttctaacccattttcaggcgaccatgacatacaagtcgtcatacacaatcctagcaaacattaagcaggatgcaggtgattcgttacaaaattactttaagcgttttaacgccaaagtaaccaaggtggaaaagacctccaagtctttgcttgtttgcatgcttattacaggtgtgttgctaaggacagacttttggaaagagctgcaggcaagacaaccagaaaccctagtcgagtcttttgtcatggcagagcaccataagaggattaagaattcgctggcaaaactcgagaaaagcaaagaaaaacagaggtctccaagttcgcgattaaaaagttccaagagacgcaatcctaggcacagcccaaaaagacatagtcccacaaggcgacgaagcccaaagcttgctaagtccctaactaggaaggaaacttccccaaagcgaaaaggaggtccgcgttttgtcaactatacagagctttgcgtctctcgcaaccacatctatgccatcaaaaagcacaaaagcgtttttaggaagccacccccaattagaggaaaaaacgcgataagaggggcccgaataaattttgtaagtattataaggatattaatcatacaacaatcgaatgttggttcttacaagataagatcaaagaaataattcgacgagggcatttcggacagtataagaagaatggagagaccaatcccgagcggatagggcagacaatacagaagatgcgagtggttctaaaactcctcgcaatatcctgaccaccataggtagaccacatgttatgcgaaagcaaccaaggagaaaccgttaacgaatgtgaataatttgggcaagaggccagcaaagcttttcaagaaagaatgtgatgatatcactttcatggaaagcgacgcgagataggtgcaccatccccatgcatatgctttggttgtagtcgctaatattggaggtgacaacgtccatcgcgtactcgttgacaacggtaattccatcaaccttttaaatttacaagccttcaagtaaatggggttacatgaaaaagatttgaagccggtgacttcgagtatctacaggtttaccggagatacaatcgaactaaaaagaatgatcaaactaccaataactttggggaaatcacctgtcaccgcgaaatctatggcagattttgcagtaatcgaccag

SEQ ID NO: 296453 - DNA, 1440 bp, Cannabis indica
ggtaatgtatcggacttgcctttcgtaacaatgcgtgagtatcatagacatgcaaatgttttttttttctcttgtttctgttcattttggttcagggttctctttgcagagatcacattttctttcaaaagtgtggaagttcttaaacacttgagccagttgatacaggttacagggttaacgggatttgtttcttaaaaatttcaggagctgtgaagtaaagctataaataacttgtatctgtttataggacaacggattgactgggcatagattatgaataacaaggttcaaatttacaaaatagttgtgtctacattttgaatttacagtataattctgaattgtgtttttatacgttcacagattctcattattgttttccaacaaagtgtttttggcagatcctaaacatgcacaatcttattattttgcaggtagagacacaaaaaaatctagcagccagttggattatcaagaacttgagagaaatcagctattacgtgatcatgggtgcttgtgtggataacaaatcgatcacacattccacccttaactccattctccaagccccattgatttgactggcattctgtgagtcctccaatctcaccatttacgtatcaaggatatttaatagttctgttcactataaaaatcttgttctatttttgtaaatgtaaaacaaaataattagtgctaattcaattgtattcatttacttctgtgtacatctttggttttccctttggatttggccatgctctttttcttttgagtattgtcagtaaagaatttgattttgatttgcggcctcatttacatgatcttaataaaaacccgaaatttgtttatagcttaatgtttccttaaattgtttactgatattataatattattgaatataaaaaatgaattgaagattgtgggctatactactgtgaattataaccaaatacagagaccagagttataattggctgaagttctatgtataatttgacaaagaacatagcatatctactcgagaacaactttgtacaataagctattgtttgtattgaaggaaaatcttttgtattgtaacgaacaactgattctcatcttataccaaaaaaagaaaaagaagaaataagctcacaaactcaacttggttctccacatatctccaatgaccttccttggttgtggattgtctgggcctctgtcacgttgtccagatgtaaaatacaagtaaccattccaaaaaccagctaatgtagtctttactcgatatggaagctttccaatcactgaccatgtctgtttagtttaagaaaaaaaacaagtatatctttctatgagcaacatttgaaaaaatatttaatatatataaaaagtagatcaggtgaagtaaaaaaatgatacataacaagtgaagtctagatgaaaattggaaag

SEQ ID NO: 296454 - DNA, 2798 bp, Cannabis indica
atatatatatatatatagaagcaaaaattttataaatacgtagtgttgcaatatatatttttggatgattttacaatgcaccctcttaaaagggatgtagtgatgcaccttcttaaaagagatgtaatgatgcacccttaacttgtataaaataaaatagtcacgcacacactgtttgaacataggtttcagcgtgttaaacttttttagatttcttaaaattttgcaggatgtcttaaataactacaacttacatgaccatgagaaaaaatttgattaaaaaattatttcaaattctaaaatagatagggatacatcaatacatctattttaaggtggtgcattgtagaattttcctatatttttatcactactaccaaaaaatattgttttcgtcagttaatacgcgagtcgatcgattcttgtaactaacacaattgattggggaagaattttttcgttgatttataacctagctacaagtcatttccgtgagttctgcacactcattttaaaaagaaaaacataattcaaaaaaagctcaatacaaccctaatcctaactaaccctaactatatatattcatctctctttcatggtctacatggaaagattttgtggagtatttagatttaactacaaaacgacgtaacaaaatatgttctacatatatttattaattataagtataattatttatttacaagcttcatttattgttaatgaaaatttaagttaacagtaagttttaaaactagcatacaaattaaaacatgcatgttgatctgtagaggcctgaaaagggttctacttttggtggatgtgcttactttctttcaatagtagatgattattcaaggaaagtttgggttcatatgcttaaaaataaaaatgatgcattggatgcttttaaaaggtagtggaagaaattagaggagaatgaaactagaaataaaattaagattcttaaaactgataatagccttgaattttgtaaacatgagtttgatgagttttgaataaggcatagataggcataagacagttagaaagaccccacaacaaaatggagttgttgaagagaactttgctagagaaaatcaaatgcatgttgttaagttcaggattattgctaaagggattttggagagaagcaatcatgacaacaacctgtcggatcaatagaagctcaagtgcaaccgatcttaagtcccctaaagagttatggtctgataaggttcccaacctatctcatattaaagtttttgggtgtgtagcctttacacatcaaagtattggcaagctagaacttagatcaaacaaatgcatattcctagattatcttcatggggtcaaggattatagattatgggataagtgtagaggtggaatcgaaatcatcattagcagagatgtaatctttaataaaaatgatttttcctacaagactaacacggtaacagagataaggaagcaagttgtggcactgatacaagaaaggggggtcaatccacacctaccagtagtgttcaggtggaacagagggctgcactctagatgagacaaaatcaataagatgattggttcaggtggaaccagactcaacttaatagactgaacttaccatcactgaacaacagttgagaagtagagagctcggggattacatgctagccatagatagacctaaaagatcccaaatcagttgacaaattgagtttaaacacatggaatgatataatagtgtatgccttctattcagtcatagaggccatgagaaatgaacttgaaacttatgaagaggctattaatgaaaaagactcaaggaaatggacaagagctatggatgaggagatatattccctggtgaaaaataaaacttggatagtagttcctagacatgaaggacaatctgtagtctcaaaaaaatggctctttaagatcaaaggaaggacttgcatatggggataagcctagatacaaagctaggctagtagcaaaaagattcacatagagagaaggggcagactttaatgagattttttcctcaattgtgaaatataagaccattagaattatgctttcaatggtggtacaatttgacttaaaattggaacgaatggatgtcaagacagtattttacatggcgagttagaggaggagatttacatggaacaaccaaatgggtatgaataaggatctggaacagagatggtttgcaagttgaggaaatctctttatggtctgaaacaatctcctaggtaataaaataggaggtttgataactgcatgacaaatcaaggatttcagaagagcttacatgacacatgcttgtaatataggggaacaacaattgacaatgatgaatatcttttactctatgtgggcaacattctattaataagaaaatacaaaattagaatcaacaacctaaagaaggctttgggacatagtttgacacgaaagatcttggagcagccaagaggattctggggatggatctgaatggaaataggaaagaaggaattttactcataaaccagaaggattacatcaacaaagttattgagaagttctttatgatataatcaaagttgaccaaacaatccatgataactcagtaccaagtgacaatgaagcagtgccttgaaactgaaactgagaaaaaggaatgggcaaaagtaccatatgctaatgttgttggatcagtaatgtatatcatggtatgtactagacaagatatagcccacagtatataacaagaaaacagagaaaaggaattttgatttattctgaga

SEQ ID NO: 296455 - DNA, 2782 bp, Cannabis indica
tatcttgtttcaatttcagaagacctttatggcaaacaacaaaaaatacaagggtataagagtgttcggaataataagaagagtattaattaaagagaatattttgatggaagagtcataggcccggtcggtcttgatattatttttttgaatggaaaatagaatttttttattaacgatcaatctcagttaccaagcaaggtagcaaatcaattggaacatcctccaaactgaaacgacaaccagagtataatatagaagctagagcaaaggttatgaagttaccatattaattgatcgtttaataaaaaaaatagagacatttctcaaagaaacaaataaatccttacaatcattaagaactgaccaaaagtagagattatatactgtgacagtcagagtcccgtgatctgaaggtgaaagactgggagctgtacaatcttacctcgtatgtggatggtcatgtgtgatgattctgatgagattgtgtaggtatggaactattgatactacctatatcaacaatttacatcttgtttttcagtagccaggtcatcacgaaagaattccatggttaagcgtgcttgatctgggtaatttcacgataggtgattctcttggtaagttttttcagaatgtgtgcgagtgaggacaaagcacgttggaaacactcgtgttggtttgtagggtcagtcgccatttcatgaagcagccaaagtgacgtactcgtgtataaaagccatcattatgtgggtgtaggggcctaatggaagattgaagcaggggacgttacaaataccaatagatctcttcaaagcttgaaccacagtcagacaatcaaattctaatatcacttcatgccatgtatgatttaatccaactaactgcctcagctagtacttctggaattaccgaaacgttgtaagccttattgtcaattagaaaacctctttcatcgagggcaactaggaaaaacaaaaaatatcgatcgagcccttatttaaagagagtatatatggtaatttttgagaaaaaaatatgtaccctttcataatcaaatttttctgggagtgcttctagccacaagccttatctgtcctagcccatgacgggcattgaagattagtcaacttacttctatttatagagctccatatatagaccattctaaaagtatatatttttcattactgaataagcaatcacaaaagaaggtaagctttacaagatcagaattcgcgaaagttagcgaatgaacaattacagaaacatcattgatctagccctattctaatttatttgtaccaaatcatttgcttctctagcttggcacaaaatagttaaggaaacactaaggtatagatcatagatataacaaactattaacatatcaactacaatcttcttaacgtcccggacaactactataatgttttacaattgtgagtatttgcaacatcaatattaagttttcagtttgctagccctaattaaggaggcttatttagggtcgaaactaagaaaggctaagcctgcgtttagagtctatccagccccgagctagctcaataaaaaagcatatatattttgggctagtgaagcagttattttttatagtggttacctgcatagtgaagcattatatgaaactaaaagtttaacaaaagaagatgaaacgtaaatattatatcaattacttcaaataatacacacacacaatagagtaatatggaaacagacacaattaatacatgagaaatgcgaaagggcagtttagaactcttgtgaggaatttaaatatcgatttttattttaataaaaattatagaaacccgcaaatcaattataggacgccacgttatagtagtgcaaggcaccttcgtgaaacacagggagagatgatcgatgaagcaagatttcataataaattaatgttgaggaagttctatttcgtgatgaaagaacctgacagcatggatcaagtcaggggctaatgctttaacacagtcttcgccgatgctttgggtataaatatacatgttgtttccaacatttttatatgatatgtcgccttgttcatcaacagtagattcaaagagcgagtcgggtgtgtgaccttcgtcatgttgggcatgaatcgagttgtctgtgcgatcaagcttccagaacctgttggtcccaacgcattgtatgcgcacacgattccccccaacatcgatgacatcaaattgtgtggtttccccatattcatggttgtccaaaaacttcagatatgtgcgcccattcgtctcctcagctgtcactttgtatcttctatctgagcttataacgaagtacaaacgtcttctagccattttgatttgattatatttcactcctttttaattgatatgcattttcatctttacattgtcaccttatttatacaaaattgaaatattgcaatttaacaaattagtattagtttaatcaatcatgcatagatcgaacaagtactgctgttatacatatataaattctacttaagttaaacaagcactgttatagtgagatttctctcacctagaaactcgagaccagactcctatttaaaggacacgtgtattcagatttccaatgaaagctgaaatgtccatgagagacttctcgaagttttagacctcgcccaggataaaaccagcgagatactgcgagtgcgacctaagtcgcaccgcgtaaccgtaattctcattatgcagggtagatccaactcgcgtgtgtcagaacatgtgcgagtgtcccc

SEQ ID NO: 296456 - DNA, 5881 bp, Cannabis indica
attctctcattcacttgttcaattttgttatctagatcagaaactaaattcaacaagttggttattaccattgagctcaacaatgagactttcttctaagatagccttttcttgattagttggtgttgttgttgatgtattgagaaactccctattatttcaaaaagccaaacaacttttaccaccaaagaaaaaaaaacgatacctttgagtgaagccgaaattctttatctgaaaaaggttgaatctttctctcttaccaccaagaaaacagtacgagtgaagcccaaattattcctctgaaaaaggttgaatctttgtctcctaccacacaaaaaaaaggtacctttgagtgaagttgaaagtcttcctatctgatcagttagtgaaaaatgttgaatctttgtgtctaatgaattagtgagagaagaaagccatatagagaatttgagtaagagaatgaaggaacaaatgagcaattagtgaaaaaggttgaatctttgtgtctaatgagcttgtgaaagaagaaattcatatgaagaatttgagtaagaagaaaagtgagagagcaaagaaaagaattgtggtaggagtaataaatagaccaattttaatttaatgttaccgttattttattttattttattttttatttcttttgccgtgcattaaattatttccttatttgattaaaaaaaaaactttatttccttttttttttctcaattaagagaatcttcaattgggtaactaatttcgggattaattggtcgttttttttatttgtggtcacaataaagacactaaacaaagaataaatatcataactctttctctcttcaatttctgatctttttccatggcctctgtagtacctcttcctttgaatttcaatactcttagttcagagagattgaggtttggttcgtgttcgaggaagaagaagaagaatcccactaaaaatgccacctttgtttgtaaagctgctacttctcttgtttttcgggatctcgacgctgatgattttcgccaccctcttgacaaacaggtttgtttaactataaatttatataaatatgaaatccaaacaaaataaaaatcatttcttttttcttcttcatattttactctctgtttttattcagaacacactgattttgagggcaattcctgggttgaacgagcttggaaaagctttattaggtaattacaagaattgggttttaatttattttcattgaatttgttaatcatattaacagatggataatctatacgttacagggtctgtttcagaacaagtgatgcttttggagaatattggaacttcagttcttgtatctgaaaatcaggttagtataaattgattgttagaagataatataatctacttgtttcatcttacactgttctttcttttgtttcagctacctgaactacaccagttaatgattgaagcagcaaaaatattgaacattgagtcacctgatctgtatgttcgtcaaagtccagtaccaaatgcatatactttagccataagcggtaaaaagccatttattgtggttcatactagccttgtggagcttttgactcgaaaagagttacaggtaacaacaattcacaatctttttcttgttcagttgtttagagaggctaaggaagatgttttacttttgtaaaacaggctgttttggctcatgaattgggtcatttgaaatgcgaccatggtgtgtggcttacatttgcaaatattcttacccttggagcttatagtgtacctggtaagacataatttagaggaaagtttgttgagatttcttggcctaaaagttacatgatcatagtaatagttaacatgagatttctaaactatttcatttatagggcttggtgggttgatagctcagagtttagaagaacagttatttcgttggcttcgagcagctgagttaacttgtgatcgtgcagctcttcttgttgcccaagattcaaaggtaagcaaattatctatgtaaactacatgtttcattataatttacctacggtttgtgatgatctaattgttggttaccattcacctacaagaggtggtcatctctgtgctgatgaagttagctgggggctgtccatctatggctgaccaactaaatgttgatgcatttctggaacaagctcggtcttatgaaaaagcttcatcaagcccgatgggttggtacataaggtaataagttaacaaatatcagcatttggttgtgttgacattttcaagtgtttgctgatcttaactaattaatccatgttcagaaatgctcagacgagacaactctctcacccgttgcctgttttacgtgctcgtgagattgatgaatggtccagaggtcatgattataaataccttctcaaacgcgcagcgcaaaacagtgttgtatagacaattgaagataaagcgaaaatacacaacttcttatcgaaagtattacctcagtttattaaatatgtttttgtctatttttactgtaaatgttaacaaaataacattttttatattttcttttgcagtttcaaacaatcccatgcagaaggattgacagtgttaatagaagatttgttcaaaatttatagctgctgttaaaacctttccagctgccatattccatgtgatattatcatgtcaagtcttgtgcatatagttcttaggagacacgtatgtatactctttttcaagactcaccttatacttttgagtgtaaaaaacatagaaagaaagaatgattcttatagaattgaacttatagaacagatgagatcatttcttagtatttatatacagatttactattgttttatcttgatgattgtataaacttgtgtatggattgtttccacccacataagaagataaattatacgttgggtatttgaacaaaaaaattctaaaagcagcagattttctaaatctactagtttgagaaaaattctagttgaggttggtgtactgtatcttcatttattttcactgacactgacttgttttgtcactttgggagatggtgcaaacagatttacacaatgatactgaatcaaatcaaaatgtatagcaaacatgatgaataatgccatgcactgtgttcttcaagtctatattagaatgtcaagtttttctgtcaagcaactttctcatgaggataaaatgttcagccttgaagaatcagaaggctgaatatgaattggtggatggtagtttattccaataattagacagataaaaattcgattatacataatcaaccctgcaaatccaactcaaaattgcttggattacagagctacaaaaattctattttgtcaacattaataaaatgttagaaaggctgcaaaatacagaataacgagaagggtccattggatatctggtttcatcccactcgaaactcgcaacactacatcatcaacaacgggaccacaaagaataccatcttttgtttgactttcagcaaaactcagaaaactgattgttgtcacacttgaatctgccttgaacttcattgagaatttcttggctgagcctgtgcctttgctgggaagagtgaaattttgaactgttgaccctgcttgggcagccacaaaaaaatcttccacacatgagttgttagcatctccaagtgtgaatcccaaactataactcgatccctctttaaggcttgctgatgtttgtatgccggttgaaacaatctcgattgcagcattgccttgtgggacgaaaaagtgctttgaatctatgtagtttacagttcctaacacagaccactcttgcaatggggattgaacaacacttggtgctggttcaatcaatattccctcggtagagctgctaagaaattctggaccatattcaaatcctccatttagcagtaagttttctgcaagtccaagtcaaattttgaaataagcttgcatgattaattactataatatgctatgaattgtagttaaatttatagaatcgtaccatttccttgaactagttttggcatgctcttaataagaagttcatcaattacaggccagcagatggagctggtattggagtcatctgcttggctatgaatcacaagattgattgactctccatcaccccagcttcccaagtaatggccatagctttcccaagtctccttcccataaggctgcttcaaagaaaagacccctttactatctggtgctgagattactatatcagcattatctgaacaattctgattctgatctggtggtccgattgtgaaggtaagcacatagcgcaagtgatctgcactggcaaggaatgtctggttgattatgccatcttcccccagttgcacagcatgtccattatttggtaatgaaatggtctcatcagctgtgacatacaagactgtgccttcgaatgtccatccgggaattgtgttgtttttgttaagtaaaacaaatggggatttcgaatcttttgggaggtttgatggtggagattcaaagctcggattctgcagaagatctgaaaatgaaaacaagatatgttattactactactacatgttgcaaaaacttaaaaagagttggtcaataatatcagttaatcaatccagcaaatggttcttgttggagactggaaatatggaactgagtttacctgcagatgctaatgtcaataagagaagaggcaaaatgaagatttggagttggagtagcattttttctggttgaaatttggtaaggaagaaaaacccacctaaaacttcttcctagtggcctgagttttggtcatgattatgactttttaggttcatattttattaggacacctgaagtggtcaaccgttcaaaaatcaaaatggggtgtcagcacatgggctcacaataaaagctattcacaacccaaataacagtgtttttttaatagcataaccccacaaaaatgttataccaagcttacaccacttttcctttaagctcctctgtttcatcacagcagttattcattttcattttgaataataataaagttattcatcaattcaatctatgaaagataaaaaatgaagtcttgatcttttattttctaatacagatcaatcaaagttatggttattcccagaaatcttcaaaatgctgttgggtacaaatcatcaaacagttagtggacatcacccttaactacctaatacatagtaacaaaactaacatgtaaaaaccacaccaacacaacccaacccaacctgggtctgtactcgtttgaaaatttgaagccactgattttggcgttgcctggaacccaagcaaactaataacaaaagaaaaagatcaaattttgttacaaaaatagaaaagacaaaataagttcttagtaaattgaaaactacaacgaaaaagtttgtctttttgtggattttttttgataaaggcaaaaagaaaaaaaaagaaaaaaaaagaaaagaacgaagagacgactcgtacctcgagttgagagagtcactcatcactgatttcgtcataataccactgcgcttggtggtaacaacaatcgaagattttgattaattggtttttgtttttttttttttgttttatttcctattaccaccaccaccacctctctctctcttactctctttctctctgcgcagactgagcggtcgaaaaatgccgggcgttacaggtccatccgattattcgaaagagccaccacgacatccatgcctccaaatcaattccaaggtcaagtcttttcccgatttcattatgtgtgtttatatgactatctgcgattctgggtaattggatgaaattgaaattggtatgcttgctgtgagatgaactctgaattagaaccaaaaaaaatgaa

SEQ ID NO: 296457 - DNA, 6998 bp, Cannabis indica
tctctctctctctctctgtattgtatatatctgcgtgtgtatatgtaataatatatatattgtagtcaattttgcgatttttaacaatttccccatttgatttttgacatttttgaattctagggttttggttgtttgtattcagaaagattgttcatttctgatatgttgtcatcgcaaaattagggttttgatttcggagttgttgggagggattcgagatgtgtccgatcgagagagagcttagctagctagggtttgggtgaaaaagtttgagtcttttaccctagagtgtatgaagatttggtgttgcctatgcttcagcgaagaagaagaggaagaagaagaagaagagttaggtggagaagaagaagattgttattattattattataagaaggaagccatggatgaggttgatttcgaaaatgagggtaatttcgaggtcattgttggaaatgacggtgagaatggtgagaatggtgatggtgatgagctcgaccctactgaagaacgtgagacagagcaagatgagcatttgaaattgtttgaagggatggttcaagctgtgcgtgttggtgctggtgctcattgggatgattctgttagtgttggtgctcttgcttctttgaaagcttcgatgagaacctcaagacgttctaaaggggagagtagctcgacttcttcttcttctgctgctgctgctgcttctgaagattgtgatcatgattcacatcataagagagccaaagttcactctgattttcagtgagtttctttttactatgataatctttagtgttgattttgaattgatagtatttggggttcaaaaaaagttcaaatgaataaatgaattaaagtaatgtgcattgtattgtagaatcttgaaattaggataatttcagttaggtatcatgtgaagatcatattgtttaattttgaattattaaccaaagggttttgtcatcatatggtaatgcagttagatattataatcaaatatgttcaaggaagttgtttttattttaggaaaataatgtatgagcaacagattgattttctctgttaatgattttttatttgatattgttgcaagcaagccgaaaactatagctaagaagctttgccaagaagttaagaatgtttgttgctttgcaatgatataacttgctctaatttcttgcagcgagtgctgttattcaactgcaatttcttcagttgctggaaattctagttcatctggagacaagcattacgatattactcatggctcttatgttgcatctaaaaatgagatcttttatcacacctttatgctgaataatgttggtgaagagaatcaatttgatcttattggtgggaatgacaatgaaggagatactagtggcccttcaaaaacagaagatttggaaatccggatggatcttactgatgatttattgcatatggtatgtgttgccttggaattctaccctctgatgggaggtatttgtcgtcgctgcttataagtttgtattttttatttacctttttcttcttttttgatcaggttttttcattcttggaccatttaaatctttgccgagctgctatagtttgtaggcagtggagatctgctagtgcacatgaggatttttggaggtgtttgaattttgagaaccggaacatatctgttgaacaatgtgagtgcatttttatttactttattatagtattattctattgcatttgttagacatccctgttccggtttcttaacattttttttaattaaaaaaatgtcttaaagatgtgatctttcctgagaaaaagtactagagaatagaaaatcagtggctggagtccatgtgcttttgttacgtttgaaaagaggatttatgtattggggacatggacattaatgcatgcagagtttagacacatcatgttaggcaattgcaaaaccacatacaaatttaaatatagacacagttgacttctgatttgtatgcaattactgtcacatttgaagactaacacatgatacatataatacagcaatagatcttgaattggctatgatgatgtaacttcagctttaatttttttaaaaatacaatagatcttagtttctatcagacataaagaatctttatgggattccctttaacaatctccaagcaaaaaaagatatcatgatattagtttttaaaagggtaccatggacactacaagtacaaattgatagtagatattcttttcttttgtggaattaatcatttaccaccaatatttcatagagagaccaagttagagtaggagaaagtaggaaagaaatgaaaaatagggttatttggttggaaagaaatggggacgtaaagggagggaaaatttgtgggtgggggggttaagctctcttgatgagtttggagatctacttgctgttcctagtttattagcttattttcatgatgcaaaaatgagaccatgtgttttgttatgctaaaaagctgcacatggtttagactcataataactgtatttcattgaaggatattccacctccacttcactctaaagttgcattagattcctttacagtttttataaataccacttaatttttaaagcaggataatatatttcaatttcataaattaaatctcctacaatcctcattttctttccttcctacaaaaataggtttatttccaaatggatgactcactaacctgaacagtatttagaacacggtctcaggagtagtttatatatgtctaatgtggtgttttatttgtgtatctgaactttttttttttgattgaaaatttggtactaaaacggatggaaatttacaactacagttgaggatatgtgtcgtcgatatcctaatgcgacagaagtgaatgtctctggtactcctgctatccagttgcttgttatgaaggcagtttattcattgaggtagattccgataactcttggtattatggttacatagttctctcactgctcctcatatattctcttctgctttattcttagaaatcttgaggttttatctcttgggaaaggagtactaggggaagtctttttccattccttggcagactgtcatgtgctgaggagattgaatgtcaatgatgctacactcggtaatggtattcaggagatatccgtgaaccatgacagattgcgtcatcttcaactaacaaaatgtcggatgatgcggatatcaataaggtaattagtgatttagttctcactagttatcccgtgacttcatgttgtcgaactttcaatctaaattctttctcttgcaggtgtccacaacttgaaacattgtccttgaagcggagtacaatggcacaagcagcgctcaattgccctcttttgcatgaactcgatataggtgcttgccacaagctttcagatgctgcaattcgttcggcagctatttcttgtacccaattagagtctttagacatgtcaaattgttcatgcgtgagtgatgaaacactacgtgaaatagctggtcattgtggcaatctccgtgctcttgatgcttcctattgtccaaatatatctttggaggttagattttagagattttttttaactattgtttcagttcagcaaccattcgaaggatctttagctgatgtacttgttttttctttctttctattttgaagtctgtgagtctaccaatgttgacagttctcaaacttgacaactgtgagggaatcacttcagcttcaatggctgcaatagctctcagtacaatgttggaggtttgacttatctatcttccgatgtggatgatctatggacgactgggaatggtttcgatgtgtttaatctaacatagacttttgcaggttttggagctagacaattgtggcttgttgacgtctgtgtccttggaacttccacggttgcagaatataagactagtacattgtcggaagtatgtttttttatggtccctcttttacgcaaataaaatgatttattatttgttattattcttcccttttgtttaatgtttatttcctccagatttgtggagcttaatttacggagtattgtgctgtcatctatcatggtctccaattgccctcttctccagcgcatcaacctaacttcaagttcacttcaagtatgttttgataagatttatatccaaaacggattttaaggacatccattcgagaaataaaattcttaaggagcggtttttttgtattgcagaaactatcattacagaagcaagagagcttaaatcaattagcattgcaatgccaatcgttgcaagaagtggaccttacagattgtgaatctctgacaaattctatatgtgatgtctttaatgatggtggtggatgtcctatgcttaaatctttaattcttgctaattgtgaggtttgtgaatgtttcttctttacatttgacgaattaatttctttgaaactcgcgaatttgatgccttgggccttattatgtttgtatgcatatgttgatctttcgggctcataatggtccatgaaagatatacaacttttagagggattaaagtataatccacatgatattaattctatttatatgaggaaagaagtgactgttgttatctttttgtttcttaaatgacattttttttggcttggctaggatttcatgttccgttgttcggtattgctaataattatgctgattgttgatagttccgttttaatgtgatgatttcgttaccccttttccagagcttgacagcagtgcaattctctagtacttccttaaccagtctttcgctagatggttgccgggcaattacttctctcgatctcaactgtcctaatctcgagaaagtttctttggatggttgtgatcaccttgaaagagccgaatttttccctgtaagttatcagttagtttgctatgtagactgtttgattttattattgtgttaaaataaatacattaatatttacattgaaaacagaaataagaacattggaagacctaagtatcttcctattgccttttaacgattttgagtaaaatgcttcgtactttcttcaggttggtcttcggtcactcaatcttggaatatgtcctaaactgaatgtactcggcattgaagcacctaatatggagttgctcgagttaaaaggatgcggtgtgttgtctgaagcctccattaattgtccactcttaacatctttggacgcatcgttttgcaggttattttatagtattctgtttcctttatactccccaattctcccttgcaacttaagctaatacttcttctgttttctttttcgggtcagccaactcaaggatgactgtttgtctgctacaactgcttcttgttccaagattgtctcattaatattgatgtcatgcccgtctgtcggttctgacgggctctactcattaagttctcttcagcatttgactgtgcttgatttatcctacaccttcttaacaaatttacaaccggtttatgactcgtgtgtaaaactcaaggtaaggttcttaaacacttagtttgactattatttcggttgcaaaaacttaatttcttcttttgcgtctcattttaggtgttgaaattacaagcgtgcaagtatttgaacgattcatcattggaacctctttacaaggaaggcgctctaccggctctcgaagaactcgatttgtcttatggaaccctctgtcaatccgctatagaggagcttctctcttgctgcacacaccttactcatgtgagcttgaatggctgtgtaaatatgcatgacctgatctgggattgcagtactggcacttccgttacatccaccatgctttcactcgagattgagggtcccgaagctgttgagctgcctaatcgtttacttcagaacctcaactgtgttggctgtcaaagtattaaaaaagttcatattcccccagcggctcggtgttgccatttgtcatcactaaacctatctctctcttattatctaaaggaagttgatcttgcttgtctcaatctttgctttcttaatttgaggttggcatctattcttgaaatctattgtacaacaacttttgatgacttttttcttgttattaacttttgttctcgatttttcagcaactgcaactctttggaggtgttgaagctcgattgtcctaggttaactagtctgtttcttcaggtatgcattataccttcatcattcatttcatcatgccggtttacatggactcgaaaaatctgttgtttgcccattgaattctagcatctgttattgtttttcacacaatcggtttaggcatattttatttacctctatacagccctttctgattacctgttcttttctaaatgttgttctttttagaactgcaatattgatgaagcagcagtcgaggtggccatatcgaaatgcagcatgttggagacgctcgatgttcgcttttgtccaaaggtcagaacaaaacaccctctccccctctctctctgtcattagtaaaaatatagaaagagcaattttttgacttgtggggtttgtatgtcgaaaaacgtatatcagatatgcgcgatgagcatgggaagattacggggtgcatgtttgagtttgaagagaattttcagcagcttgtcgcatgcgtaaatttactgaaacttgtctcaatttttctcttttctttgttttgttgttgtttttcttcttcttttaatctttaaaatgcggcgaagcggcttggctaatttattcatgatgatgggatgggatggggtctcttgtatttgtatttgtatttgtatactgtaaatgtaatgtattttgttatttgttttttgagtatatataagggtatttgatgattattattattattataatgatgatgttgttgtagtagtttttctctattatatgtaatatgttactaataaaaaaatcaagtttgtttgttcgtctcttttcttttttgttttttcttttttggttattttt

SEQ ID NO: 296458 - DNA, 4914 bp, Cannabis indica
tatatatatgtttacattataatttttttacactattatatattttactaactaaaataaaataaagaaaaaaaaaaactttaaaagaaaataagacaattaaaatttattaaaaaaaataccaagagaaaaagaataggtaaaaaatataaaaaaaaactaaaaaaaataatattttagaaaaagcaaatggagtaaagaaaaatgagagattttttaagaaaaaaaagttctagataaaaagagagagaaagaaacaatttaggagtttttttatttttacacttctaaacagtattttttttattgtattttttacggaattctacatagattcctacatagcaacctaaattgcaaccaaaaatcgtatagcaacccacataaaaaccaccggagaaagtactttagaaatccaaaccaaaaatttaatttttttttttaaaaaaatagtaggataattcccctaacaattaactatatagacagcataaataagacaaaaataaaaaactaaaaaaacttacaaagttatgtattattaaacaaaaagttaaaattctaattagagggaataaagatatgtacatactaatatatacatttttcatcatcttgaaaaaaaatcattcttaaaaataaaaaaataaaactcattgataaaaaaatattaatttaccaataagaaaaacagtacaaaaaatgatttaaaaaaataataattaaaaaagaaaatcattcataaaaaaaataagaaaagttgaggtataagacccttatagttgacacgtgatctctaagattgtcaaaaataatcgaaagtgtaggaagggatctgcactacgtgatccctaattctctataaaaattaataaaataaaaaaaaaataaacaaataaataaaaaataaaaagataaaaaaatatcacaaaggtaaaacaaaacttataaataaaatatacataaataaaaaataaaaaaagataaaaaaacaaatagaagattgataataacaagttattatttatatttattttggtgtgaacatcaattcttctatttttataggtatatattggaaaatttaaaagagtgatcgatacatttctatttatatgtttaggcatttgaaacaaaaaaattaagtcgaatttttttatagtttatatacgttgtattgtacacatgacttttctttatataatgtaaaaataaattgtttgaatattatattttatattataaattattaataattataacatatatatatatacaattataaacaaaattgaaaaaaaattcagatagagatgcatctacgcccgtattgtacaagcatccaatattattcatagtttgatacagaacccttttcaaattcattttcttggttattttgtcaatattcttatgtgcattaattatttcttacgtttagttttcttttcttcttttgatagtaattttgaaatttatgactgatgatatgtatctatagcaactagcaagtataaaacttaatattatcaacaacaaaaaaaagtatagaacttaatattatcatatccattccatagaataaatacatgcagtgtcagattatctcatccagtaaagaaatattgcttctgattttataatattaattaataataatgttattattattttctcagatttttaatattagaggtttgccttttagattcgtggattgtgattaaccaaccacttttgactataaggtagatagagtaaataaaaaattaatgtagagataggtatgtggtggtgtatgtgtcagtttgtcacctttgtttgataatcaatttaattttttttatttatttattatgaataataatcttctcaaatctggggtttctctattcatcagccaagttttcatatcaacatatttatccaaaacctaataataataaaacatcacataactgcaatttaagattgattatagcattgtattgctgcctttttttctttataattttaacctctgtacgctacttatgggaaaaaaaaataaaggacggtgcccagagagattttggtgtgacaaattccataattttgacttaattatacattactactcattacttttgtttaatatcaataacataatttttgttgatataaagtaatggttggcggctgatggcctataactaccgtattctttggtttggttaattacatacattttcattgtttactatccaattccaatgacataataatcaagtcaaaaactttaacaaacacgaaaatggaaagacgatgacacttgttgaatgaagaattttttctaataattatagactgattcaacttttcaaacctacgatgcctacctaactcaaatattcaagtaaaaagaaaaaaaagtaaaaagaaaaaaaaaaagaaaaaaaaaagttgaaatgaatggataaattacaacacacgtttacacaacctagaaactaaaacattaagttaggacctcttcaatttccatacaaagatttccttttagagatattttgtttgtgtgtgaacaaaattcaaccactttgttgattgtattatattagattgatgagtactgaaaagggcaacaaacgttggagcagaaaaatatataccataattaaacaaagataaaagaacaaagaagataatcatctaatgtagacgagcaaaaacccaaagctgggatgttaacacttaacagtagctcaatcttgtaacccctccatttacataattacacacaaactttccttgtaataaaagctatgaaaactctgttctgttcccagccagatcaataactctctctatgaacttctaatgtgtatatatatatattatatatatccttattatattcacaagataaacaacaatgtattggttttggttaaaagagagacaattctcagttatttggatgatgaagtgaagagtcttcctcatcagcattaagagagaatatgtccataggaacagttgtacagtcaaaaggatctttgagtctactaccatttaaagtagcttcagaacgatcaagatatatcacaaccacagtaatgtcatcatgaaaatggcgtcttacccctttctcaattttctttatgtcttcatatctcatttcccttttctttgcagcctcattaatggccgctctaactaatctttttgctattccctgaaaaaagaaatgtaaaaagtaaaattaaaagactataccttattattaaaaattgcaacgtgttagggtgagaagagaagaagcttacaattcttggatttttgtgcacaatttcaactgctgctttatcacttaaatgttcccacagaccatctgatgcaaagatcaaaaacatgtcttgtggcttcaactttctaacaatgattgagggttctgctgtcattacagccctttttaatggaataggtataccacattgttggaacaagtctctgttaaactctggttttttcaagtaaacatctcctattgatctagacacctaaaaatcaatacaaatgaaattcaacccaaattcgcttataagaagagagcaaaaaatgtataccaattaccaattaaattaatatatttacctgaataatacccttaattcgccaaacaccacgagtgtagacaacaatgtgagaatcatcaggatgaaggtccttaacttctctcctaacctcttcaactgccacgttatgatcagttgagagtctctctgcgacgacagtaccgttgcttgactgcccatcaaaccctctccgcccaagaaccgctcttgagtccccaagattagccacgtacaaaacgtcgtcggatatggccccaactaagcaacacgacccaaccgaagcaatctgaggccgagctggccaagattgtctcaccaagtgtaagaattcctcttcggttgcatcaaaagctttctttatcacatctacagataatccaccttgttcgctcgagaattctgggaatcattttaaaccaaatatacatataaatttctttagttgttaatagactttaagaaaaaaaaaataagagtcaagtggaagagtgaatagaactgactttgaaggtaagggaagagatggttggtgatgaatcgagaagcttcgggaccgccatggccatcgtagataccaacatacgtggcggaaggagaagtgaacacctgtccttgatcttcaagagacgaattagcctgtaccacagctattgaatagtcccctgaagcgtaaggcttgagtcccatatgccatagaagctcatcaccaccatttccaactccaaaacacctctccaatggccgccggcaaatctccaacatctttttatcaactgggtgtttctgatttctttcctcgtcttgtataaatgattttattaccacaaagtttgattctttttcttttctattttctgggtaaagacaaaaaccgtgggaatgccgtgtttgagaaaaacagagaattttctaagagaaaaaagttttggtttttgggggacgaccaaacacaaagacaaaaaaatatagactaagatgtattgttgggtagtatttatatatgaattattaaagatataagaaagtggtggtggtggatgatgagtgcaacaaattaacaatcaaaattggttctgtttagcactaaaaataaataattaagatattaattttgttgtttaaagataaaaatattaaaaagtaaacgcttctattgtggcgttgacgtgggaatgagaaaacttatccagaagaaaaagaagaggaagaagaagagtggtgtggtggtgtgtcagatatagaaaagagaatcgtattcttttacacctgaattggtctctcaaatacgagtctcata

SEQ ID NO: 296459 - DNA, 3743 bp, Cannabis indica
ataaaaaaaaatgtataaataaatgtgtgataattatttcctttaaattcttattaaatttaaaatatattaataaaatttaaattaaaaaaacgataaaaaaaaatctcatttgcattagattatttatcccacattgctggataggataaataatcctagacagatgagattaactggattagttatccagacttctaacatgcccaaatactggattggacaaattagtctgtctaatccaatccagtcctgcataccaaatgagtcctaaggataaataatatcttttatttgaaattaagtttaaaatattaagtaagaaaatagaaatataattcatgataggaataggattgtcatcaatatatataaataagtgcttggatcatactaactagctattcgaattcgacactatttaacaatactaacaataataatatttgttaagttagagagattaacataagtagttcttataacataagatataacatactaataatggtagcccatcactattattctgattcttggccttacaccatctacgtagagggtcagcaagtgacgaccttagtcactgactccacaaagactcttgcaagatggctaaaagaggctcttaagtctccgccaaacaccgccgaggcttcaaactcaggcaaccgcaccattttggtgggcctttacgccgaaagggaagaggatcgtccccctaactccccctacgacctcatctccttctccattggatcttactctataatctaccacaacataccactcccagaataccgtgatgatgattctcgtctctttcctaaactactcaatgcctttttcaaccatcctagagtcctccttgtcggcaccgacatctctaccctagggaacgctctacgtacttgttatggcgtggagattggaaaatcagtagtggatttgaaagatattgtatttgagaaaaagagtaaggtggttttgaatttggtgatgaggatgagtaataatatgaagaagatgaggatgaagatggatgttgatgatatgggaaaattggttttggggatgaggcgtatggagagtataaggaggaagaaagtgggtaagattgattggtggattgatgagtatgtggttttgtcgagggagaagatcaaccactccattattaatgtgtatctttgttttctaataggatcttattatatgggctccattctctatggaatccaaaatcctaatactactaatactagcactactactatgcccaacaacatcatcaacaaaaatcacaagattttcatcaagccaaaatatataagaagcttatttccaaaggatcatagtcatataatccacctcctatcctatgcttaactaattagttttttatttggtttttttttttacatatgttttcttgctccttttatatgtatttgtcattaattattttttttaaaataggagtgaaattttgtattttataattataaattaattaattaattaaatacggaagaataaatttgatactaaaataattattctgtagttacaaattaaaattttataactacagaccagcaacgcagtaaagagctaaagtaatgcaaaaaaatatatatatatactaaagtttttatatgtggattcaacaatttttacagattgctacttgttcacgggctacgcgtagatataagatttattagcaaagtaagaaatacaaaatttttgacttatgtataaatagatttcccttttattgtatatcacaagcctgatgtagttatactagtgtcagttcatagaactaacctattccactgagacaaaaagttaaagttttggtgtcggttctaaactaacactattgacttttggtgttgtttgaaaattgacaattaaattgtatatatatatgtttttttttttatttagtgtcgttttaaatccacactattgagttttggtgtcattatacaatcgacaattaaagtggtgttatttctaaaccgacacctaaaggggtgtttgtgagttttgttggctttataactgacactgaaaaggttttttagaagtttttagtgtcaattttaaaatgacacaatgttattggctgtaatatctcaagatcagtaaatagattaacaaccctaattaaaatagattaattataattgagtaattatatttattatataattaattatatgacattagttgataattattgcatttaagaccatatttacgtgttaggggtatttttgtaattttgacatgagaagggtaaaatttgtaattttgatatttattgtgttagtagactatattattatatattatgtttatattattttattgcatgtggttcttgacaagttagcgcgatatagtcataattagatattttgggctcgagcgaggttcggggtctaaaattattttattatgtgattatgtgaatatgttttgaccgggatgcccttgattatgttataaattgaattttaaccctaggaggaaaatggtcatttgaccaaatattaccaaaaattaagatgaatcatttttttttggctgagttgaaatcaaataattttcattttctgttttatgaacccattcccactaacccctctctctctccttagcctcttgtaaaaaaattgttatctcttgtaatttcttagaaagaagctagctcttggagttggtttgtgttgtttgattgaagtggatagaataaaacttgaggtagttcaaattcctttaattttcttgcaattttaattttagaaagttgaattgcatgttgtgttttggtagattgatgatgagaaccatagctttaaaaattaagtttttagttatttttttaaggcttgaagttataattttatgctgttattagtttttgttttgcagttagatgcaagagtttaacttttgtttatatagttctgaattgagagatttgagcttgaaagtatattgtggctactttgagtttttaagagcatgtggttgttcggagatttggtgtttggggtgatttgattttgtatgttggaatgagtgtttaagcatgttatttgttgtatgagatgctttaaaaatactttaatttggcttggaagtaaatctctaagatgtggtaggttttgattttgaatttggtaagttagttttggtaaaaatatgattttttgggtttttaaatcgagtagtcacgaccaatttatggtggtcgcgacctgattcaagaccagagagtgtgagcccctgtttagcccaaatcaatcctagcatcccatactccaaatcttttccagcctaaaaccataatgacccatatcctcctgaggaaggcgacagttaataaatgatcgattgaaacccaaggaggagtagaaccaagagttttctgaaagatcatttaatgagggtttcgacctaattgaaaagaagcgataattaaatgttgtaattatgaaaaaagggtaatggtggaaagatagaaaaagaaaagaggtgaaggatggcatcacgttgataatagaaactggaatggaaggactagaagcagggccggccctgagggtaggcgggctaggcgtgctcagggccccgaaattgtaaaaaaaaaaaaaaattaaatatatagataaagtgttaaataagaagaaaatatataaaaaaaaattgtttggtgtagtggt

SEQ ID NO: 296460 - DNA, 2568 bp, Cannabis indica
aaaataaaagataaaaatcgtaaaattactccaaacaaaaataaaactaaattaaagctactctaaagttaacataaaaatagtactaataatatcctaacacctgtacaaaatacatatactaaaatattacacgataatatctaatataaaataataagtgaatttcctgacatactttttttattattaaaaataaattttgtgcataaaatgagtcgtttgtgtattttgctatcaatattttggtgtatattttatgttccatgcatttaattttttgtttttgacaaattttatttattagcctttgtatgacaaaagcattgggaactttgctgtcacaacggcgtatagcaaaaacccacaaagataagggcaaaaaaaaattgattggaaaaaaatgaaaagagcaacccaacccaacccaccgctccaattttgttttctttcaatttgtccttttgtatagcttcttctgtcgactgaaattgaaattttgttaaaagcttttctcacctatggggctaagagaatcaagaaaagaaatcattatgcattacatagcaaaagataaaaagaataaatataatgaaaggaaagaggaaagataagttcacttcctagagaggttgtataaagtgattaaagtaaaactgattgattagcagtattattattattcagttatcgttaaggatgaccaatattattaatcagatcattacttcatagtttcatatcaagatccttgtttagtatatagagagaatgcatagccaaacatgataattctaccaaggatgtttgttcacaattcttatcaactttatggggttaaacagtaagcaataattgttaacttgtcttattagctgagataccataatcaaagtagcacttagtctagaagaagattcttgaagccaatgaccaaaaaaaaaaagaagaagagagagagagagggaaaaggtgagaggtcaatgaatttgtccatcaaaagagaatctcaaatccatccaagaactacaaaattattaatctctaaatcacttgattaagaataagttaaaagaaaatctttctgcctaatgaaaagttagatattttgtctccacgattcgggtcacatgtttttagcttaggcttggagaaagaacaaaacctcaaataaaattttatttaagttggtaggttccgtacacttgagaatcaaaaaaaccattatctttaaggacttcttataataagattaagaacccctcgtgctctaacaagttacaacactttgaagtctttagatatcattgggaaagaaaataaaaatatttagcttaaaaaatcactcacttacttgttcctttaactagtgatcagattaaaagcttcgccacaaattaaccataacttaaaagagtagtctgatatgtatcttgctttgtaggattacattcttttaaataaacagtaagattgtcatgcttgatgaaatcttctttctttctttcttgggataactgtttgggaaagctcttaaggaatttaacaattttagttttatttataaaaatgaaatgaaaaaataaaaagtagaagcgagtgaattaggcatatgatgcttcaactagtgcattcatagtcagcactcaataaggattgaaggtcaagcacagtcaagtagaccattttcattctatggaagttggctcaaaaaattatagcctgaaaagatataccaatttaaaataaaagtgaaggaattaagtagttgaaagaaataggcaagcagttgaaacccatcaaattctgacttggtgccttgtgacttggacagaggctagttaaaccagcatctaatgacttggcctttttgcttaaatggactgtgaaatgctattaaccctgatccaatcaagagaatcaaagtgcacaatatctttgtttattacttatgtaaaagaaatgtatatagaaattggattggaagatactcataaaactttcattttgctcttattctaatatattttgatcttagagaataaaaaaatttagttcctatgactaaattgacaaagtaaattgatcataaagtaaaaataaagttttaggcacaataagtggctttacatgctaacaactccagacattggagtataatcattttatataatatacataaatataaatttatatgtaagagatgcctcaaatatatatgctaggcttttcaacaatggttgaagatgcttatcttccatgtaaacttggaattccatgtgtctacttgctagctgatgcttttatcttcttcattttcaactctttaacctattcagaagctcattcttaaggtatcaatctaaaaaaaagaaaagatagtcaattattcagtgtattctctcttgcttcaacaacactatctacatccccaagaaccatggtatccaccacattggcagtcggtgcatcttaaaattccttctgcataatatcaccacttcttaaaccacacaacagtacttgcagatattatatagaacatatatatatataaagggagagaga

SEQ ID NO: 296461 - DNA, 4172 bp, Cannabis indica
aaaaattacaaaaaaaaaattaccatcgggccctatcgagcccaaatcaggcttaaaaattcaaaatattacaaggacatcggacccatatatcgggccctatggagcccaacctcgggcccaatatgttacaattaaacatgggcatcaggcccatatatcagacccatatatccggcccatcggacctaccaggcacatcgggtcctgttgacccatcgggcccatcgaacctacaaggaaattcaccaattaaggtgcatcgggcccctatccatcgggcccaacatcgggtcctattgacccatcagtcgcaccatcgggcccacatcgggcccgacatcgggctttcatcttctgtgatgaaacataccctaaatcacaccctaaatcacacacaaaatcacagaccctaaatctataaagaaaaaacattttcaccctaaatcaacaattaaaaaaatgaaaaataccatagacaaaaaatcttacctttatcgacattacgtggtggtggttcggttgaaatgggttcgactatttggtgttcggtcggttttcctggtggtcacggtggttcgatcgagaacccttcgtggtggtcactggtggtttagtcaggtggaccgtcgtgggtaggcgcggtaagcaggcggtcgagcggtgcggtggaggaggtggatcggcgtgggtaggccggtggttaatcgtgggtcggtgcggtggaggaggtggctcggcttggattgatttgtgggtttttggtttgatttgagagagaaaggaggaagagagagagagagagacggttgagaataatgagaggtgtattttagggtgtagggaaaagtatgcccatttttccaatagttataagtattagtttagggaattaatttgggtataaaagatgcataaaaattcaaatttcccttagtaattagttgtagtccttgtgggatcgacctcacccatgcgagtttttacttgaaaaataatatgtatacttgcgtgttgaatttttcacaacaacaggtccagtgcctccagctactcctttccaaagaaaggatctgcaaattgattccactcctttcaacactctctttggcaaaattaatatctgagcctaataggagtgaatgacaataaatattacttaattaatgagagtcacccttcctgcaaaagataaattatgagtactcaaagttttaatacactgaaccattttctcaacaatattagagattccattgcagtgatcttctttgaacaaattaaaatcccaaaatacttaaaatgtaagttactggagacaccagaggcatctatcactcgttgcaccttatctaaataaaatatcatatattttctacatttaaataacacatatttaaataaatgaattaaaaaaaattaaactgagacaatatgagtgtaccactcgtgtcttttcaaataaaagatgataatatatttattatttaaattcaaataaaatttaaatttaaatgatcatctttttattatcgttattattagataaataaatcaaaaataattttaaactttatttatataatttagattaccagcagaaagttcttcactgaattaggtttatgattggtctgctgcatatctggaagagtttagaaaagctcaagttaccactaaaattccacaacaaagaattaatgattaatattgaagtttattcaattacaactttcaacaatgcaagtaaataagttttttttttaaaagaactgcatgttcattagactaaaagagaaagatgagaatcacgggaggatttccctccccttgaaaaataccagcttcttagctagagagtctagcactccgagctcatccatctgcaaaagagttaaaactacgcttaataaagaaaaaaactacaaaataaatctaggattgaaagagaaacactaaagaatctccacttacgagggcatttgttttaagacaaggcttaagccactacttaacaatccgaatagatcatcacaagaaatttgatgtgcccaagagagagctaaaagaatagcttgagcttcaacttttagtgctgaagtagcagcaacttgttgtaagttatatgcctaagatccatcttcattgttaaccataatagagggtaaacctgctacactattaagccaagaagcgcccgtaaagagagaaaatttcacatttgattttctattaccacaagcattcccaactgagctatgatgctaatctgaaggagctgccaaagcaacaaattccttgaaaaaagtagagatttttgcagagcagaatgataactagggcttggaaccgtaaattctgacttggtttctctgctgccaaatttccaatgtaacacaaccaaagtacaaaagtaaaaaatacattttgatctccttagagtttgatagaagagctttaagaaattttcatcacagtactacccagaattttgtcaatccacaaagaaaattcatctgaaaactaaactgcctcagcaaaagggcaatatcccatcaacacagaagaaataatctttatcaagtaagaaagggagactagatttagacggaataacatcattgaggactctccaaagccatatatcaatcttaggatgaatctcaggatgccaaatccacttccaaacatctctaactgaattaaacccgaactcttggtctacacaatcgacatctttgactaaaaattgtccattccttttatgcttccaaataagttgatccccatgatgaaaatgaattctaggaatagacaaaattttgctccctataatatccccaaagatttgaagcataacctgcctgttccacgaatctccctcaaggatatttgtcacaaatcacacggtttactctttccctcttaaaccaaccattaagtcattaaattcctcataatggagccaaggtatccaaggctaatgccagaattcaatagtctcgcctgcagcagctaaagagagtgtatttttgaagacaatatttttggattctaaaatactcttttttaaaaaaaagagtcaatattcttaagggacatagattgaaaattctcatgacgacaatacttgctcaaaaaataagacacccaaggtttctcttctttttttgccaaactccaagctaacttagaagaaagagccttattcatatctcactagaaaaaataactacttttagtgacaattttttagtcacaacataaattttttgtgactaaatgtgacttttagtcataacaaaaaattacttgtgactaaaatataatatttagatacaagttgtcactaatttagttttagtattgtgattaaaaacacatttagtcacaacaaattatgatttttgtaactaatacttttagtcacggaccttttagtcacaacataagaataataatttataattagtcacaacttttttacttttagtcacaaattttgttgtgactaaaaataagattttttgtagtgtcttcaaatcttctaatacccaaaccccccgaacaacttgggttgacaaatgtgatcctaggatttgtaagccaaaaatctatcattttccatatttccaagccacccaaacttcttcattaaagcgtccaattctcggcatgttaagacgagaactctattagtggacataacataatgggcatggaagatgtaatgaccgcattttaaaatatagattagtaaatgcaattagtgttaattattgatatttttataattatttatgaatttatttaattgtgagttctattattagaagtgggctctagagttattatttttcaattccagagattttattaaactctagaggtattatttgtgttatatatgaattatgctatttttataatttttgctcggcgatgacggaaaatgcgatggatggccatttaaatcacatgggtaagtttagaacccttttcttagtgggattaatatttgagatagttagaataccgggttgagcggggttatggattctgaccattttacccctaagcttaatttggcttatgcttttacaccaaaggtattttagtcttttggtaaaagggataggtgactattttagggcttgacacctagccaaata

SEQ ID NO: 296462 - DNA, 2326 bp, Cannabis indica
ttttatttttaacttacacatatactttatttgttttttattcaaaaaataataagcctaaacaaaactgcgcaaagtgcggtattattccctagttacataatagtcattaggggagttggaaattcctccagccagttacaatttgtgtttacctaagagcaaacttagccaacaagtgagcctcattattagcagatctataaacatgtgagatttgagctcatggaaaactagatacaagaaaattaatatcgtttaagatacaatgaaatgcagtaagataatgagcccatgaccttaaactttggactaccataagagaatttgtttcaataatatggactggtagttgaagagtgagcatccatttgagagcccaaacaatcgctaaagcttccatttcttcaggtttaacatgccctctcataggcttagccatagctacaattacatctccattagaattccttagcatagctcccaaactaaatttacatgctgaaatattaatcccagcatcagtatttaacttcagtcgcctagatggtggggcttgccatttcggttgagactgaaaacatgtggaattggctacagtagcagtagatgtgactgatgagtttaaggtttgttgagatgaataatctggttgagcttgtgcctgcctataattagcaagatatgttttagcaaagttcagcaaattggtgaccgacttgggctttttaccatgagttttagcgtttctttcagtctaaatacaccaaagaattgttaagaaaagttccagcaaattagtagggagcactgaggaaacatgtaacaggaaatctgagaagcttgagttcctatacaaagcaatatcaattgccaaacctgattgtctctagacatgcttagcacgggtacaccagaaaaagcgtgattgatagttttagagtatattttgtatagaggacatatacaatctactgcaatatgacgataaacaagggtagctgtcgtaggagagcttcgtggaaggcacgccaagcaaagattctgattttagacggaaatttaagacttcaaaaggtttgccaccaatgattcgaagaatcggaactcctaggagcagtttgatcaggggtctctaaagtaaacttataacccgatttaacagtgtagcatcccattgatgagtgatgccaagtaagaacatcaattaatgaaaaaagattcaaggggataaagagtatttggtcaacatcagctggacagaatagttcatgaagcaagttccaattccactgtcgagaatcatcaattagatcacccaccttgagagttggattttgacccatgtagagtgcttaggaatagatactacttaaatagaaaccttcttgatgctggtgttggcaactcaccttctttaacttggagatcaattgtttggggaaaggaattactaaaaagagtgtgttacatgttcaaatgttctttgtagagatgactcttggatccctggtcatactcttttcaagccttttttatttggctaagagaacctggttaaaatgaatcaggttgcgaaatcccattcctccatgcacctttgctttacagagaaagttctaatttttccaatgaatagactgtcatgaagctgatgagccccacaaaaacctagccatgagttgttcattttgtctgcataacttaactggtagttggaaacaactcaaagaatacgttggaatttcttgaataacgacatttaataaaacctccttaccaccaatagagaaaagttgttctctccatgagtttaaaagtttccaaatgtagtctgtattaccactaaaaagctaatttttatctcgtccatcaaatgatggtaagcctaagtattgctcatgataaggttggcttgtcatacaaaagagctgttgaaagaatcttctgtcagtagctctattgtttggagaaaaagagagagcacatttctctatattaatgacttgtcgtgaggcacgattgtataagtaaagaaattgctgaatggctcttgctgaagatcgattagcatgacaaaacggcacagtatcatcagtaaatagtagatgtgtgacaggcagagttgatctagaaacttttaaaccttccaatgaaccattcctttcttcgtattgcaacaatcaagaaaaatcttcagaacaaataagaaagtggaaaggggataatagatcccattgcctaatgcctctttatggcaaaacatcaccatggataactgttaggttatttttagtatcaattttagattaagtttagtatattt

SEQ ID NO: 296463 - DNA, 3836 bp, Cannabis indica
agaagctggcgaggttcctactgccaggaacttatctgacgacttgaatctagtggatgttaaaattgatagcattcaaaatttcgaataggcgaggaggcggcccttaccatcgacccccccaaacccaatgaggctcctatcttggaattgtcggggccttttagggaatcgacaagaccttgagggcctgggttcaaaaatgcaaaccaaattgctatttttcgtatggaaatgaaagttaatgaggaaggaatggctatgtgtgcaagaaattgggttttagaaattgtgtgtgtattgcttctcgaggcattgctggtggtttttgtctgatatggaatgaattagtgaggattagtaatttgtgtcttgataacttcatcatcgattcggtacttcaagatccaaattcaggcaaagaatggagacttattgctacttacagaactccttataatgtcgagaagaaggtgttttggagttcttttcaagacagattaatcaattgtggtttaccatggttggtggtgggggatttgaactgtattagctcgatggaggaaaattctgggggcaaacgcagtagttgggttgagctgagacattttgatcttctgttcaggggctacaaatacacttggcagaataatagatacactagggagcttgttcgagagagattagacagagcaattggctcctttgattgggtttcatggtacccaaaagctggggtgcggaatttgcctatcacggctttggatcatgcctgtatcttgctcgatacgcagatgttttgtccaaaaaatttcattccattcaaattttttgaagcctggacattggtggactcgtgtaaggacatggtgactgaatcttggcgggtcgttggttccgaccctgcaccacttttgtagagaacttgaacaaagttagaatttcccgacaaagttggaagaaaatgaattatggcaatagtgaatcgattattttagagttggttggattcaaaaccagccaatcactgggtcattggttcatgaggaagttactatcaaggaaaagctgaaaaagatttggcaaaggaaagaaattgaatggagacaaaaatcaagagaagtttggctctctctaggcgatagaaattcaagatttttccatgcttcaaaagttattcgcagaaggagaaaccaaattttggtgcttcaagatgactccggttcaccccgtgaggggaggaaacactttactacgattataaacaggtatttcactaagctctattataccagtatgcctgaaatctcctcggctttagatgatcttctctctaatagagtcaactcagaggataatgagttcttcaccaacattctcaagtctgaggaaataagggaaactgcttttgagctacatcctctgaaggcccaaggcccttatgggttttcgggatgtttttttcgtaagttcttgactttggtgggagataatatttgtgagcttgtgaaaaagttcttcagaacaagggtcttggaaaaacagttgaattataccttcatctgtttaatcccaaaggtggaacaccctgatcgtatcaaccaattcaggcctattagcctttgtaatttctcctataaaatcattgcaatgatcctcgcaaacaggctaaaacgggtcatggatgagttgatttcccttgttcaatcagcttttataccaggaagatggattgctgaatcgtctattcttactcaagagcttggttcacatgacatataagaggaaaaaaggtggactgatggctttaaagctagacatgcacaaaacttatgacaagatggagtaggggtttatttaagcgtgttcttctagctttcagttttagcagaagaagccgtgatatgattctggaatgtgtcacaagtgtctcctactcggtcttgttgaatggtagtcctttgaagaaattctcacctcagcggggacttcgtcaaggcgaccctttgtcaccctttatttttcttctttgccaagaggtattgtctaaacttctttcatcagcagagcatagaggtttgatccatggaattaaaattgctagaaatgctccgacaatctctcatctaatgttcacagatgatacaatcttatttgcccgtggaaatgagaatgaggcaggggaaattactcaaatgtttagccacttatgagaagtgcagcaagcagaaaacttcagtgcttttttcaaacaacttaagccaaaacagaaactcctccattctttattgtttgcaaataatcatgcttaatggtgaggagaagcacctaggtaatccctttgttttcagaagaagaaaaaaaaggaagaatatgccattttaaaagagagaatatttaaatgcctggctagttggaaaatgagatttctgtcatatgcgagacgtttgaggtttatcaaatcggttgctgcatctattctggtgtacgccatgtccactaataaagttcccatctctatttgtagtagatcttgatgctatggttagtaaaattttggtggaatggtcaagtggggaaagactaatttctagccttcaaatcttgggaccatttgtgtcaacctaaacaatcggggggggctgggagttagaagatttgaggatatgaacaaagctctcctatcaaaacttgcctagagtattgcaaggagaaaaccgaaaccatgggtgaactgtttgttgtccaaatactgcagccacgaaaatttctggatggttaaggctaaaggcaatgattctttcatgtggaaaagtatactgcaaactcgggagattatcaagaagggttcgatgaccttagctgcaagtggaatatcgatagatttctggcatcaacaatggattccctggttggaagttagagaattcaatgatcttatggagaatattcgaccaagaagattattagtgtggacgctgacggatatctcgattggcaatgactggaatgaggaacttgtaaggcaaatttttggtgatcaaatggggaaacttgttatggctatcccaagattgaacccccctcattcggatatgatcatttggaagtggaaagataatgaaaacttctcggtcaaagaggcttaacgtattgatcaggagcatcgtttgggcagtccaaatcactttggaagagtatttgggaccctcatattcaccgaagaatattaattctactatggccagttctttgtgaagctctacctactggttcaaaacatgattttctctcttctttcggttgcagcttctgtggtaatgatgagggaacttgcttacatctgcttcgagactgtccagttgctaaagccgtgtggttctcgggcccgactcccttaatggtggattgtataccagggaattcttgctgggaattatttgaaaatcttctcacattggatgtgggcttaaacacataagagctactttcctatattggttgtatctttcatgttatcttgaatcatagaaattctactagaatcaagggctcgagaatttcaattcccacattatttaccaaggtagtcttgtgctctcaagattactctaattctcaatctcagaaggctgaagaggatgggactgcaattgaacctccattcatcattaatgccccctagtaagttattattgttcgtggatgcttcttggaaaagtggatcggctggccttgcagccgtggctcttaatcttttggataactcttggtcctacaatctggcgcaatctagtgctgcatctactatggaagctgaaactaaggcagtcaag

SEQ ID NO: 296464 - DNA, 3533 bp, Cannabis indica
ataaaaaaggtatagagtgtaatttccccctccaaactacccctaaaatttattaggctataagaaaaaaaaaaacttatatttttggacctttatttaaagaatataatatttttcaaaatgagtaaaaaaaaagtgtaattctaaaaggagacgaacttttttaggcccctcaattaggtgggccctaggcacaggcctagccctcatatacccaagaccgaccctgaaactactcaacttttagtaaatttaaagtttcattgattttttacaattaactgtcaacatagaatacttatgtatacattattccacatgtgacacgtttatataagtacacctaatataattatttcaaaatttatagtattttttatttttataattttatttaattttaaaataaatcttaaataataatattaggtgtaccaatataaacgtgtcacatgtacaagagtgtacacataaacagtccatagtggtagttaactggatgacaacttaaatttgctaacagttcagtagtttgaaatgttttaccattttgaatttagaaggttaagtgcaaatgaaaagatagttgagagagtttagccgccaaaaacttttttatacaagtacaatgacttatttaataactttaatttaattaaaatctaatttattagcattaaacacataaataatagctctaagaatgcacatacatacctcataatttatcattaggttgctaattatgtatttatgttttgtcttgactcttaaattgaaatgaattaataatatgttagtgctatatcaacaaattatttaaataaatgaccaatatacaattgcaggagtatgttatagttcagggggaataacttccactaaacaaaatattacgctttaaaaaaataaatatatttttttttatttgaaaattataaactaaaattgtaaaaaagctccccacaaaataaaataaatttagtaagagtgattatattataggtacatattttttttataataaataattagccccacaaaataaaaattctgagtgcatcactccacgttatgtaggttgacatgtttgattggttaatcctaacccaactcgttgtgttctcgtgtcagttcgcgtgtagactataaatatgttacagtacatgctgatcgatatgattagtatgactatttaatttttataaaaataatttattacaaattattagtacgattaataaaattctcaatatcaaatataaattatatatttatcttcttgtaagtaactaatttttttttaatttatatattttttatggaaataaatattaatttaactataaattaataattttaagaatatattagatataaatatgtgagttagtgttgatttcgtgtcacattcgttaaccctaatctaatcaaaataaataattgtgttatttgggttagaaccaacttcaacccgcgtttatttttcatgacccgcaataatttatttcgagcccgtgtcgtgttgttgtgtcgtgacttgaaatgcaacccttattatatatgtgtgtgaaataaattaattgaatattattttttactttaaaattattcaaaatatatcaaatttttttttaaaaaaaaatatcttaaataattataacatttgcttcatgacatgaaatataaaattgaaaaaaaaattcttaaatgtcgagatgcatcaatgcaccattttttagtaggcattgcagaagcatcccatattcattctaatattgataatactaattagtacttcaaagtaaaagtataaatttgagaaatcaaacattctttattcacaaatttttatgtcttaaattaaaaaactcacaaaaatacataagaaagaaaatactcttcaagcaaacttattacaatttaaccacactaatcacttataagataggctgcaaaacccaataaaagtaagatcattatcaaatcattatcatttgtttaatacattaagaacttctccaagaaccattcctcttggattatttgtaactcaatttcgatactcaaatttgcaactaccataacctgaaaaatccacaccaagagtaaaataaattaataaaatttgtacattttttttatgaaaggcaaaaaaaaaaagtaattgacggtgaaatcctattgtattaaaatattatacacttaattaaccttctgaaatttgaaactttagttaagtttcaccgtataatgccaattagattaccaccatgcacatgtgtgtatacgtgacatgttttcattagtttcgagattttagtgccacatttacacaagtatacacggtgtcaatctcaattaacatttaacagtgagatattcagctaactttaagagtaagtgtataaaaattaaaacataaaaaaaattcgctactaattatctaaaaaataatgaataagttaataatttcttactcgggtcggtcatgacaattacgccggtacccatgaaatcgcaacccgaatcatgcttgccattggcttgatagaaaaggttcatagcagccgaggcatggctaattaggttagttggatcataacaagcaccaccacttttaattaggctgcaatcaacatggctgcatgcatagtcaatgttggtctgtaacatctgattattgctcactggattagccacacaccactttccctatagccaaacaataccactcaattaattaattaattattattaagaaaaatgttacactaataactaattataattaccactgatgataagtccactgatatttctccacctacaaaataaaatttgggtataaataaaacaaagtttcttggctcttaagaaaaagaaaaaacttaaaggaccctaattttataagattcttaaattaactaaagattttaattaatatggaaagtacttaccagttaaaatgcagctgccaatgcctgtaaatttggtaaataagaaaaaaaaaatgttataagattacatataacaatgggattatatataatattttttaaaaatcactaaaaaaatatgtgaatttttttgaaataaaaaccaaaacaaaaattatggttcttagacttagtggaccctaagtataggtctaacccatcttagttcaagaccggccagaaccaaagctagagtggccaaaacagtagttttaaaggaaagaaatatattattttttaagagaaattaaaaatatataaataataaaactcgatgtaaaaatgtttttaacaaaaatttagggtagatgggctataggcgcaggtctagccagtcttagtcttggggtggccaaaatgaaaaaaaaaaaatgttagaggccaaaatcatagttttaaaagagaaaatcactattttctttttaaataaagaaattaaaaagtatattaatgaaaaaaattcgaaaaaaaatgtttttttacaaaaataaaaaataaaaaataaaaaataaaaaaaattggggtgccttcctt

SEQ ID NO: 296465 - DNA, 2122 bp, Cannabis indica
gtggaaacctataaatgccatttttttctaactttggtatgaaatcccatatttcatgtaattttcacttaaaaaaaatatattaggtcttttttcttttggagccctatgcaatagcccaacttgtaccccataagagccgcccataaataaagttttacattgataattactagctagctaatatcctatttttaagtatataattctattgttgtgttgtatttcttgtcaaacttgttgttaaaatagattttggatataacaagtaccaattcaatgtgctggaggtaaacgaaacaagctatgaaaaatgcattgaaaaagattttataaagaacataacaaagggaggacgagatgtgtttcagctgactgagcctaaaacctactactttctctccggtggaggctactgcttcggtggaatgaaagtcgccattgatgttgtccacagtggcccccctcctactcccgccctcgcccccgctactaatcgctcctcaatggcggcggttccttccattaccggccatgtcatcactcctcttctgctaattcttattctcacttcacctttcctctatgtggactttcttaatacatattttagttaattgatattttgcttcttcttaatatttgtgatttgatgtaatttcatctttattattttagagagagatatggcttttgtaattatattgaaaccttatgttaacctttttaattgtatggactccattgattagataaagttgatgaatttaaaaacaggatactgtttttatttatcttatataatttcttttggttaatggtacaattgttttttatgaacaaaaaatgtagatttatcaatttactagtatatatggtcaataatgacgtgtgcgaagcatcgtactactttgtttttctgggattttaatgagatcaattttcctaaaaaagaaaatctcacgtgctcatttattaaaaacagaataattaacagtttttttagtataacaggattcattagcaagaagaaaagaaagtttttttttttatcactaactccgtgatcaatggagtacttagctaaattacaagcaacataatttgcctttcgaaaatctaaacgaaaactcgagagcaatatttttttatatcccagatgacaccctacatccaaactagaaagaagagagtcgatgccacaattatgttcaaccataaacttgttacattgaagctgagagctaagctgttatcctcctttattaccataatgtccgcagtaataggatcaaaaggccttagcaaaattttagttttggcacccaaacacacttcattttcatccttttacactccaacaattaccatcaacacctcgaccgacatcaacattaattttttagatacactcaaatagaggacgccacttggctgcttcccttcttcttttatctgtctttgtagttggcaaccctgaaattattgttgtagtggagcattcgattctcccctactttccaattgttcctcaaataccaacgctgccaggatattgtcacaaagagctcgaattcttcctttacaagatcagaaaaagtagaggatcgacttccatacattctttaatgagcctctagaatctaagagattttcaatatttagaattagcatgacatcttcaaattgcatgaacccagtcctctgggatggttagttggaggccaattgtggcatagtttccataaaaactctcaaattccaaatagacatccacaacacaaggactttgttttcttagtatctgaagtctcagttgaaatattctgtcccatggtaactttgtaaccacttcttgctctatatttcccattctttgtgtagtgccaaatcagttttatcttttacagaactatcactactcgacaaacccaatatttatgaaatataaataaattaaaattttaaacttatctaatatttacttgttaatttgttatacctatatttcaagctactagattgatgttacgtgaaatgcacatataattagttttagttttttttttttaattcagtggtgttaaatgcagaattttttttgggaaatttgaaattatat

SEQ ID NO: 296466 - DNA, 1204 bp, Cannabis indica
tactagtaaaagtgacatttcttagtgatataataatttatgtagttgactatacacgtacaatgttatttttcactacactatctagttttatgacaaggaattaatataaatattgattcaatactctttttgtaaggtattttgtcaatataattatttatagaactatatgatggaggcaggttgggacgttcacgaggtccaacaagggcgccactcatcatgcagcgcgcgtcttacgcggcgcacacacgtgacgcgatctcatgtcatgtttatcaaagatatatattacaattatgaaataagccccacaccatcacatgatcaacatgtgtgttcctgctattggacagccagatatatataatcttcagtgttttttatacagttctacactccaaaccaaaatctatattcagctaagaatttcatcttacgcaacttttacaatttgctttatattccatcctatccttacttttcttaggtttatgacttcggcccacctttaactctaagtaacaattaattagaagaaaaaagaatcttgtctttgagatatttaaatcaaattacgtactaaaacaattaatagagtttgtttaacgtttctcattttgtttcacgttaataatgttgtcatggacagaacactatttcatagacagtaattactatctattctatattatataacagtttgcatgcagtggatgctatattatatatatatgaaattcttttttcatttatctactatccacatatattctggccgccaaacgtaaactatatatatccacatgtaacctttttcttccaataaatatgctgagctacgaattaataataaactatatgtaccatatactagactaaactaaatgagatccttatatatgacatatagcatatatatgcagatataattagcactgtagcttgtattatagcttcacgtgaaaataggagaaaattaaggaatatgattccatcctatcaagagttaaaagttctagggaggaactcgttgtaagacagcgaaagagagatcttatatattattatatctgtcgctcaccaaaaaaagcttttgtgtttttaattagtatttaaaatgttgttataattttttttttgagtcaaaatgttgttataattttaattttattatatgtataatttataatttttgtta

SEQ ID NO: 296467 - DNA, 2556 bp, Cannabis indica
tagctgttgactggtgagtaagtaccggttctgcaacagctactggtttggaggatgatttggctcggctgaaatcatggtaaaacccagtggtataggttattatggaggagctaaggcgtgatttcccaccatgaaacactttgtttatgtttgtccaaataccccataacaaacagatgaagagctcaaagtcctcttgattatataccctcgaaagatattgcagatagtctccccataacgcaatatttatttttgtggtaaaaaatttataacaatttttagtatatatcaaattttacacatttttatatttgtattggagtataattttgttggaaatctgttacaaaacaaaataataacactatttttataacaatccattagagatgatggtagtaaagctaaaaattaaaagcttatataaaactactataaacataaaatatcaattgcattaaccaataagagaaagccaggtgacacccttttctcactctttcaattgtccaaatatttactttaatctactctttttatttgtttcataaacattactatatatacaccactctcaaattaaaaggggaagtcacgttttttttttcagtcccataaaattctgaaactgtgaaaaaatttgaccacttttgttgagtactccttatgtttttatttacctttattattactttggcatgaaatttaatccttctaaatatccatagaaactgaaaatttgagggtggctcaccatgcatgcttctaatcattaccatttataaaaacattaaaaggttaggtgaaattataagccatctattaatgcttccccactaacattatatacacattataatatatatatataacattctatattatgaaacttattattttgtcttctccttaattttacttaaaactcaaaagtcaaaaccaaattttccacagaactcaaaaaaagggttaaaaatactcacgttgaaaggtgaaatgaaagtttgtcaatgtcatttttggctaaaattcttggtcaagaacacgttgtattggtgaggcatcactattggataaagacagcaaaattgggctacctcttagctgccttgccaggtgagttgattaatcaaataggccttgctttgcatttaagattatcccctatcaatcaaatcattgtgtgttttacagcaattataatattcttatatacttcaattaatttctgttaactatgccaagtatatttttaccctaaaactaaaacaaaccaatattcagttaggttggtttggttggttaatgcttacacctactcttagactacaacaaaacaaaattcattgggttcgttggttgattttgatttgctcttcccttcccataagggtaaattaaagacaattttgttccaatgatggcaaaaactaaaaatatacataataaacctttaactatataaataatgcctcgtataaacttcctatacgagtatgctttaaaataaagtgaaaaaaaagagagagagaaaatgaaattatttacaagaagaagaatataaataaagaacaagtggtatctcaaaaattaaaagtatttttattatttttgagaaataatattcttgagtgtgactgttatggattaagttggccttttcaattttcaaatcgactaagagttaaaagatgtcacatgaattcatttaacttacattaagaaatgacaaacaagagaagaagtagttattgattagatttgaaattggagaaaatcttgtacattgtatggtgaagaagatttcaagtcatgtcaactctcaaagtctcaataaaactcaaaactcccttcccttgcacttgtctcaacttttttttttctttatacatttgggaattgaattttattaattattaacccaaacattcatattagacagataaattcgcatcatttatttctgagaaaaaacatatacattttttttctttctgacaacctaaaatttcccctaaactagcttcctgcggcagaatcgaaggtatcttctaacggctatcttcttatagccgttggtatttattatttatagccgttactccaacaaagaataagacaagatctgtacttaattacacatataattattagcattattattattattattattattattaaattaatgaaaatgattttaacaaattcacatcccaaggttggccactttaaggaatttgctctatataacacaactccgaaacattgaaaagaaagtaaaataaataaataaatagaattgttgtaataattaacatgaagtaaaaagaaaaatgctaagaagaaaattacaataaaaggagttttcacagaaacgttttagttacaaacctgtttaagaggggaggtaatttccctgcctaaaatcagctaaggttctttttactaatgaaacaaacaaactgactgactttttagaatacaccaaatccaaacacccttatatatatattatatatatatatataataaatataaatatagaag

SEQ ID NO: 296468 - DNA, 13871 bp, Cannabis indica
ttcctttttgcatattctctgtctcttagcttgaaagttggttcatttcacctctttaatctatgtgcttattactattggaatttggaactagggaaaaggatgtagatatcacattcgcccaagatgccattgatgagtacaaggtattgtttgtttggtcatttaatttttgatgtattatagggactagaactatcatctctcacacacactcacccaatcacttgagccagcctcaagtggttgtttggtttggtaataatggtaaaccattttttttgaacgagtaataagggtgaatttttatttatttatttattttgtggcaagttaatggtaaacttaaccatacgtgattcttatcatttatcaattgcaatctggtctcccctgttacatgtaatattctgatttcgggctaccagtgaatcagtgatttgtcaattaattagtcattcttgaaatgtgttgcaacatagagtctacaatgctgatctttttatcatttttttttttgaaatgagaccatatcaaattaatttgaactattacatcaaaaattaggaagaagtcctaattaataagaagaaaaaaaaattacagatggtataatagagacaataatacataggattttaagggcatataacaagccataattgtaagtaatatttccattttctatgaaggtttaagaacagaatatttttgaatcctcaacatttaaaagccaagttgccatcaaatgtctacctctatcccaaagggtctctgcatttgtttcaatttcatcaaaaatcatattgtttctttcaagtcaaagagaccacaaaatagcctctgcctttgtagtccataacacttccattgctgtgttatctttattaataggctgctccatttccatatacataggccttatttctccccttaaaatttccaatcctatgcttcatttccagtttgatttgtacacaaatttccaaaaaactaaattatacccttttaagtcttctccccctttccataagagctttctcatcaacttcccaattagtaaataggaagggaagaaagttcaaaggattaattggttgagagttagtcttcctccccttgaaatagaagcacctttccaaccgacaagctttttggtggtcacctttgccacaactggttctcagtaaagctttcttggattgtcctctaaaaggcatacccaagtaagcactataccaattaattctcaaccttgaaatcgcactaaacgaattcagtttgttaatcatgatcgtaatatgatacgctccacctgtggtttagtagtaggatagtataatacaagaaccaacaaagaaataacaagaacagaaagaatctatgagaattttattgaattaggctagaaggaacctcatacatttgagagatttgcttctctctatgatgcgatgcttaatttatgaatacatgcatgataaaaatcccttaaactcccatgttatattctcctctctaattaactcaacaaataccaaaatacccttcccactaacaatgcatctttgtccaaaacaaactgcccctagctccctttcttatgcctaccatatgtgaagttaatcaaggttctaacattacagccgccaccttttcctcaaggtgaaactctagaaattgtctatggatctccttaaagtgttcctaggtagctttatagagtggcaagccccttcatttgagcaacaacttcatgtcttgagtcgtgctagagtggctacaacacacctataacacaccctttgactgcacttgcaacttgaggtttgctatcaattgaggtggaatagtgggcgaggaatgagttgggcctttagcagttgctttgctaggtaattccaaatgggaagcaatggggtcgatatgcctcaagaccttgaaatgactatagtagcgtgcatccaatttttcattcttgcagacaaccaacgtctcttgccggtaaagatgtagcttgatgaaaactaaatccccaacctaaaactccacattgccaatttcctcttctggtgagcgtgaagtagatgcatcttcaaattatcaaggaaaatatcgcgttcctcgacccattgatcaatcacaagaacagtagtggatcctagtgagaaatgatctattggtggaggatcatgaccaaacaatactttaaacggtgtattacactcgagagaggtgtggaagctagtgttgtactaatatttgcctgcggaagctgcttggcccaaaccctgggtttggttagaagcaaaaaatgggggtatgtctccaaacaaaggttaatgacttttgcttgtccatcggtctccggatggtagcagtgctatgatggagctcaatacctttgagtttaaacaactccgcccaaaagtggcttaggaaaactttgtcctagtgagaagttgagcggggaatgccatagagcttaaacacatttttgaagaaagcattagccatcactcgagcattaaaaggttgcttaagaggaatttaatggctgtacttgctaaatgaattaccaccacaacgattgtatccaccccattcgagttcgtcagacctttaatgaagtccatggtcaaatcctacaagacttgatcaagcaacaagaggggttggattagcccaaagagtgacattgcctaatgtttgttgcgttgacacacatcacatcgagcgaaaaactctgtcatatttttttcatgcccacccagtaaacatcaatcgtctgtcgtttgtaggtttgagtctttctagaatgccactaatttataggcggtcaaaaactatggaataagggatgatgtggtagagatgacttgaagcttaagaaccttactgaaataagcgatggggcgattgttttgcattagatttgctttgatgccatacctcgacgcatttgtctccacctcaaaaaggctgagtaaagtttggaaaagtcaacactggtacgaaagtcgtggtgagtttcaatgtttcaaaggcatcaaagtctgcagttgctggggctatccaaccaagcagatccttttttatgtttgtttgtcaagggactagcaatcttcccataacctgtcactaatttctggtaatactccccaaaaccacaaaggtcacgcaaggacttaggcttgggttaatccaacattacttggactttactagggtcaactgagacgtttgtgcctaacataatatggcccaagtacccagtttggtgctgcttgaacaagctattcttcttattggcataaaggctttgagtggccaaggtcctcaacaccattgtcaaatgagacacgtgagtggagagatccgaactataaatcaagatgtcatcaaagaagaacacaaaatgttggagaaaaggcttgaacacttattcatgagagattggaatgtggcaggagcactatggaagaagcattaataagaccaaagggtatagccaagaacttgtaatgaccttcatgcgtttggaacattgttttttttgggcatcttccggtcaacctaagatttggtgatagctagtcttcaagtaagtgcatctttgaaaacactatagcaccgttcaattcatgaagaagttcctcaatacataggatcaaaaacttaatgaacaacttttccttgtgtaaggcgcgataatctatgcaaaaacaccaatgctaagattcgattggataattctaattgttgaaatcttgccaactaccttctcaatctcctcctcctaaatttggggggtagcggtaagaacggtcgctaaccagagaggtacctaagaatgattgaatggccatggaggcatttcaaacatgtactaattttggattggcctccaaatgatgataccaataatcttccgcagtactgtaaagttccacccaaacttcttaccttcctactgtcttatctcatgtagagatgggtcacatcacaaggttaccttcttcccatccattgttaatcacatgagttgcacttgccaatggtgataaatttcgcccacggtctctaagtcattgaatgcccaaaattacattagtgttaccaaataacattagtgttgccaaggggaagaagaagaaaataagtaatgacgtccaattcttacacagagaggtgaacttcttgacacattcctttgtttggagtttcctaaccaatccttatttggaccccatatgactccgtttgagccgtaggtagctgtaattgggcaaccaactcgaaagtaataaaataacttgggccccactatcaattaaaactggcaattgttgtccattaatactaccttaatgttccatggtcttcgacgaagcagccccaccacgaaactaagggccacttccacaagttgagtccccactttctattccctggccaaactcaacacttcttcaattgtcatttctagcttcgattccgcgatcacatcttgaatcaggataatttggagtttcagaaatttactttgatggccataagactacttgtcgtctcatatgaagcaaactccactaaacttattctccttaatcgattcatatgcctacaaaatttcgaggaatagtcgtgcgaagatggtgtttagagggctcaacagaagtctccttaaggccttgagaagagaagcctcctgatgaatgggcaagactaggactggttcatttactaggtgcaatacgatgagcctgtacgaaggcttggttggcctcaattgtttgagggccagctcccttgtcttctccagttttaggatacaaagtgaccctttcaagaatgatgtttccaaaagaggtttagatattgatcccaaggacaaagccaagcacttgaattggcgccattattcttgaacataagacaattgttgaagccctagacatctatcttacacagatccttcatgtgcaggacaaaatcgacatattaataaggactggagtttttcccaactctgaatctcatggtttgtgttctcccaacaaaatcaatgcaatggagccccttccaaacaaaggatcattgtttcaaattgctctgcaatactcaaatgctgaagaccaaagtaacagtcaactgggtaggcctgttgtccgggtctttactagggaaatgggcaactcaatcttctgaggacaacacttagatcgacaacaccctcgcctttgcgtgaagctccaccagtgctattttgctaatcccgaagacacttgcacacctcttgggctcttgcttctagacttttgtgatcgacaaccacctcgttagcaatgaaggcttggccgtttaacaccaaatccaacttctttgttgtttcagccaaactgtgctcgtgagcttgaacattctcttgcatgtgagaaattgtttagttgactgtagatattattcccttaatcggtgaaatagcccctttaacctgttcaacttgagaggcattcatcgaaatcgagtggtttcgataccaatttgatattctccttttgtcggttagtagtatagatggtataataccaacaaagaaataactggaacaaaagaaggttatgagagttttattgaaataggccagaagttaccccatatatttgagaggtttgcttctccatgatacactgctcgatttctaagcacattcatgattaaaatctctcactccaatgctacattttcctctctaactaatcaaatatcaaaatacccttcccactcacattatataacattacatgttcctctaactagtcaaatgaaaaaatactcctcccactaacattacatctttttccgaacaactcttccccctggctccctttcttactcttagcatacgtgaatttaatcaagagtctaaaactaaagtgaacagaagaaaggaggatagataccttgtaaatctttctcgtccactttatttatttccccaaaatctttcgtaagaagcacaaaatcttaaaaattccaatccatgaggttgtgctttttcaaagtcttatttaagcacccctcttatcctctttctttggttagccaccaacatttcttttagaattgctcctgaatttactaaaatgtgttctcaaccacttttttcaatcttgaggaaattgcatttgagattattttacaaagacttgttataagatcaatcaatttaatagtctttgatgcctacagtgtgagcaacaacattagattctataggaaccctcctaaacaaacagtttttaacagaaaaccaaacaacaacaaattgaaaagcacaagccaaagaccatctaggaggcttttttccacatggcctgcaccaacaaaaggcaatcagaaaacaaaacactatagtctccaaccgcagcctatcgaacaccttgatcccctcctaaagtgcaagcaactcctcttccaaagcttttagaatgtaaatcttcttagccactccatgaacaaaatcgtgggcaccaaatttgttaagaatacacaccaaaccttctctaattacatcctaatgatcttagaaaacatggtagcaagacaactgtggtaaggccatcaaggccaagaaacttatttgcatcatgcaaaatcgatattcttatttcttgttctttacacatctctctatccaatccaccataatttgggaaatacgtctctacttcacccatctaccacctacaaaacaaatctcctctacttaaaaagtttgttatagaaactaagatatgctttgatatcttcttctctggccaagatagaccgatccttcctctcaattttcaaaataaagtttttagatttccttgggctcattaaataatgaagccatttagtatttgcatcaatcttcctttgcccaaaggaacttggattttcgagaatccatcgctgatcttcgctaataggaggtgtttgttagaaaatcaattgcagaagaaatggagctaaaggtagttgaaggttccaagaggaactttgtatgtgcttctggttgattgtctaaagaatcctagaggattgctttggtgattgcttaaaattcaaggaggcatagtttcgaacattattgttctaggagaaagatcacactagggatgaaaggatatgtcgttttgcttgggaagaatattggaggcaaacaacgaaaggataaggaaaaagctttctcaggtttttgagaggcaccatttttatcctagctataaccaataaattgagaggtctcaattttctatttcttcttccatttagtctggcatggaatttgtctatccaatctgaatagaaaacttctgtcaactttctcatatctttttcatttttctttttttatttgaaaagaatctcctcgtcactagaaaaatcttctttgattagttatttctccccttatctcataaatgttttgctatacgccagcccaaattttttattcattttgtttctttgcatgaccaggaattattaaaattgatgctctatctcaattggagcaatgatacttctcatatgttgttttgaaatgcttacacaaataagctcatgaaaattttcatctcccttacctcaatcaactcatgcatcatctcttaagcccaaaataagcttggtttgcttggagattccaacaaaaccactgccaaagttgtcaatttaaacaacaaaaaatatgtccttgatgaaaacatatgattcacagagagataaagaaattcgtttaatccatcactcgcatgtccggttgtttctagttctacatgaccggatcaagcatcggtgggaaaactataaccaaaatctttttttatttagcagtaacttgaatcacatgcatctaacactctttttactaagatagatgtagttttacttgatgtcctgtcctataactccaatacctcttactagaaccatagcaagaagaggagccttgaatatgaatcttttccttgacccaaccaatgggatagaaaatgtgaatgtttatcatgtatgctcctcttatttgtgactacgcatgtcaagtgtttttagagctcttttcgtagtttacttcactggttgggttctgattctagtctacacacaaaaacaaattctcacccaagtaggaagtgtttctatatgttactaatgcttgtagtgtcatctatgagcaggcacgtgaggctgaaattgctgtacagggaaaattggtagatccccagcgcagaaagagcaaaggttagtatttctttggagtttaaaaacttgaatgatggtgtgatcaaattggaatggcctataaaagttccattggcattcttttctaataaagatgtacaaaagtaggtaaaatacattcattttgatgctcgtacatcactttgtgatcatgccatttcttgtttgatgacaatacttatttatttttcaaatgaaccaaagttttattaatatagaaatatgaaatataaaggacatgttagtactgtacaaggaaagataggcaaattttttgggtaatgtaaatactaactttatttaaatgtggtagtacatgctaagtgtgcacttattccatacgttggtttgctaactgtgcacttatttccatacattggtttgctaaactcagcttatttctactttaattatctttcaactatgcttttaagaattgtatatatgtccagaagttggtttgtcatttgcaagcaacaaacataatacttaacctttgagcattttttatctttagcaagtttacggaagcttgatgaacagcctgaatggttgaggggaggaaagctacgtgattatcagcttgagggtttaaattttcttgtcaataggtatgcctttttactcagaactgtttttttgaagattaagtgttactgtaaaaggattatcgtttggcagttatctgtttaaaatctatttctttctgcagttggcgaaatgatacaaatgtaattttagctgatgagatgggtcttggtaaaactgttcagtcagtatccatgcttgggtttttacaggtgtaaatgtgtttattttaaatttgaaattggaggtcatgagttttttctttagagttggaactgaggtcaaggttttgcttgttctctttacagaatgctcaacaaatccatgggccatttcttgttgttgtaccattatccacattgtcaaactgggcaaaggaatttaggaagtggcttcctgagatgaatattattgtatatgttggtactcgtgcaagtcgagaggtgagtcatgcttttccattgcatgtatgtcacacagacatataatgtaaatattctaatatcgtccccattatgtttccgagaaaaaatatttctagtaaaattggcttaatagttttctgttggatgcaggtttgtcagcagtatgaattctacaacaacaaaaatgttgggaggccaataaagtttaatgcattattgactacatatgaagtagttctgaaagataaagcagtcctttcaaagatcaagtggtgctatctgatggttgatgaagcgcacaggttaaaaaatagtgaagcacagctgtatacaaccctttcggtaggctaatcttggcaatcgaatttacaactacccattttattttccttttcaaatttagtttgtttaacattatttagtgctgtaattgacaggaatttagcaccaagaacaaattgttgataactggtactccattacagaacagtgtggaagagttgtggtaaatagtttctcttttccactgacagaaatataagcttttgcgtgtgttcccaattgttgttaattttttgtacatgcatgtaatttactcatttagcaaaataatccagcttctttggtgttgtatgggaataatttcccggcactgattgtgattttgatgagcacatagaccaaatcaagctgtttgacgagtttaaactctctttgcttagtttatttatttaatttatacacagaattccttttatcttttaaatttgcagaacctttgaattattaaatttgaatttcttatctcactctgaaaatatttggcatctttctttatttggatagtatgaagcagctactacagtttctagatatgctaaaattttgatggttggcaactgtttttgttagctgacatagtggaaacgtcatctggtgtctgaatattgtattaaaatatatttttttccctctttcttacaatatcgctaagtcttctattctcttgacctttattagatttttagttatcataatgtttgtgtttgaactagcttcaattcccagatgctgttcttctatgaattattcattatattttttttattatatattataatgggcataacataattgcagaattgcagcttatattgtaactgaaaataatatagaaaggagacgatggaaataaagaaaaaggaggggataaagtcccgaaagccttacttattgattatttgatttccagaaataaaataaactgtgtgtgtgcttatatatagatatagatatattatatatatggaaaatgagatttttcttatgtattattatgtcaggtatttcacttgcctgttttatacttctgcaatttttagaccagcatttcattaaccttattcgggtttctttggttccaaagaaacagcttgagaagtagatcttgagactgaaaattatattggaaagccgaatttatttttatgtggatgagggaaactttgcttagtttgtcatatgatttgcctttgtacttttgcttattggttttttgtattcaccttttgttcttatagggccctgcttcatttccttgatccagataagttcacgagtaaggatgattttgttcagaattataagaatcttagctcttttaatgagaatgaggtatacaacttatcttgcctagtcatcatagaatcattttgcttaggtagttaatactgatttcttttagctaattgtctataccctgaaatcaatatttgcatttgaatatgtatagcttgctaatcttcacacggaattaagacctcatattctccgaagagttattaaggatgtagagaaatctttgcctccaaaaattgagcgaattcttagggttgagatgtcaccacttcagaaacagtaagtcataccgtcgctttttaatcaggagtctctttgattaataccagtcaatttactctctctgcatgtctaatgccaatctatttcatttaggtactataagtggatattggaacgcaacttccatgatttgaacaaaggagttcgtgggaatcaggtatgtgtgttacaaatattcttagaaaaatttagtggtattatatgtctactctttgggtatgtttggttgggaggaatgaaaactcagaaataagaaagagaataggaataggaatagaataaaatatattataaataataaagttataattttttttcatcttgcattagaatggtctttcctcatttttttttaatggaattagtcattccaccatggtggtaaagccattccattgaaatggatttcaataccttaaaatgcaaccaaactaaagaaagaaatgaaagtcggctcctttccattccatttcattactagggctgagcatgggttgggttggccgggttgagggtattttaatgacccaacccaatgacatcggcctagagatttttaacccattcacattttaaattttttataatccaacccattactcttttcctggtgttcccttgaggtacttaggaattcggtagacaacatccatatgttcctcttaaggggttattgaggaattggctaacaacacaaagcactgaattagttttctcacaaggcattggtacctttctgtatcaacttttattccatttgtctgtgctccacgtttggtattgaggtccataggtgtgtcaacatgtttgcatccaatcatccctatttcctgtaagaggtgaagggcatactttctttgattgactaagattccttggctggatcttgctccttccatccctaagaagtttcttaatttccctagatccttaatcttaaattcactggaaaggagttgcttgagatgagtaatttcctccatcaaatttcttgtaaccacaatatcattgacataaactattaaaactattatcctttcacttgtcgagtgctttagaaacaaagtgtgatcagactggcattaagtgtagccatcacccttgagaaccttagtaaacctctcaaatcaggctcgagggaattgcttgaggccgtagagagatttcttgagtgtgcacaccttccttttgtgaatctatcctcaaatcctggaggaatgtctatgtaaacttcttccacaaggtcgccgttaagaaatgggttctttatatcatgctggaacaaaggccattctttgtttacaacagtagacaagagaacccagatagtatttaacttagaaactggagaaaatctctcttgataatcaataccataggattgggtaaatcctttggcaactaagcgggtcttgaatctttcaattgttccgtcatcctcatgtttgattgagaagatccatttgcacccaattgtgcgtttgccaagaggaagatctgtaatgatccatgtttcattcttttcaagtgctctaagctcttccattgaggtatccttccattaaggaatctgaatgacttcttagaacgaactgggaatttgaacttggtccaaggaggtgataaaagctctatatgtaggagataagcttgagtaactcagatggttgcgaatggggcattgagtgcaagaacagaccccttttctatgagtaatggaaatgctaagattgtctggcacattttcttctataataggctcaggtctaacatcttctcgtgtttgttcaaggatgaatcagattaaattagattattgaccttgttgagtcgcataatggcttgttcaatgcttgctggttgctttttttttcttgtgtaaacatggacttttttgcttgggatatggaaagggcttgaagggatttttttcttcttggctcatttgactcaattgaatggtgaggttggacctctttgcttggaatatggataggatttggagagattggatgaggagttcttggctcatgttagtcaactgatagtttggagcatcagaaacaggagttggtgacgtttcttgaaaaatggtgctgcgagtagttaaaggataattagaagtatagtcaatgagagaaagaaagtcccaattttgtagttcatgattatggctctccccctgaattacataattggtgtaataagattgttcttcaaagaaagtgacatccatggagtggaacaactttttggaaagaaggcagtagcatttgtagccttttttatcggattagtagccaagtaaaatacatttggtggtgcgtgcatcaagttttcttcgatgtgaggaatggacatgaacaaaagcaacacaaccaaagacgtgaaggggaatttaagatacaagatgtgagtgagggtatgatttaaggaggacttgcagcggtgttttgaattttaagacctgtgaccacattctgattatgagatatgtggcaatgaggactacttcaccctagaatctttttgaaacatgagatgaaaaaagtaaggagcgagctatctcaagaagatgacaatttttgcgttcggccacgccatttttttttttgaaaaagagaaagggacctcttgtct

SEQ ID NO: 296469 - DNA, 5223 bp, Cannabis indica
aaatctaaatcctggtaaaatatattccaacagtggcatcattcccaattctccaatggagtccaactttgagaagagattttccccaatgtagacttttccagacatacgagggggagtgtccaagcggagcttcaagaaaagaagacctggggaagtatttggatttaaaaagagtggctagaagagaggtttggtttgcttggattctccaagcttgtttggcaagcatggcctgtttgtaaggttttagggatctaaatcctagtcccgcatgagacttggagttgcaaagggcccgccaatttttccagtgaattttttgttcacaattattcgatctccacaaaaatttggccattttttatcaacaaagttgcaaaaagaagttggaagtttgaagatagacatggcatagatagggatagcctgaatgacaactttaagtagaatttccttgcctcttttgtagagaaattttccttgccatttggaaagataagaccgaattatatccttgatgggattgaaagagtggtcattggatctgccaatacactaaggtaatccaagatacatgtcaagatgattaggggagggaattttcatataatcctagatgagagtttggtaggtaaggctggtattggaggagaaaaagatggaagatttcttgaaattcaccaactggcctgagatacttccatacttggccagagcctctttgatagcattgtaatcctagatgttagaccgacaaaataaaatgttatcatcagcaaaaagaagatgtgaaatttctagggtagttcgagcaatctttaaaccaaaagttgtttttgtgcttttagattgcttaagaatagaagatagacctccagaacaaaggagaaaaaggtatggtgaggggggattcccttggcagagccctctagaaggaatggcattcctaagggcatgaccattgatgttgaacttaaagtaagaagttgacaggcatgtcatgattaaagagacaaacttataagggaaaccaaatttcaacataatcttattaagaaaattccatttaactctgtcaaaagccttggccatgtccaacttgactgtcatccatcaattcttgcctttttttctacatttgatggagtggagaatttcttgagccatgagaatattgttatagatgagtctgcctttgaggaaggcactttggttggggtaaatgagagggtttaagattgacttgatcctattagccaagacttttgaaattattttatagacagtagtaaaaaggctgataaggcgatagtctttgagggtggagggatttttaactttggggataaggtaatgagagtggaattgaagtgagttatatcaaattggttatttagaaagttgagagctgcctcagttacagcctgccccacaacatgccaattttttttaataaaattgattgttgaaaccattaattcctagggacttgtcaggggccattcgaaataaggctttcttaacttctagaagagaaaaagcctcctccaggatctggcagatattagaattgagatggggaaaaactccagttaaggcatcattaatagctccatcatcaagagtgagagagttaatatgattggcgctttttctattagaagcaaatttgtggaaaaatcgagtattcttgtctcctggatggagccaatgaattcaagatctttgcttccaataggtttcctccttgtagaggagattgtctaaattttcctgcaaacctctcttaagatgaagggctgcaggagagtcatcctaagagtttctggcctgttcgacctctttctgagctttctttattttcagttgaaaacataagaaagttttgtgcttccactttgaaaggtaatcagcacaggcactttgggtaaagataaggctctggattggtgaagcagggaggggtctgacatccatgcttttgagatcacatcatcccaatttagttcagtgagccaaacattttcaaacaagaatcttctgttcttaagggcatgattagtaggatggtgttggggcttaagaagcaactggatggccctatgatctgaaccagagaaatcaagatggtttaaactactgctagtgtgattaagatgccaatatgtgttccctatagcccaatataacctttctttgatgtttctaatcctaggatgattgttatcccagatcattcaaggtccaaaggggtctaagacttctaactaaaaattctcaataaattgtcgaaaatggttagagggtctatttctactgtttccattatttttatcgttccaagttaagaaatcattaaaattaatcagggtaacaaagtgaacaaatggccaagcctggtaagaattttctaggtattgagatgattaataatattggaggcaccataaaaagcagtaaaattaaaaccaaaataatcagcacacgagatataatcgtgaatatgattaatagaaaaactagtaaaaagtacattcaagtctgagttccaaaaaagcaaaagtctcccacctaatcctactctagggacttcaaaaccaaaatcaagacccaacttagtcctaacacgattacacgaaaccttacaaagtttggactccaaaacaaaaagaagagacgacttatacattttaaccagaagggagagatttaggaatgtttgatcacttccaagatctcgagcattccaactgatgagattcatgagtcttggcaggcctgtgtgtccacagtgcctgcctcatcactggaggccacttccaccacgtcatgacatggttgaggcctatgtctctttagcatttctctctgctcatttccaacagtagtcaaatgtctcttgaaacctgatgagctagcaagttgattctttcttgttagggcacaacggggcgggccatcattactgcgaacagcaaaagtgaagggattggggagtcttgcagtgtggagggatagctggttctcggcgatgtggttagaagacgagatcatcaagggagcatttagctggctaggggatggggaagttgagcttcgcgagccaggggtagaggattgttggggggaaacagaacatgaaatggaacctccagtagcaactgacatgagggcagtaaaagtgggaccaaggggacttgaacatgtgggtttaaggggtagtaggcaacgtagcaataaggaaaatttttgggctagtgttaaggtttggggctgtgtgtgatgacagaaataggcaagcagtattagtgtaatctcctatagtatgttgaaaagagacgtcctgttgtaggacttggccacgggggtgggtaacgttgaccagattgatgacattgggattcggcattggtttatctgagatggagatggtaaagtagacagatttcagggctggttcgggatcaataggggtccaaaagggccatgatttgggcgtgtagctcctcttaaaacattctcataggggagtggtggtggaagggttgactcatcagaggctctcatatactcggtgcaaccagtataggagtgtctaaggcggccacgatggtaacagtggttaggaagatcttcatatttcaactccaaccaagtaggtgaagccataccggggaaaaggatagggatccctcgagggaggggtttggtgacatcaaacataattcagactctaaggtaagacccccaagtctccaacagggaaggctaatgaacttctaaaagagtgcttgtaatttggcccaccagtctggcaagggagacaaaccttcgagaaaagggtatgttatggatttggacccagaaatgggatttttctcatagattcagggataaggacattatcgtggttagggatttttagtaagacaggacatttatcaaatatccaaggctggttgagaatggctgtgggtttgtatacgtcgtaatggaaagcagccaaataaaggttcaaatttggtgctctttccttgacactaattgggaaacgtcccttccagtatttttttaggaaattcttcagagcactatggttaaaaaattttgtggtctaaagagtaaccatgagatgaaataggggtggggctggtggaagtccctcatttgggtcagcatgatcggtgagagaatggacagtattttcaattttacttaggtggagggctgtagaaaaagagcgagctaagttttccattttaagcaaaacataatctaacatggaggcagtacgttgaaaaaaacacatgatgaacaaaattatttacagtttagtacttaaatagaaaaaactataaacaacagtaaagaaaggagaagtaatggttctcacttctcgaagtacactcgagcaccaaatatggaaagaaaggatataattaataaccagattaggcgggggattacccaaatcaaactcgtgactaggctggtagacaccacaattaaacttcaaaaccctatttaaatctgaaaagacattcgtaattaaatacagatagggttcatcattagagatgttctgaaacgagatcaaacttgcaaagatctcattaatgttgctccatgcttgcttcaatctcctatataagcaagacgtggagtggagacggttgaatgtcattcgacataaatgctaaaccaccacaatacaaagatgggtgaagaaaagacctagagaaacaaaaaagtagataatcatgatgatgcctgaagtttgagtaggtaggcgaagagatccttgatgaaagtatgcttgttgaagatgaagggtattctcgagagtgtgatcttaaagagaaaaataaaagttattgatagttgtatcttaaatgcatctagtttggttctcgtttcatatattccctatgagaaatgctaaagggcacgagtggtgcttagcatcctcctatccgtcaatatcgttattggtccaattaagtatcgggtcccatataatttagggtaaatggcggcaaaacccctaatactttcgttttggtttcattaaacccccacaacccaaatttctgcgggtaaacccccaatactcgggttctgttaccaatttaacacttccgtctaaatttatctgttaattgctaggttggattgtccacgtggacacaatatacacgtggcacaatttaattggtccac

SEQ ID NO: 296470 - DNA, 1381 bp, Cannabis indica
aaaaaaatattataagactaatttaatatagtaaatttgtagcaactcgtatttctgttctattgacctttacaaagtaagcatgaataacatttgagatttcatgaagtatgaaatagtattgcaaccatagtattaatttggtgaaaccattaatttaacaaaaggcatgcccctatttgtatttaattctacttactattgtcattgtttataatgttttaaaataaagtatgaattcatcaaacaggtggatgtccaagcttacaacataatgtatcaatgttgtattattgtcattgctagaaaattattataagatgtatttatctattgttgttcatttttcaagttagaaagcacaaactttaccagaacgctagttttgtgattgcacatgatggtttcacagtacatgatcttgtctcatataatttaaggtacttaaaaaattctttccaatttatttgtatattcatctaaaatttatcatgttctctaatttttggttttgtagcataataatgctaaagaaggtggtaatggtggaagcaacgataacttgagcttgaattgtgattatgaaggtaggtccaatgttgcttcttacttgaattctttggtgattaattcatgctttaaacatgaaagaccgatgacaattccattaaatctttatgctctcagaaaatgacaattttcatcttgctttgataatatcttcggtaaattaaattattatccaaattcatctgtgttgcgtaagagtgattttttttcatgtctcatttttggtgttattgtttaaggaaatatgactagagaacatcgatgatgcttatggggatgaatatgcacacactcactacagaaataagaatttatgatagcttaccttttgactgggaaaacaactataagttttcaaatattcctgaggtactttgtcaccctatttgttgttttgattttgaaaaatgataaatattataaaattttgataacctttctttttgtctctctcactctcaccactttgtcttacaaatagaatttacatacaacatctttcatgcataccaagatgatagtgaatatatgttaacttgtcatattgcaatttgatgttttctcttctcttatatgttttgttgttttgttgtttttttagaaagatcttgttgtctatgaaatgaatgttcgtgcatttacagctgatgaatccagcgggttggagccagacatacgcggaagctaccttggtgtgattgagaaggtaactctttcttatattgaagttagtcactcattatctagtaaactcattagaagaatctatatagttttatttttaagttacaaattcatcaaattgagaact

SEQ ID NO: 296471 - DNA, 14625 bp, Cannabis indica
tttcattactctaaccaaacgccaccttagttctttcattaatcttcttatctataagatctcacacatatcgtgagccacaactctgaattcagcttcagcactacttcaagccacaactctgaattcagcttcagcactacttctagccaccatatttcgcttcttgttgcgccatgtaactaagttaccaccaacaaacgtgcagtaaccaaaggtaaatcttcgatctactagttcccatcccaatcaacatcaatataggcttcaatcttcaaatgtctttgagctttaaacaagagacatttcccaagtgttccttttaggtagcttaggattttagacagcatcaaaatgatctggacatggtgaatgcataaaatggctcacctgtgtccatgaaaacgcaatatcagggtgtgtctgtgagagataaataagtcttcaaactaatctttgataatgctcccgatatttagcatggaccacttttgtaggttttagcttgacattggattcagtaagagtttcagcatcaagtcaagcacatacttctgttgactcacaaaaatacttactttggatctacaaattccatcccaataaaatatttaagaactcctaggtctttagtttagaattcttcaccaagcttaactttcaacctttctaattcacaaacatcatcaccagttagcacaatgtcatctacatacatgattataatagctacctttccatcattcgaatgcttgtagaacatagtgtgattaacttgacgttgtatggtatccttgaagtttcaaaaccttgccaaatcttttgaaccatgctctaggggactgcttaaggccatacaaggatttctttagtttgcaaatgttcccaaatccaaagtgttattcaaatcccagtggaggactcatgtacacttcttcttcaagatctccattaaggaatgcattcttcacatctagttggcataaaggccaattaaaattgactactaaagacaacaatacacgaataaagttgacttttgctacaggagcaaatgttttttgatagtctaccccataggtttgagtgaatccttttgctacaagcctaactttgtgtctttcaatacttccattagtgtttctttttattgtaaacatccatttacaactaacaatttttatccattttggtaacttaacaatctcccaagttctatttttcctcaaagcatgcatttcctcagacattgcttggttccaacttggttcacccagtacttcccatatgtttctaggcacaacaagttatgaaatattagtagtaaatgttttatatgtttcagatagacgattgtatgagatgtgtttggcaaaaagttatctagtacacgcatgggttctttttctaagagcaataggaagatcatcataaccagatgcaactgggattgattcaaatgcaactgggattaattcagcaataggtttagtgtgaacaactctaggatttacattaaattgagaagaaagcaaagtagtgctaataggaggtgaatcagtagtaggaatagaaagagaattaccttgagtacttgttgaaccatcattcagggcatgcgattggtcttgtgcaaggatgatttagtgatctttatttttctcaaagataattttccttaaataaaccacacgctcaaggttattgcaatttttaatcaatcgtagtatttattttcctgacaaaccaagctcagattcagaattagcaagttagggcagagtcttttctattgaaacattaagaatagtgtttggtaaaggctcactaatttcccaaaaatttatttatactatattctctcctaaattaaatatttgtataaatatggagtattctccaagaaagaaacatccatagtagtataaacaggtttggtgataggatttaaacatttattgcatttactattaagaggataaccctaaaaaatacatttctcagaacagatctaacttggacctagatcattttgtctcatgaacaaggtatataagagtcaaaaaggttataagaattggtcatgtgatctgaagctctggaatctattatccatagaatagatgatatctgaaaacaatttaaagtatttatttcattacttgtatgtacaatagagacattaggaatatcatatgagttcaagttcgttttcaacaatgcatgatggatctgctgccttcccttatctcaccacatttgagattcaactcaaatatctgggattggctctctaaattagagtatatctaagttactttttcccaaagttcctttgctgtaaaacaacacatatagttagaactgatttcctccatggaattcaaaagccatgccatcacaattgaattctcaacatcccaagtcttgtatgtcagatcctcctctattggcttcttcttctcacttgtcaagtacctcatttttccatgaccacgcatgtaactctgtaccaattgtgaccatttgaagaagttatcaccattcaacccaatggcggtgatttggatagggtgagaatcaaaaggaatgattttggttggaacaatagctgaaaaaagtggtaggtgtgactagaacagtgtagatttggctggaatgtttattgattaatttgaggcatcacacatggtgaagaaggagaagaaaacgattatggttagggttagaaggcagctgactctaatactaagaagattaaggtaaaagtattttctctgatattttaatctatacacaaaatagtatatatatatatagcttacatgagtccctatataaagaaacaaaataaatagagatataatgagattatgcctattatctactttcctagaatagtgatatgtttccttagtaaataagattctcctataatattatatatgtacgcaacggggtgatgtagtgttgctccaacactggtatcgctacaatagggagtaacgtacaatattactagaagtatttttaagaatagaattacacattgatgacacttgacgtttacctagattgtaactatatcaatgctagagcagaactacatcaaaagtctataaatgtgtgtaaaatgataatcaagaactgaattgataattgtttctatagaaaagcttacgtggtgtttcttcagacacaacaatggccaaaggtcctgccaaatctccacatccaccaatgttcgatacatctatgtcatggaaagaccaccattctggattgcccctattcagaaaaagttctccactgaccaaatcaacctgaatattattcagatatagtatataattatgataagttcttggaggtagatctatagtcaaactaaattagattacgtaataatatcagaacatacataccgcattttcaagaaatctcacttcgcctgagccagtgaccctgaagtatcttggatataagttacgtattgtgaagctattggcagtaccatttaagactttccttacttctgatgatttaggaagatcctgatcttgaacagttagttcatatttcactatttcttttccttttggcctgtccctagtaaatttccaagagaagacaatgtccatgcttctctgaagagaattcatgtatctggcctgaacaacgggagggacaagccataaggaacttgcatcagcttggcagcatatcaattgaatatcttgctcattgtatgtactcagataattatgtgtatctaacttagtatttgtgtcgagtttgctccaagatatcttttcacacaaagtagtttcgaataatgtcagccttccactgattgtttttatttcgatttgcacactggcatctttaatggggtttgctatgtttgtggggtttccactgctgtacatctgttaagaattatattcaaacaaatgaatttaagggtacaattaattgggtgtattaaaaacatacaaatgagaaaacgaaaaagttgattaaaaaaataattaatatgaattggaatggccttcttcttattggaaggaatagtcatgccatcaaaatgataaaaagtcattctattcgaattgctcataatttgcaaccaaacaaaagagtagaatgaaaaaaaaaaattatttccacgacctcaaccaaacataggttattgagatgatttgatcttggtgtatttaattttgagctgaaggaccatgtatatttgacaaagaaaggaagcaacctcaaaaggaatatgaaagcatgtatcaacaaattttatggaaatatgatgtcttctaggattcttaccagcataggagcccatataacacatattaataccaaaaataagcaaattccattgcagaattttgtcattttggattgcctttgcccttgttgatggctggctctattgagttccacatcacactttacaaggaacaaacttccatgtatgtcctccaacttagagaaaaacacaaacgagatccgtaagtaataataacaccagttatgaaaatttcctaagaagaaaatgttgtagacttactttcaaccaatcatacatggtcaaagatgtagttgtgcaagaccaatcaagtacacatcgaagttcatagaggaatggaagagcgcgataacctcgaaaaccaataaaattaatttgtgaaatactactcgtcaaaaactgtctgtacaaagtgctcttgtttggcatcccaaaccgaatttgtatggcttgaagagccaaagaaatggcctttgttagatatacagcacgcaatgctaatcttccagcatattgatgcgatggctccatgttccaagcataccttgtgatagaataagtgaagagaacaatgttggaaagatagaagatcactttcccagtggcaaatgatcgaagataaattattcgatcaagcacaattaagaaaaagattgcctgcaaggtaaacatgtgcatttgatataattgtgccaaaagtactatactatgaacttttaaccaaaagaacttaccatcaaaataaatacaaactcttttgggaactggtcttctagctgataaacttcgagaaactcagtgttgttctttatgacagaattgtagaaaatggcaactaagaagaaaacagccaaatcggcacagaatgtgtaagcatataaatccacttcccttttcccaccaccaatcacagagagtattgggtatgggaatcgtatccaatcaagaattccatcatgttgagcttttaagatctcattagcaacatcagcagctggagttagtgatgtgtaccactctgctggtgttggactggattctaatgaaggagaggcatgcacaacctccaaaacaatcaaagcgacatcaacattttcctgcctactttcaatgctttgaactcgaacacgacttggtgagtggaagcggttcacatgtttttctttgcatctttgatcatgtaaaatcttaagcaacctattaattcctgattcaattttctctggctggatactatcagcaggccacaatgtaacttccaaagacagctgcacaaagtaaggtggagtttctgcttcttctgtaagtgatttccagtacctatgcaactttctgacaaactgtctactgacatctcttacagctaggaataatctttgtattctctgagggcaattgtatctctttacatgatcttgttggagatggttttttctcttactgaagctgaattctgtaaccatgtttccccaatcgttatcttttgttgttatggtggtttgtaaaagagtgaataaatacactaaaaaaaggggccagttgcttgtgacgaaagacgacacaattttgtcagccggaaatccaaattcttggagtaagcttacattaatggtaaacccacaatgctggataatgatttgatatagatactgaagtagtatgcagaactcagtataaataagcataacaacccaaaatatatgacttggaccggtgtttatacaaagagcatacaagaagagagccatgagatataccatggataacatactgaaattccataagaacacaatgataaagcagcagtaacaaacaacatcattatttgatctcatctgactccacatgtaacgtaaaatgataccgatttgggagtatgtagcatcagacatgatcttgtcactacttgatcgcactacatgagcagtttgttctgcttgttcattacatatgttctcagtttctgtttcataatacacctcatcctcagaagaatgctcatctgaatcttgtcccttgtgttctatgtttaagaaattaataagattatggactgccgaattcccaagggacttaactagagaaactccatcaccaataagatgaactgttgaaattatggggtttccccttgttttcaacttttccctacctcttccttctgaatccacaaggctatacaaatcagtggccttaaacttaagttgaggcatctcatgaagattatctatcatatcctttgaggattctgctaacaaactttcagctccttcacttgttggagattcaatcgtatcaaaatttgacaaagcatcagagctcaaactaaggtcttctctctttaactcattttctccacttccccatattccattcacactatgtgaacgcatggaggattttattctttgaacactttcacttcctggagaattgttaccacaattcccagaaatagtcatgctatcaagctggattttaaggttgagcatctctgacttcatcttttcaacttgcagatttctcaggcacttttgctcttgagatttacatatatgctgcaaatgttctttcttccaagcagctctcttctcctgctcatgcactatggcgccaatttgctctgcctcaaggtatttcgatacataatcaaactctttggatgaaaacatgtatgattgaagtgacactaacatgaatatgacaatttcaacaagagcagatcttgaagtgattcgaaaaccgtagtcatatttatagaatccaatcacctgactaatgtaatctgtggtatcgcatttcccttcagtggcgctccctatgaagggagattgataagctaaagagataacaattagaccaaagttatacattcttaagaacctgaagattttgttcttcttcttcaatatctcaagcctcattcggaaaaaaacaagtgcaaaaccaagatatccaaggtgaaggacatcgtactcgagggtcccagtgatcaaaatcaaaacaagaacaagatcaagtaagtgacaataaccgtagagcctaagaaagtcaagatatgtccataaaccttttgtttcaaatgagagatcacttaaaacagaggctttatagcaattaaatatcatttctctgtatatttgggatccatagggaatagacaaatggtcagaacgaagcttgaagcatgagaacatgaacacgacataatagcttataagaattctgggatcatcagctatggttcctgcacaacgtaacatagttgcaataattgtcttcacatcacattcataagctacgaaagagttaatgataatataattttaaggaaaaattaatgatgaacatgttaacttaaaaacttcatattttatacattcatattttacagcaaatccaaaacttcatattttatacattcataatatgggcatggtgggaacttaaaaacataccatattagtgtgtgtggaaaaatgcactaaaaggtaagtagttgttaagcatgcacatactaaagtgaacactaatggtttaaaagaatgttagggttttctagttgtgttcatgaagtatgtgcttgcctatagagcataaagaaaaatttcaattaacctgaatattaagacatttcttgagagggatacctagccagcacttttgacagaagctgtaatacacctcgaaagctctccaacagtcatggcagggcacttgtgcagcaggctgcttcccaacagataaattctgccaaagaaccaagtattcaatgatgacaatagaagcacacaggaacacaaaaacaggccacaatctctttataatacgtcgatgtaaaagaacacaagcagcaagtgaagcaatatacaacaaagagattgcatttaacactgcaaagctggcaagaagtagtactatcatgttcatctcaaggccaaagagattgaacatattctcaatccaaaacttcatatgtattctcaaactagtcttctgcatatcgagcctatcctttctcaaagaaagaatccttcttctattccacttacgactctctttggaactttcccaaaaatagttgtataagtatgcgttgttcataccatcagaagaccgtttttcaggaggcacaacgtttggcccttgaaaaagggaagagtttaaagatgaccaggtgtggcttgttagtttactttctgtttcattttttgttgcttcagtaaaggcaaacaaagtgcaaggctcatcccatttgcctctgtttccattgtcatgtggaattattttcatccaatgaaaaacattgtatcggagcacacatgcagcgattaccaaaactttgctccgcaagcctgattctataccaaagaatcctggcttgtacaactgcaatcccaaaaataatgacagataagagtgcttttgaccagggaacatttcagcctggttaccccacatctggaagagatattcaaccattgctaaaaatcctgaatacagtagtaatagtattgaaggagttctagaagtttttggtaacactgaacttatgaccagaccaagaagataaactaagccaaatgcgctcactggagaaactgatgcgtagaatgaggccagataaagaatcttctcactgtgccatatcagaagacgtttgataaacgagagtgctttcatttcaggcccatcaaagtcgttttctaaaaagttcttgttatgactcctctcatagctatatagttgcattacaaccaatatagctagtgattcccaaatattttctattgttgaagctttatttttataaccaaatgcagaatcaagatcgactatacttgacaaccatatctgaaagccagtgaagacactcatactatatatcaatacaaggactacaactgcataaactttcagaggaaaccaaagctgccatcttgtttttcccaaaatttgtcttccaatcaaccaaagtaagaggaagaatagatgaccaaatgaagtgtaattaggtattacaaggtatactgtaaaaagaatagtcgaaagggcaatgtaggttccccatgatcgatatgctgagagacacttttgtcccattgcactcaaataagatgttatctttctctctgaaaataacataccaaaatcattagataatttgcaggtttcgatctgctcagagtaacttatttatgtcgttttgagaataaacatagaatggaattataccattagaagaattgattcgatgatactccctagaagaacttagagacagaagaactgatttaatcaaaccagctctcaaaatgctaaacccaactggagggtagggagcacgttgcacaattgctgagaatgagaaaaccatgtcaaacccatgattgtgaatggaacagaagcatgcaagcaaagccattggtaggaattcgccactagtttggttaagaaggcctgaaataagcaagacataaaataatatgatcagttgaattattgatacaaaaaatattatgaatttggacagattaaattgtttacccaagtctgagagaatgtccataaaagatgagaatttctggttgaaggtcttggatactacatgaagttcaagaatgtacaatagagaaaaatgtgcctggcatagtagaattaaagaaatgcggagctttttaccaacggtatctcgtagtagatgaatcataaagaaaatcactgtggtataaagaaaaggttggcatcagtatatcagcaaaatttcatatcactaaacatagaagttgctctacgactacaagaaccaagaacaatattcaaaagaaatgatgcttccaggatataccaaaaaattgatgcaagtaacacaatcattgtacttactgtatacaacatgtatcatgccagattttgttgacatcagaagtaatagagctaacactataacacgagaagttttacgcagtccccatgcaattgtagcaacaatgaaaactatagtttcttctttccctaaaagtttgaacagaatacaatgtagtgttaaagtaaaatgagggaaagaataaaactgtattaaatataaaaatagacaaaggttgaactttcagttaaaaagtaagaaacaaactatctacatgacaaaaatgaaaaattttaaacaaagaaaagttaacatagtttccttacatcaccttctacattagaactttcaatcgtagatggtccttcttcatcagacaaataagagataacagaattgttaaccagatttcccatagcaacaaggacaccgagaccaaattgagccagtaaataaagccccggtgttgagtaatgccataagcctatggtttcccaaatcaccatgtcctgcatatattttcaaaacagatcaccataaaaaaataagtctggttccgaaaaacatgagaccaaagcatctgaggacaatgagtttaccttgtccaactccttgttaaaaaatgtaaatgccacattaaagacatatgtgctagcaccccaaaaaagaatgaaaacaagaagtgaaccattcagccggtgcaaatgaagcattggaggaaaagcatacagaacgtagccaacatatgcaagtaatccaaatgcacataaacttgcaaaatggaaactccaaaatgtgagagcaagcaaggttatctgaaattatataaattgcattaagcttccaaatgatgaatgtaaaaactatggtttgtatggataataatgtgagtttgttctaagatagaagtgagcataaaaataagaagaaaaagttcaaaagcaaataaaataatatggcatgcctaccggaaagccataagtgaaaaagttgatgctaaaagtacgaaagacagctctctgcaaaaatacattagtatgcctcactcctgatctgcatgacataaaaaaaataaacaagaataaaaccaacatttgttaataattagctcataacgaataagaactataaaacaattgagggagtacatctaacaaaacaatgaagatgatgagataaatgcaccttgacttgcgaataaaaacgaatgccttttaggaagaagctgctcggtcaagttgttttccccagtggatacaatgaaatccatttcttctaggtcacatctaatccaggatagctgtggaattaaaagaggaaagaaagtcacgctaagtattcgtgtaactataagtaagaatgataggaaccactagacttgtacacaaaatataagaacaaaccaacaagaaagattaagaagatgatgaaacctccctgagttttatcaaagacatagcaaaaacattataataagaaaatggtcagtatcctctccaaagagaaaatgctccactcaatacaaagtccatgatgtccttatcagccctcacactatctatatatacatatacaaacgtcttccctaactaactccgtaattataatacagtcccactaaccgcctaatacaatatgtcaaattagcccttaatgcttatttgacaggttgcctcactgagttactaaaaggtttaagtaaatgataagacctgaaccttctggtacagttaatagcaaagaatactagagcaatggtagaaaaaagatgaactcagtgtattatatgctgctactgcagcaagaaagtacgaaaatgggcctaggcaattcgagaggcctaggatctctccatgatgcaaatagagattcaatcaatacactgcataccctctaattttccttagtatcctatatatactattgtattctctcccaaacactacccttaatacaaagacccaaataccctttttattaaatctcatgtatcctattctactaacttggggtctatcagtaaaacattgatgatgaatacattatgtcaaacaaaatcgttacataccacactaccaaatccagaccaagcatacttgtgagtgagagaggtaactatttagacataacattggtagacaaataaagccaaacaaaacccttactataatatagaaaaggaaaagagacacaacagaacaaatttccgaccaggccgagtttgcagatattctaaatagaccaatgaaatcagcaaaccataaaagtttctctgaatattcaattggaagttggtaagcatacaacaagatgatgttgaagcctgcatacaacagaagatgcctccaccaccttcaaatccataaaataaataaacctcagtaaagtagtaactccttaatttggccaattagtaatgatcctccaaaaataataactttaaatgtgtaccggaagaggccgagaaaattgctcgttagagaccagtcgacaagaccaatagcactacatatgaaaaatggtaaagatatccaagaagggtgactgatacccacaattaattgtaatccaggcaacaataagcagcataaaaccctgacatgggaacctttccatgaagcaaatcagaaaatggccacaagttaataatatatctaattatttgaaaaccaaatcaactaatgtttaagtgcaaattacccttgctccatataaatgaaaagttgtactcaaattagtttatattattcataatgctgctagaggaacacaaaatcctaaagataaacttatgaacaatgcaagtggtcagatttttaaaggaaaagaatgttcaccaagtaatctaattactaacctataagtacagcagaagtgtcaaggcccctgaaataagagtttctccatggatccaaaccagacatactcccatggatttcacatagagcaacacaagcaacgagtacttggataaccacaaaatagacgatagatggagatatccaagattccacactgcagaaccatgccacttcagtttggagtttatgttcaaataaaagaaaaattaaaatcatgcctagcactgaaatttaaaaataaccaaaagaaaagaaaccattacttactgtaaaaatccaattaatctggcccagcaagtgtcaactacactccactgatcccccttaatagccaaaacaatatgaaatattgcttgtgaaagaataaccaacaaggaaaatatgatagcacaccatgttaccaaaggtttcctcaaatatcgagaacctggtatataaccttacatttagtcttaagaaacactggaaatacaaagaacatataatataagatgtaaatagcacaaacatatagacagcataataatgtcattttgttctgagtgaaaaaagcaagtcctcactcaagaaaattgagatttgacattgcaaaaagctgtgagcagcttaccaattttcggagcagcatattgaacgaagagaaaggctagcaaatcagcaagagatatcaaactccaacttagtaaagccgctgaatgaatcaaataaaagaaatgtcaatcaagtttaagaactacattattcactataatcatcttgaaacaaaaatgaaacttgtaagtaaacaaaggataaatttgaaactaatagaacaacaaaaatatacatatttcttttaataatctttacttaatttaactcacaaaactacctcaaatgatacattgtaaaatcttccaaataaaacatccttaaagcactaagaatcaaaaaagtaaaaaatgtagcaaaattctctatatttagaactacaagctgggattcttaccaaacaaaagcagcataggcaataggaacccactgagaaatctacccatttcagttcttgcaaacgtgttgaatcaaaagaaattctaaaatttttttttcaaaaaaccaagaggagaactacacgagcccgtttgagaaaaaccatgttgaagcataaagattgtgtataaacattaaaccaatcttgctttcttcctcaattgtattataacctcaatgtcccatctccagaaaagaacaaaggaatcattttttccttttcaaaagacaattaaactacctcgtactttggaaaacatagaagaaatgaagaggccgccaatattggaactttaaggtattgatacatgacaaatgtcagaagcattgtaaattcttcaaatgatggagatttcagatgcaaataaccgacttctacgcttatttgcatcaccaaaaaatatatatattcataataattatggtgcgtttggaaagccaatgtacagtagaacctctatatactctattgaagaataacttctaatttgttataaaataatcaaattccgatttaagccagttataaataagaataacctctaaattgt

SEQ ID NO: 296472 - DNA, 2368 bp, Cannabis indica
aatgtctatagtaaatccacgagtattcattcaatcatctaaataactattataactccaataacatcaataatttcatagctcaaataacttaataatttaaaattgttcaataacaaaagtgaaaaactaatagctaactcgtgtaacaatatgcaaaataatagctaacttgataacttattttattttttctataagaggaaagcttcataacttgtaaggtataacataatacgcttatgagttggtggaatgctgcattcctgatgtgcgtgatggtggtgcacgtcccttggtttgggtacagattggtagggaaatgttatggtacagcgaggtctcgacatctcttgtttggaaaaactttgttttttaacccctttttagggtttcgggtcaacttttcccatattccaacttttaaaaccctcatttttgtgtctctgaaagatctctttgcatcttacttgttcttactattttcctagttttatctactctttcttgtcgaagtttcgctatcacctttcggagtggttctagcactactgcttaacctccctaatggacgaatctttggctaatgctaccactaaagttgcattggacgaggtggtgaatatggtggaaaatgtggagatggatgacttttccctagaccttgttccaaatgactctgctgcgaaggacctcattcgtaggtctctggtggggaggctctttgtgaaatagaagataagcaatggtaggcttcgctccatcctctcagagttgacccggggtggtgccttcaggagattcaccccaaaacttatatctttcagttcaccaaggaagtagaggccctaaaaattgctagaattggcccatggttgccatgtggaggttttctccttttaacgatgatgtcagaggatggtaaatggacgtcggctgacctataacatgtgagaatttgggtaagagctcttaatgttccttatagatacttctcgaacaaaaatatgaaaaaggtagccaacagagtgggcaagtttattcttactaataaggctcgcattaatattggagagatttgcagtaacttcatgaggttttaggttagcctgaaccttgccaaacctcttctggcgggtgtggggcttgaggatgaagatggtaaaaaagtttggagttatttcaaggcttcccctattttgttataaatatggggtgattggtcacctggatgagatgtgctctgccaaaaaaacagatgatgattcttgatgatggacgtagtgtccccttgtatggtccttggctgaaattcaagtcccatttggaaaatggatttgcgattcttatggcagaagattactaggagaggattcaaatggaaactgaggttgttcccaatgcttcacctagttagatttgtgatttgcatggtggaaagttgatagcgggacatgtcattcaagacagtgagaactctttctccatttcgaatagtgggtcgggaaaacctaatattccttttggcaatgggttggatccttcatatgactaacctttcaaagttatattacgtgatatacagaactctacaaaagctttcaataaggctagggcccttttcttctcaacataagtaggctaggcccaataagtgggccttttttttagtttatattactttattcttcatcttcttcatagtaccccaccaccaatcaccattgaaactaccatccaccactctcatctgaatcatatatagcgaaaaaagaatctgaaattttcacaaagatcaaacctaaatatcacaaatttgaaacacaaacatcaacctccacaaaattgagcttgccctttccaaatttgagtttctcatgcaccatcatgtttgtatcaaaacgacgagaggagttggcttcgtccaccattaaaaccggcgagcaaggtcacccactgagctacgctcaaagcccataaactagagattccagatctgtaactcgacccactccatcgagcacaaatacctcccctcatggattgtacacacactagcaaccaccgtacgtcttcgacggacaacaaagatctcagatctgagatctccacaactccaaacacaaagaccatctgaaggagaccatctacgacctgcgcattttaatgagactccaaatgcatgaccaaactccgacgacgaccatggatgctagatgcacgaccaaacgatgacaacgactccttagccttgaggagagaggaggcacaattgggagaccatgaaaataaattcattgagaaaaaaaaattagtgtgagagagaaaataaaaataaattgttaatggtattttttttattttttaa

SEQ ID NO: 296473 - DNA, 4792 bp, Cannabis indica
cacaccttatattttaaaatatactgtaactctagtaattgcacaacttagtaattacacagttataccctaatagttgctaacactgaaatgttcttataagacgtcacttcgcacctaataccgtatggaagtggtgcattgtaaatggttagcgatattctataataattattacattaaattatttgagactcaatatttaatttcatcaatagcgatatagcaccttaagtggtattagacactgttggtatcttttagtaactattgaatttggaactataataataatttttagattattttttactcttaaaccctttttggtggccattcattccaattatggctgctatttcacataattgactgcaaaatcagtcttcataataccatttaataacaatattctttttctgttttcttaaccttaatctaaaattgtatctatctatattagataattgatgaaaaaaaaaaaaaagataaagagaaccaaatcgttttcacaaccaacaatatctacaaatgtactcaaaaacaattaattttttagtacttgaaagaaaataaaaataacaaataagaaaatggcattttttttcccaacaacccaataattaatcaagtaatggtgtacatgagcatagaataaaaactcccaccaatcaaagtagtaaaaccatccaagaatttatgagatagagatagaaattggaattggacccaaaaagaataataaatattctaggactttaatggaggaattcatcaattagaaaaaccatatcaaaatatttttggattatttcttatggattttttttgtgcttggtcccctcattactgttttgatttccttctcttgtttgagaatatatttatatatttggtgactttgacaagtaaaaattctcatcatcatctcattctcatgcaaataaataaaaataattaaaaaaaaaggttttttttgggctaatttgcaactgaaaaagggcaatagtggctggacttgctaaagattttagctttcccaaattttgtagtataatcaaacaagagaaatgctaaaaaacacttttttagtgtcatatatttatttattggtgcagttaaatattaagtctcatgaccaataacaatactcatccaataaaactatcactttatattaataatgaaagaaactaagataaatattagaatgaagaagcattaaatgccccatttgacttagaagtatatacatatatgtatgtgcatataaatatggcaatagaagaaaatgggcattgcttgtacaataatagtacacagctcatgctcataagaaagtctaaagcaatgaaatagacaccaaaatcccaccctctacctactaaagaaaccaataatttccatttttcattttcattttcttacaacggttcaattttcaaattctactagtataagtatatatgctttttactttattggattcaattttactttacaaaggaatattactactttactaagagtgagtggagatagagatagctcttgttacacctaaaatctttaattaactttgtcaaaatatgacaaggagtttaagcctaacacaaaaaaaattatgactaaacaaacaaatggtcaatttgaaaagcttaaaagaaaaaataaccaagaaccaaaaccaaagaccattgcttttactaaaagtgatgatggaagaagagttcttacaattaaattatacaccaccccaattctacacagaatttttcacatgacaaacaagactcctaactggtttttcatttttttttgttcttccccaccaaagttgtagaatcctaaattaaaaaaaggcttgaagagccaattcctcaaagccacaaaaagaaaagaaagaaagaaaataaaaatgctccacattttatatcccatgcttgaaccatgcaaaatatgtacaggagcatcatctcaagccaatcacagatgataaaacttttttcccattatggttttcatcataataaataggggtcagaatcagatcagatcagatcagatcaggtgtttgcagactgagattgtatccttggatggttatgttcaccttcataagtcacaataagcattgatgagtcttctaagcacctctccacatgtttccttgctgggcaacctctcatgctgctacatttatagtatcccctaataataataataaacaagttcacaaacaatcaaaaaaaggtttattacaactgaaaacctagtaaatttgcaagctttactactctcattctatttgtagcattagtcattacataggtcctataatgaatctacatacatctacacacatagcatgatttgaattggatcctcttagcatggatcattcataaaaggagaaaatccaatgcccaaattataatatcaccaaacaagaacaatgcatataaagtgagataaacattgtacctaggatgaggagagcccttgattggcttctgaccatacttcctccatgaaaagtcatcaggtgggatatctgcaagcttgttactgatagcaggcaccttgattgatcttttcaccctatgtttcctgcaatcagagaaaaacaaaataaacattatgaagcaaaaacaaaaatagagacatagaaaaaccaacaatggaaatagaaggatccaaaaatcaaaaccttttctttgagcagtgacatctaccagagctaccacatttcacactcccatcatctcctctaccagaacacttcctcttgtgctgtgaattctgatccaaagaccgagtaggcggtggcgcaccaatcaaatgaaaggaattcccatccatattggccacacttccatccatactcaatgaagaaataaaggatctagtggatgacattgttggtgtgcaactagagttatcaaaattcaagctcatcccactactattactctttctaaacatcatttccgcttgatgtttcatttgttgctggtgctgatgaaacaatagcttatgttgctgctgttgctgctgctgctgatggtgttgcagctgctgttgttgtaattgttgctgctgctgaatgagacgatagggtgatgggttcacttgttgaataggggttttcccactagaactaagctccaaagatgtgtttcccaaacacaatgaacttttaacattagagcccatatcttgatgagggttttcaggaggaaaggttgtagattgaagaaaaagaagtgttttaggtgatggatgttcggttgttgttgttgtttttgttctacaattaggattgtctaagagtaaattttggggtaaaggtattggaaatttcttaggctttctaactcgggcatgacctacacaactgcttagaagagaaccaactttcttgaacctaaacacagcctcttcagtttctacaaataatctcttacgctgaatttgatcttgaggctgagtaagaagagttagtactctaagacagctctgtacagctactttatttgcttcttcaacctcatccattgataaaccccccttaacagaatattaaaaaatccctaattcctcaaacccaataatccaaatcagaaacaacaaaaaaacccagatacctgtttcaatcatgggaagtacaacaacaacccaaaaaaacccagatagaaaaatcccattttttctcagtattaaaagaaaaggataatcttttttagatggggtttaacttaaaaaagaaagtagtagttgagtttatgagaaaaattaacaaaaacaaagaaaaccaggaaagatcacactttcgttaaaatcagaaaaagaaaaattataataaaggggtttgaagtaaaacccagataggaaattacaaaaatggagtgactgaagaagaagcaaagaaagaaaaagcaaccaaagaagaaaaaaaacacagaagggtttgctaatagagagaaagacctcgttggagttgatgctgtcaaaccctagattcgtcttccatgctttttttgagattgaaaggtgtgaaagagaagactttgcttcgcttgaggaaaaaattcacacagcctgacacccataagaatacaaagttccaatctttatatatttttttttaaccaaattaaaaaaagatttgatttttattattacaatattattcaaaaagaaaaatagcaaagagaaaggtaactaactatacatatatctatgaaaaaacacccaacaaaaaaaataaatcaagatgaagaagaaggaaaacaaaaaaaggttgagaagaaattaaaagaatttaatataaaaaaaataatattaaaaaaaaagactaaaaaaaaaaaaaaaaaaaaaaaaaaaaagcttttttgaagctttaaataagtagaaaagagtaaaaaaaaaaaaaaattaagaaaagtataaatgtgaaaattttcttgttaaattataaatgtaatgtttgaaaaaaagttagtatttaatgtaattttttttttaaatagaaagaaatcctaaaaatgtaaatgtaaaataaactaaaaaaaaataaaattgattaagctagaaacaaaaacatgaaatatgggtttatataatgggataagttgaaaactaccccttttcattacacattaactaaatataactctaaaataattttaattgataaataccctcttttataattaaagtaccaaatataacctcgcaaaacttatcaaaattagacttcttaaatgcacataatgagaatataacttat

SEQ ID NO: 296474 - DNA, 5054 bp, Cannabis indica
aaaaaaaaaattatactgccatattttgttgtgtgtagtctggtgaagaggtagatgtttataggtaattaatggtgctattggaaagtagtcagatctgaagagaaaggatagtagaattctttatgcgagtgtcaattttttttattttatattgtgtattgtcatctataagaagaaaaaaggaaaaaatgtactcttacatcttttttctcttctgctggtggaagacactaaaaggataatatttgattttttttttttgttttttatgtcgttacttcttcaacgatttcacttaccttttattcttcttagatggtgatttctttttcttcatacactaatgcccgatgttattgtgctaatgcaattgacatattgtagagtgacaacttttttctttattaggaccttgatgagttcaaaaccatcttgaaaccacgcctgaaattaatcgtccaaaatgatgaacgggaatggtttattgtttatgtctctaaggctcatccaagtaatgatcaggctaccaaaatggcaaaaaaagtatatgctagacttgaagttgattttagctcaaagaaaagagaaaggtaaacttgctgctttcagttgttggtacattttcagttgatgtcttcttatatatagttgttatttttaatatattaaagagtagctgtctgtgatgctctctgatacttatttcatactcacttgatatcttttctttagcatacctttatcttaattcttatattgacttaattttgttttactactgtatatatattacgagaatatgaacttctcttgtaaatattgcttagatttctacagtttattttaacattgctttactcaggtgctgcaaatatgatttacattcccctgaagcaaatttttgggaagacttagaatctaagattgtggaatctattagaaataccttggacaagcgtgtacagttttacgaggatgagatacgcaaactcagtgaacaacgactcatgccagtgtggaacttctgcaattttttattctgaaggttgtttaatcttggcaatatgtaaactataacaatttgataagaaaaatgcatagtaaataggaattaagcatattactgaaaatattatttgtgatcctgtttgcatttctggcttgttcttgtgcatagatcttgttcataatattcatgactaggagtttgtaatccacttcttgcatatatgtaggcacaagctccacaaccctttgtttttgtagccatgtactctccgccgtctatgcattattttctttctattctagatacttactgtttttagctacttgttctcaggaaagcttggcttttatatttgagattgctcatcttcatgaagacgctctacgtgaatatgatgaacttgaaatttgctatttagaaacaggtacattttgtatttttctctcacaagataaatgttttagtttctgcacacataagagcattgatgaaaaatgcacttgtactgccagaaggtatcatggtcatctgttttacttcagttgatctagttcgtaaatctttttttttcttttcaaggaatttgaacaatacatttcattgatatatctgaagcagctcttttattattatagatgctgttaactatcgtgatttagggctgatttatttccatgtattgcagttagtatacctggaaaacaaagggactttggaggagtagaccatggtgatgatcaggcatcactgcttaatcctgggagaaagccactaacacagattgtccaggatgactcatttagggaatttgaatttagacaatatctttttgcttgtcaatcaaaggtatgcaaaactgagatctcctatatctaacctatagtaaataaaaaaacaagtgtggctgaaataatccatctctttactttggtctacttctaaaattttatcgatctttatttataaatatctctcagatataaaatgcagacttggtttctatgctgttatttttgtgtgttgattcaactggcgaaatctgcccctaagcttcctttccacttttgttggagttttcccaaccagtactgtctgtttacgatctgtatttaaagtacttccattattataccatggcaccttattaacaaacttcatatagaaaattgatgtacaaagttactgtacctgactgttccaagtgcatgcatagctaggatgtagagcaggataataggagtgtcccagaatttcattctgcagtatttgaaataatcacggatcaacttgactgagaatttaagcttgtttcctcttgtgtatttgataaaattgatctattagtttgaaattcttgctttgcttcacagttggtttcatgtttatttgaaatattctttaaatgtatgctgaaatgatgatttttttgatgcagcttttgttcaagctgggtcgcccctttgaggttgcggcaaggggtttcgcattcattattagtttctcaaaggccctgacccagcatgaggtaatggatttctgattttattattgtgttttcttacgatgctatattactgacgttaagcttcattaagtaatcatttgatttctgtctcaccttttttttccctttctcttcccctttttgacatattcctcttcttggagttgctctcagaatattctacctttttgtatgcgtgaagtatgggtaatatctgcttgcatggatttgatcagctcaactgcctcacattataacgaaggagtagtggcagctgatatagaaaaggagttctacagacttcagggtgacctttattcactatgcagggttaaggtaacagtttcttaagcttcaccaagtgttgaagtaattcatcatatatgattcaattattcaacaatttttctagtgtgtcagttgaagtaattcaaaatcaatcaacttaaagtttagttagattatataacatcacagcacaggttttatcaaatgatctaaatgcagttttgtgttgttctaggtgattgtacaacaaaatttgttgattttcttttgctccatataaagttgtaatttagttcacgatttttgcagttcatgagacttgcatatttgattggattcggaacaaatatagaaagaagccctgtcaacaggtacagatacaaccttttaagatcaagttgacctttaccttctccctactaattcttaattttttttgtttacgtggatctctagaggcaagcatgctcatggaattgaaattaattattgtcatatttgctttattactttgtgaatacttattctttttatttctgtttgaacagtgcatcacttagtatgctaccttggcccaaaccagcagtatggcctttacttccacctgatgcatcatccaaagtgttggtaaaagaaaaggtcagttgataggatattcttagagaataaaataatctaacaaaatccgaacacagagctatgaaatccctcctagagaaactctttattgatgaagaaattaaagaacaaactagccttcgagatgctagttctccaatcacaacctttcaagagtgccgcactctcttagaggcaattctcttctatttccaagctacccctaaaagaatcccacggccttatttataggctttggacacaatacaaaagacaaccctgcccttaaacaaaacagccacttaaaataaaactaaaagaaaactaatagaccagaaaagacaaataacgcccccaaccaaaggctatggccttactattataaacaaagtgtcatggaggtttatcatcagtgtaatccagcacatgatgcacaattcacacactaactggacttcttttaggggtggggagtagctattatgtggttggacttttatctatttgaactacatagctacctctaagaacttatgaatttactaatggtaaaaaaagatttaatcttcacataaatagaccatctaaatgatttctcctgcatcttttcccatctgacatgtaaattatgtgtcgttaaaagtcaaaaaggaattttctatactatctaaactggaactcaataatttactaaaatttcttgtgatccttcattttcatttttgtagatgattcttcaagaaactccactagtcaagcactttggtattcagaggaaaccattgcctcttgaaccttcttttcttctacgtgaggctaatcgacgaagagcttctctgtctgttggaaatatgtttgaaatgtatgatggtcaccatagctttattgtttggaaatcataattcagaaaggatagcgagtattgtgatgctatcgtttttctttattctttttctaaatgatgctatcattttccaaggatgcattaattttgataaatgcttgtctagagtttattgtacaaatttttttaatctccgaagttgctatgtattttggcagatcaggttcagattcaatttcaaagatgtccccaacaaataaattacatacaagctccatgacacgtactaattcttctccgggaatggacagctcaattgatagacctatgagacttgcagaaatttatgttgctgctgaacatgctttgcacaatactatttccaatactgagttgtggaagtccttctcatctgttgaagattttgaggtatggattggggcttcaaacacagtcaggcacttgcttaataagataaatcgtatctacttcttaatttttttgaattatgtcattcctacttcatgaaattatttgtagaagatttaggtggtatgatttcgaggtttctaacacagtcagacacttgtttatataatctgtatcctgttgcgcttctgaatttttttagctgccatttactttatgacaatacggctcctagaatcttatttgttttattactgttaaatttcttcttaatgtttagtcctctaaaatgttatctcctgaaagtgtggaagtttaaattttgttgcgttggagctctgggttgtctctctctctct

SEQ ID NO: 296475 - DNA, 3634 bp, Cannabis indica
attaggtaattctatagaacatctctgagaaaaaattgttctaatataccttctatatgttttaacatacaagagagttttatagtttaatttgtttttatgattttgtatgttgtagtcatctataatcacctgtaaatttttcaaaaaattctaaagagtttacagtacctataataaaatttagatattttgttgcacggataattttttttttcttatataggctgtaagcaattatttaaactttatttttatcactgtatacaattcaaaattctttaaaaatttactagtgatttttttttttttggaaaaagattcacatggatgctaaaactgataaaaaaagtgtagtggattaaaaccacttgatcttcactgttaaactgaactcaataagtaagaacacaagcaactcaaacaaacacaacttgaattaaaccagcaataacaaattaactaaaccaaaaaaaaaacttagcttgaatcacaagggataaaatgaatagaatctttattgatcaccaacaccaattatagcaatagttcttgaactcattaacactcaacaatggtgtatttcaccagttacaaaaacatcacctagggtacccttgatcagaaatacaagggactcgtacacccttccttcactcacactaattttaaaatagagattacaattatagaaaaaatagaaagagataattctcgacagggagaggactaatcttgatgctgatatctcttgagtgtttagctgtaatgatttatatatagagtgacagttagattagttgatttaagagtgaaatgtaaccaacttaactaccactcttgacacatgccaatgagagtgctgatgtagatagagtaagtggatcgaatccacaacaatttcacctgatttgattcacttacttctgtccaaaaaaaaaaatgaggagcaggagctagtgagagcccctgcaatccatgatgttgagtaggttcaaacagtgagaaaatttatctctagatacacactttgtctttgtgaatatgtctgcaggattctcatgtgtgcatatttttctcacttgaacctgtttaatgaaatgaagtttgatgtcaatgcacttttacctctcatgaaacataggatttttcatgagatgcaatgtactctggttatcacaagggactgtagtgttctctaaattaaatcccaactccccagtcagtcccttaagccatattgcttccttaatggctttagttgcagccatgtattcgacttttgtggatgatagggctactactttctacaaattagattttcaactgacacaccctccaagcacagtgaagacataacttgtgcagcttcttcttgtgtcaatgtttgcagtaaattcagagtcaacaaagccagttacttcttccttgaactggttgtcattgttgaacataatgtcagtgttcagagtgcctttcacatacctcatgatccacttcagggcttcctaatgttttgttctgggatttgagatgtatttactaaccacactcatggcatgtgctagaacaggtctagtaaataaggcttccaacataactggcataggggatttaaacatcttgagcctctcaatttcattgcttagagattgtgttgcagacattttgaaatgttgagccaaagggtgtaggtacatgcttggatttgtccataccaaacttatctaggattttttgcatgtaactcatttgagatagcataatggtatttgatttggacctatgtatgtctattcacaggattcttttggcattcccaaggtctttcatttcaaactcttcatttagtttctgcttgagattatcgatttctaatcttttcttgccaatgattagaatgacatctacatatagcaataagtagatatgattcttgaaataaacacaggtatcatacttacttttgctgaaaccaatcttgatcatataggaatcaaatctaaaatttcactgccttagagcttgcttcagaccatatagagatttctgtagaaggcaaacttgattatcacctttactttcaaacccttatggaagttgaaataaacacaggtatcatatttacttttgctaaaaccaatcttgatcatataggaatcaaatctcaaatttcattgtcttggagcttgctttaggccatatagagatttctgtagaaggaaaacttgattctcacctttactttcaaacccttctagaagtttcatgtacattttctcttctgattctccatgcaagaatgttgttcttacatccatctaagtacgcctcaagactggattttgcagccttatccatcatgcctctaattgaggtttacttgaccataggtgagaaaatctcattgaaattcacaccctccttctgtgcgaacccttttgcaactaatcatgccttgtatctagagttttcaactccaggtttgccctctttatgcttgaagagccatttgttgattaccagtttctgaccttctagtttcttaaccatgatcaaggttttgtatttcaagagatacagtttctcttcttctattgcttgcacccatgctaaaatatctttcccactaattattgttgggattttatgccctaaatataactattctaatataatattatttgctatcaatagaagattggaagtcatttaagtttacatgttattttcatgtttatgatttaatatacaatttttgataaatccaaaatatatagttattcatagattacagtggtgtcatcacagtggaaagtaactgtgattatatgcttcaaagtttaagtctcgtgatttataaatgcactagatttaccctgacataacaatcaacgataaagtttactcacacttggataagtgatatgacatttccaagccattggtaaagtatactagtatcggatgtatagagtatacatcagactggaccgatattgaacttagataagatatcataaacttacggttatatctttctaagtcaatatcacttagttgatcttagatcaatagatgttaacctgagatggttagattctagcttaactatattatttgtgttctttgattcgttcgttaaagttgaccaaatggatcttcctgatacttgcatcttgggaacatgatagtacaattgagtcggagtgttaatcataaatacagaatctatatcttatataatgacatagaagtgaagtgatgatttccttttagcttggcttaacagagataaatggaaagagctcttatttcagtaataatattagtttactgaaatatcatttatagaaagctaagtattttaaggataaaatatattgagagattgaatagtaaatttgtctctactcgatgtaaatcatctatagaggatctttgattatttggattataacaattgataattaatagtgtatctatatttggaatatatagagcgttctatataatcaggagtgcaatttcgaatctatagtggagttagaaagaattaataagttaagaaatttactttataaatttcggatctacttattgggagcttaattatataagcacatggtccccg

SEQ ID NO: 296476 - DNA, 3938 bp, Cannabis indica
taacttttacaaaacacaaaataaaatagtatttaccattgtttttatattgctgcagcctgcaacattatacaactgcatcgtgtaaataatgtcttttttagaacaatcaaaaaacaatagtttataaggtactaattgattattttaattggcagtgtcgacatccaaagtagattagattatttagaagaatgaatgaggccatgcatgtcttaattttcttccacattatttatttctttatttcacttgtttgggtcaagtatagttcagcccttcttatattagtattattccaataaaatttcttaattttttttttttttttattaattattatatataatgtaacagtagtagatttgcttaactaatcccactaaagttcttttgtgataaaaatgcctgaattgataatgaaattctgagtcttggtcttggtcatctcatctcccacccagttactatatcatctgtctatatatagttcccactaattactaattaaccactttgaccagatctgttgagccaattgattccacatctggcgattctccattagtcactgctagtgttgataaagtccccaatcctgttgttaatcaacatcttatgactactagaggcaagtcaagaattcgaaagcctaaagctttttatgtctcacttgaacctcgctcacttatagctagcttttttataagattccaactagtttgcagctatggatactgaaatggtggccttaaagaaaaatgatacatgggttcttgttaatcttcgtgaaggtcatgatgtcccaattggttgtaagtgagttcataagattaagaaaaatccagatgacaatgtatctcgatacacaatacacttagtggctaaaggctttcatcaacaggcgggatttgatttcaatgagacttttagccctgttataaaatctatcacaatttgcattgttcttgttgaaataaatccccatattcttgcacactgttcagatttacaaatacacagagattacaataagcaattaattcgaagggggcctttggcctctattaacctagacaggtcattaattagttataaagtttgttagaactttataactaactctttgattcactgtgttccactacaacatatataaagctaaaatacaacattagattacaacacaactccagatcaaaatatacaacaagaaaaccagatcagtacacagattgttatagaaatcagattgagttctttggaggaagcttacagtggggtaagctttggaaccctagggttagggttcggatatccaaaaagccaaggagatcgttcatgcaaaagaaaggagaagaagaaaaattagtactgattttaagtgagaaaacagagagagaaaagagaggagaaaaatactgtaaatatttcggattaccaattcatacctgtgtgtttggaatcccagccattgtaatcttttgatcattgaaaatccataaagaaacgaggcgagctcgaagaggacgtacccagcacaattctggggaaccaaaaatttggtgtgttctctccatttctcttttctacatttacgattatatatctgtttgtgtatataatttttggggtttgattcggtctgggaagggggtttgtttctgggttgatattggtgtgcaatattgtggctgcctttgtgttcttcagagaagaacatcaaaggaggaggcagctgctagggttttttgggttgtgtattgaatgagtcgtttgagtgtttgagtaaataaagaagattgtatatatgtctgatgcgttttaaggattctgaataacatataaacgacttgtagcagtagggaaagggctgtcgtttgggcttatatacagggagtcaaacaaagctttgactgggttaaaaaggtctaaattgaccttgggtttttctttgattctttctgctgtgtgtagggacataacatgaatgaattattatagttctcactataacaattacaaaagggtggtcgattcgacaactcaatgtcaacaatattttccttaatagtgacttaaatgaggagatatatagggttcaacctccaatttttttttttgatatccattgcatcctatcaaagtttgcaaagtttaaaaggctatttatggtctcaaacaaatttcacaagcttggtttgagaaattatccatagccttacttaattttggatttgtgtctacttaatgtgatcactcattgtttatctgagaaacttcaacacattgcactgatgtgcttgtgtatattgatgacattcttgtcataggcagtcatgataagattgtttctactcttatctctcaactggatcagacctttgctctcaaagagttgggtcttgtagactacttcctcagtattcaagttacttcaatagaagatggaattctattatctcaaacgaagtacctgaacgatcttttacacaaatcccaaatgcaaggagtcaattctcaaaactccccaataaatggtagtcttcgattatctctatatgagggtgatcctattactgatgttacacttaatcgatcagttgttggtgctttgcaatatgtgattattactaggccttacactgcctatagtgttaacaaagtgtatcaattcatgcataattcgctctcctcacattagatttccgtcaagcgcattcttagatacttggctgtaacacttgattttgggttactcatctctaaagcttcacattttcatcttgaggccttttgtgatgcagtctgggattcggatcttgatgataggcggtctaccactgggttttgtgtgtactttagaggtacacttgtttcctgggtgtctaaaaagcagtctactgtttctcggtcttctactgaagctaagtttcgtagtcttgcaagtgttatcactaaagtcacgcggattcaatctctttttcgagaactttattttcctttatttgtatctcctacgatttggtgtgactacacttgagtattgtcatgatggttgctaattgtccttcacgcacgcatcaagcacatcgagatcaatctatactttgttcgagacaaggtgctttagggtaacattcgtgttcaacatatgtcccgtgctctggatcaagttgctgatcattgcttaataaaaccaatttccagctctcaaatttttttcttcttgacaaactcagtgtgttttctcctaccacaatcattttgaagggggatgttaagaatgggaatctgttagctttaatcagttacaatttggttagagtatcttgctgagatgtaccgttagttagatttttattctctttcttgtattgtatataatcaaggtctgtaatctcttttgagtttttctctttcatctttcgttccctatctttctaaacttcaaaaaaatgaaattaccctgatagagatattacacctcataaaagtattataaccaacatgattacactttagcatttctcttttaattaagaaacacacaaatttcgatattgaatcaaatcccatacacaacccctgatagtatacaaccgccgcatagtaaacaattactaaccctttcagtttcctggtgctcatccaatccaacccagtcactaaaatcacaatggtcatatatagggagctcctttatgagacttattttataatttgtttttaaaagaaaccttttatatataatgtttctggtagtattatcattcaatatattcaattcccttacatatttcaggtgtaaaactattatttaaggaaaagtactactactatttatttatatatatatatactagcaaaaactacgtgcgaggcacgtatactaaattttatgctagttttttctatgttatttgaaagtgatacaa

SEQ ID NO: 296477 - DNA, 2383 bp, Cannabis indica
ccagccatttcgcagctatagtcctttttgttcttttttttttctcctttcactcctctttttggatttccttaccattactttagatgtcgtaacagcctaacaagatagtattctcccttctctgttgtagatagactcattctgttatctcattttctgtaacaacactatgttcagtgattttagtatacatccatgcacttagataaaattagttgactgtacccttataacatcccactccaaatgttaaacgcaactattaggtcatagggaaaaaagaatggcctaatggatatttgtcatttaacatcaaccaaaaacaatagagtttcatattaagacagcggtttagtttaatcctattttctgctcaggttgccttttttaaatgtttttatttaacatcataaaaggatcataagtagtaagtttttttaatgggactttgtttctttaggatatacaaattggtcaaagaatgattacaatttcgactgtgggtgtaccgaacactattaaaaggctggcttctcacaaacttcagtccacactggcagtcaggtatgttatcttattacttgttagtaaaaataaagtaaaaagagagaatatttacatgattaaacgaccaaataataataaggatatatacttctgtgttttcaataatactcatccaatatcttgtattttgatattgtacatatttagtaccctaaagttaaatttaattaatttggccaaagtatatgtaattaaataattaaatttaaatttggaacttatataattgagacattttgatcatattgataaatttatattaatcaaatttgagttcagctaaatatataacttcaaaatacaatgtataagaatattgaaaacacgcataccaaatctgtatttagataaaaggcagctgccaaaggagtacacacctagtaacaataaaaaattcctcagccatgtttcattcattgtacgtgtacctttcttgttaaacttgatcattttgtggatcagcctgcatgctcctaatcagaaacttagggaaacaattgtgcctagtgcaaaatcctaccctttgaacgcaattatgaatgattgcaagaactacttccttgaaaccaatcgaagggtgtcttttgaatatgcacttttaggtactgtaaatctctattcattccttctatatactgatcttcttgcttgaatttgacattattaatactgatgcaagtttctttgttacatattctacagccggagtgaatgatgctgtagagcatgcaatagaactagcggagctactccaggagtggggacgtatttatcatgtgaatctgatacctttcaatccaatagaaggatcagaattcaagcgtccaagcaagagacaagtaattgatcattattcgtcattgttttgtttttattttttcatttattttctttttccttgtcaagtgtcaactagagtagcatatcatcttcgtcaagttttgcattgtgttaatgtttttgagcttgaatttatccattacatctgcaggtctcagcatttgcagctgctttggaatcccgtaagataactgttagtacacgccaaacaaggggcctagaggcaaatgcagcatgtgggcagctgaggaacaagtttcaaaaggatcctctggtccttgactccgacctagtacagactgaatcagatgttgcagtcgcttgttgattaaaaaatcttcaccggcaagtttgctctttgaactgccatatatgcagatgtcttcacatctttgtctcaaagaagcttgatggaaatggtggacaagattcggcatggtttgctcttctactcatggaaaaatgtgcctagtttgaatctaagttgcaactcctacgcgtagtttggagggggaactggaaagtgaaagtgctcttttgctgatacaaagtaagacggaattgttggcctgcggaaatatgagaggatttagtccgttttgctttagattaatctataaatatattgatccttgaatggatttgtataatgatcttaggggttttcccctcatttattttgctagacttttacaataatcattttttgactacttttttcatagctttttgttacgtattttaaaaacatttttttgaccagagatcttaaaattttattaattgagcaaattaaacacttgaacccctaagatcaggggtttaatttgctactgtgtgaaaaacaatatcgacaaggggtgtttatctaatctaattcgtactattttgtttatagtgcattcgattcgcactaagtgaggattttattttttggatctaattcaatccgcacgatagcttaaattcaatt

SEQ ID NO: 296478 - DNA, 3954 bp, Cannabis indica
tgtatcaatatatccatatctattttaagagggtgcattgtagaattttccaataagtttgatctaacctaacaacttaaaataataataataataagtacctattactgttaccgtctgatgtcataattgcacgttcaattttaacccctctgaccattaatatttgacaagaagggtaacaatctccatatattttcaattatattaagaatagtactaagctttccctcaaaaattaactttcaaattatttgtgttggtacaaatatttcatacatttctttcatgtaaaataatatttcatgcatttcaatatttcaatatttctatatttgtctctgtacattttacatttataatttagttattagtttcagtctgcaacagttctacaatgtcagagaaaattcaaagcaacaaacttaaagtgtgtaaaaacacctaatttttcattaaagacaaaactataaactactaaagctaacttaattaccaattaaaaaaaaaaaaacgtacgttgcttctgtaaaatgtgtatacacactcgtagccagctcattctttttatatcttattaaaccaacttaaacaaaccaacaaagcatattaatgtatctctctactaattactttataacgcacgaacccatatttttcatgatggagaaaaggtgtcaattggatccataattggccctgttcctgtttttatttttattatataaatgaatacatatattgaattgaataggccaccaaattcattttcaaaatatatcatttttttgctcaagagtcatgatccttttattatagtagctaatttggattaactaggagttgtaatatgagagggatgaagagcagataggctaaatggtattttgaggaattacaaagtcttctctctctctatctcgtagcaaaggttcagatacaaaaggcaaagagccaaagggcaaactgaaatgattacttgaatgagaaggggcccacttgataatctttccttttccaagtctctccattttatttttatttttttgacttgggatcgggtcccacaccggccaccattgtctttatggattgaatgataaaaagagcacctcacgtggagtctgaaccaaaggggctgtccaaccacaataaaaaggaatccttcactcttcacctctcctctcttctctctcaattaacccttcatacaaaattaaaattaaaattaaaatctagattttttcccttaccccaactccagaaaatatattgaattataaataaataatatatacaggaaataaagaaaggaaaagctccacacaacaacatcaacaacaaaagcaaagcaaaaatttcttttcctaatttcttttccctttttaaaggtcacccatataattcccactcattatctttgttgcttaaagctagctagctaagcttctccttgcccttcttctctctctcttcccatagctagctgctgcttctaaaccatcagtctcaataaaagactcagacaaaaaaaagaaaaaaaagaaaagagagagagagagagagaaaaagacccaccaaagggccaacaacaacagcaataagtaaagatcatttaaacaaaacccttcatcactacttcactatactcaaatccctctcgatcatatccctccaagctaagtagcagtattaccattactattgttattattattggctatttgttctaatactagctacaagtagtactgcttactactactatagaattctctacatgcgatcatggaaggtggagatgattttcaccaccatcatcaccatcaccaacaacatcaacaccaacaccaacaccaacaccagcaacagcaacaacatcaccgacccaatttcccattccaattactagaaaagaaagaagaagaagcttcatgtacttcaagctccgccgcctacccatctctggccatctccgctggcacaaccgcagaccttagtacgacaacatcttgtagcactagtggtgctaataaaagtacaagtgctacggctatagtagtcgccggtgcggccgagacatctttaaagaagcccgcgccaaagcgaacttctactaaagacaggcacacaaaggtggacggccgcggccgccggatccgaatgccagccctctgtgccgcccgggtcttccagctcaccagagagctaggtcacaagtccgatggtgaaacaatcgagtggttactccagcaagccgaacctgcagttatagctgctaccgggaccggtacaatccccgccaacttcacctctcttaacatctctctccggagctcaggctccagtatgtctttaccatctcacatccggtcttcctactacaaccctaatttttcggtcccatcatcggccaggcgtactagtagtagtttcttcccgggaatcgggctttccccgtcttcagaaaataataatagtaataatagcaacaacagtaacaataattcgacggcgacgctgttgaactttcagtcaccagcagcgtcatcagcggttaactttcatcactcaatgttgcaggcgaaacaagaactgagagacgcaacgacgacgttggacttttcggagtcggcttctggggaagacggtatgggtgggaggaataaaaggaggcaagccacggcggagcaggagttgaatcaaatggggagttaccttatgcaatctagcggtaccgggtcggttccggctagccaccaccacggtggtcagattccggcgaatttttggatggtggccaattcgaatagtcaagtgatgagcggtcatcatgaccctatttgggcttttaatccttcggtccaaaacagtggtttgtataggggaactatgtcgagtggcttgcatttcatgaattttcctcctccttttgccctactgccgagtcagcaattaggtgcttcaaacgatggtggaggaggtggtggtagcggtggtaataatttaagcggaggcggggacgggcacttgggcatgctgaccggtgggctcaatccgtacaggcacctttcgggtaccggagtatcggactcacaagcaagtggatcccactcgcatcacggtgatggcggcggaggtggcggcgatgatcggcatgatacgaatagtagccaccactcatagatcgattggtgatcatgatgatgatgatgatgattacatgggcatggtcgtcctcgtcctcgtcctcgtcatttttctccacatgtgtagtagtttgatgtgtaacaccacacgtgaggtttgatattgcttctgaaaaaattgatgagttttcttttttttcgttttaatttccaaatttttttgagtgtgattaatatggttgggggtttctaattaatttttttaaatataaatataaggatttgggaaagacatattatatttcactctagctacttgacatggctatttttggctgtcttttttttttcttttttcttttgggcactaataatatagtttcttatatttttgggatttacactgcatcttattacattattaatgtcatcattgtttgtgcaattctctctctatatataatatatgtagatatgtatatatagtttaatttgaattttcaaaagcaaacaaatacattgtaaataaaacataggctatatgtactgttaccatgtcacataactttattattatttgccatgcattgtgtataaatttcccacctacctaataattgagtatatttcattttcacacacacatatatatataattataattataaaatgttcctttttctcttgtccacaaagttcgtgtagcgtagtggaaactggaaagtgatgaaacagtattgttactgccacattagtatatgtattgaatttactctctctgatctctctctttttttttttcact

SEQ ID NO: 296479 - DNA, 1165 bp, Cannabis indica
agagagagcttgtgacaaaggaagttaaatttcgacagactaatggctttgtgagaagatcagctggttgttcttttgttggaatgtaggagacagtaactttgttttgagccaccagatcacgaacataatggacatccacttcaatgtgctttgtccgagagtgaaaaacaggattggaagttagttgctgggcactttgattgtcacaccagattactggagtgacaggaatggtgatgctgagttcttgtagaactgaggaaatccaaactacctcagcagcagtggaagacagcgatcgatactcggactcagtgctgaaacgtgcaacatcggtttgtttcttggagccccaagtgatcaagtttgagccaagcattacacaataaccagttgtggattttctatcatcaagattgcaagcccaatcggtattggagtacccctataatgtgagaatgtgtgctggttggaagactaaaccaaggtttattgtgcctttgttgtaccgtagaacacgtttgcaagcaatccaatgtgcattggttggtttttgcataaactgactcaacttattaatggcgtagctgagatcaggccttgtcaaagttagatattgcagggaaccgattgtacttcgataaagcgtaggatcattaaatggctcactgtccatggtgtacaatttgtgacctggtgtcatgggagtggtgcaagtttttgcatcttccatgttggtttttttgagaatttctttagcataatgagcttggttgagatatagagcagaattgtgtcttattgcttgaaaacccagaaaaaagatgactgaacccatggcttttaaagcgaattgtgagttgagagaagagattagttgctgaatggcagcagagtcttccccaattatcagcatatcatcaacatagatgagtacaagcaagagctttccattatggttggagaaaaacagagagttatcggacacagaattcttgaattcccatgagagaagagcagccttgagcttgccataccaagcccgtggggcttgctttagcccataaaaggctttttgtaatttgcaaacatgtgtagggtataaggtgtcttcaaaacctttgggttgctgcatgtagattgtctcattgagatccccatt

SEQ ID NO: 296480 - DNA, 1275 bp, Cannabis indica
ggtttaactattttggatcatatcatgcattaatttcaaatccatgacctttatggaatgggagccatgtgagacccaaaattattaattttattatttttcagctccaagtcaagaatactataaggtcaatggttgttagtactatgtagcacatatatataatttctgttttggggacacaaattcaaacaagatttggtaattctagaaccataaataacaaaaaccattaaagttgaatttacacctttcataagaaccttccatatacacttaacacacatatatgtatatatatatataaaagagataaatgatcaactttattcatcaactcagccatatatttaagggtatgtttaaattttggtatatagagaaagaaaaatatatgaaaatattggaagaaaaaaatggaatataaaaaaataaataaattctatgtttggtatgaaaaaaaatgtataagaaaaattaattcgataaaaattttcatgtcaaatacaaaataaaagagtcgaataagatgaagagacaacaaagaaagaacataatttagtattgagctgctcaatttcctttgagattgaagccttaaattcaaacaagaaacaagtcaaacatcatgactataaaaaacagaaagttaaaatataaatacataaattaaatacaataaaaaatgatatcaaaagaaaaaaaaaataataaaacaaaatggtagccaagaagaagattgaaaggaaaatagtgttcaaaaatgagcaataagccgaagctcaagtcaatagagagaatagtaaataacaaagaatagagtaaagacaactctaaagaacaaagaagagaaaagaagaatggttggttggaaaaagaaacgtatctcttctatattttgattttaaaattaagataaataaaattgtagacaaaaattacaaaacaagaaaactatacaaaataacaaattatatgaaccaaaatttaaaatacatattcacttttatatacatggtatagatataatcatatgctagtaaattttcaacgtacaacaaaaagtgtcgcataattactttctgtttcacacaatttctttcatatatacatcaaattttttttattaaggatataaattatcatttaattataggctaattagtaattttttccctgaactttgacatgtagtaaatcgtgcctcttaaactttttttgccgttaaaaattcctcccgaactattgagattgttaaatttaaggacttttgtc

SEQ ID NO: 296481 - DNA, 2310 bp, Cannabis indica
tattgtgcttgtggttcttgtgtttggtgatcagttactaagattcaagggttactaatcctgtgttttaccatcccgtttaggtacaactgccgattggtggtcagttggtgtgattttgtttgaactgattgttggaattccacccttcaatgcagagcatcctcaggtaaacctattgcttctacaagattttataattgatcatcatgtttgttggattatgactcatggctactcttaacacttcggttttcttttttcagacaatattcgataatattcttaatcgtaaaataccttggcctcgagtgcctgatgaaatgagtccagaagcagcggatttaattgatcggtaagcaaatatctcagactgttatataactcaaagaaatatataaacactttatcataatgtttgtttggcaagtaacaaaaaagatgctgatacaagtaatttacagtttattgactgaagatcccaaccagaggcttggagcagcaggagcatcggaggtgaaactaacacaattcttagtttgttcgatttgtagcaattatttatttttctatttagtcaagtactgaatccgccttattcaggtgaagcaacatgtatttttcaaggatatcaactgggatacacttgctaggcagaaggtcagaaaaacgcttctttggtgaatcaagggcatggttgcgcttcctatacattaactcgactcattatttgtgcaggctgcatttgttccctcgtcggagagtgcactagataccagttatttcactagtcgatattcatggaatacttcagatgaccatggttatccaccaagcgaacttgaagattctagcgatgatgatagtttaagtggcagcaacagtggcatgagcctcggcaatgatgaagtggtaattataattcacttgcttctcacaaactgttttttttaatctttattttcatataaattgaaaaattgaaaggacatttacttatgtttggcatcataattaaaaaactgttttttttagaacaattaggcacgtttggctttattttttgaagacagtttttagaaaacaaaattacaaaaaacaattcacttttggttaatattttttctttattttatctcacattattttctcccattagtgcgagtccgaggcctttttcatattggggtctcaaagttttgaaaatttcaaaaactgttctcattttgatctttgaaattttactattatagcaggaggatgaatgtgcaactcttgctgaattcgatttaggctcgaatatcaattattccttcagtaacttctcatttaaggtatttatttccacatataaaccctacccaaattagacatatagtcttttttctttttcttgatgatacctttgtgttttggttttgtggcacagaatctctcccagcttgcatcgatcaactatgacctgctttcaaagggttataaggatgatcctcccaacaattctaatgcctaaaaaagcttcactccctatcaaaacatggggaattgaatttttggacattagatatcacctttgttgtttgtatacacccctgtacatgtatgtataaccttttataatcttaattaacgatacgcgcacacacaaacttgagacacttatgtttcttatgtttttgtttgcagagataaagaaaactcaaagattctgaaaactggtttggggatgtgctcttttcacattttacatatatttaaagaagaaaaaaaatggagaaaggtaagttgtatgtacacagtttgggggtttcaatttttatgctgtgttgtaatttaaggtatatgttaatgttaatgttcccctaggctaggctcgtgtgtgcctttgtgttggttaacaatcttttataaaatccccaatttgaactattttttgtagttttcctacacacatggtaaagagaaagaaagaagaagaaacatcccttttttttgttttttttgttctgttttggctctcatttcatgtatatttcttattgcacttctagctctcataaggttcgaggttcaagtttctcgtttgtagggttaggcggggattctagttttaaaaaaataaaacaagtatatgcacttgcaagttgattaatgttaaggctttctcaagtgttcaaatgagattaaaattagggattatttttcaaatacataaaaacaacaaaaaaattataaaaatacggaattacagaattttaaatactttttacgactctttttattttatttataaaaatacggtatttttat

SEQ ID NO: 296482 - DNA, 5274 bp, Cannabis indica
atttgtttttttttcaaatatatacttaacggctttctctttttaatctatttatttttctatcccttgttttgggatgtgtaacgggcaatgccattgtcacggtacgagtgtttagcgctatacatcataataataagcagaattaattaacctcacacttgaattgaatttaccgttgacgccaccaaatttcaacacccaaagagaaaaaattaaatactttctttgataactgataaggggtaaaactgtcatccacaaacctatcaaacctctaacaacattctcctaattcttaatttactaacagttattgcgtgtaaaacccacaagtgagttagaccgatcgaaaccgacacgtgtaccttgctgctgcacatttccaattatggataacggtgacgacgtcggagcaaacgcaaagcaaaaagttccgttagagtctaacggtataagaaaattctcagccggtaacggtaaaacgctcccgttggggaagtgaaacgacactgttgggacctccacgctcgtcttcgaagacaaatcgtaacacgtgtcgaataatgccactccctccgtggactgtaggtggcgagtaccgttcacgaacgcgtcacgaagcgcgttgtacatgtcagtctgtagtcgagtcacggcggttcccgagtcgatgattactcctccgttaccgtctccgtcaatttcgaagaaagatttcgggattgagagcaactcgccaccgacgctgagtccctccatgccgagatagtagaacgtgtcgagttgagggttacggagtaacggcgccgttacagcgttaggtgggaaaggcgagtcgaactcgagagtcgaggcggagtcggaatcccggtcaacgaggcagtacgaaaacgacgtggcattgagttgtgaggggaacgagagtgagccgccgccaagcccgagaagcccagccgcgccgataaacaaaccctcgttgttgtgaccgcaaccgatggcaacattgtcgacagcaaccgtgcccagagtaactgtctccgtgacgaagtcaccaacggtgtaagatccgtctccgtacgacacctcgtagaggcacgtgtcgttgcggcactcggacacgtcgagggacttgcattgttgggtctcgcaagtaagcggcgcgtacgaagtagacgccgccggttcgaagatggggtccgtttgttggtagcattcggcgcaaggtgcgcattgtacccagtttacgtcactcccagtgtcgagcaccatgtagactggactcgctggtttaccgattccaactcgggagaagtactcaccgcttccttgactcgtcccggaaacgacaggtgcctgaacatcctcagctttgaatttttccagctcattattctgcgtctcagctggtttaagatccgagttggaaactcctcccaagaccagatccaatcgggtagtaagagatctaactcgggctgagtcgcgctttagtcgagctaaactcaacgaccggtaatcgttatgtgaaggtctatgaagaaaaactcgtgaatgaaggtggagagaaattgaagaggaagacgaaacgctttgctcttgctgattcaagtagccatgcgtcttggtggatctagaatccaatgaaaaaacattaacagtcttctgggtggaagccgctacactaagtaacgacgtcgtttttgagctctgcgagaatgtccgagagctgtgaatggcttgaaaacaaaagcagaacagaagaagaacaatacgaaaaggaaaacccatttgaaccatagagagagagttcagttcagaacttgggagggtttagaatgtctcctgctacacttgctttaggattggctttgaatttatggagactgaggaagaggagtgaatgagatgaagagagtgttgaagcattaacattgattcacgccaaggacgttggtagaaaacaaaggctaatttatgggatgtagaggatctttcaatgagtctaaaaagatgtgggtaaggttggtttcttggcttggctctatatttacatgaggcttagattttatgttagattatatcatctttaatttatggggattttgatcacttttttttaaagttcttgttttagtgcaggtgggttttatatttatttgattaggaataacagtagtagcactaaatgcttccaccttttgccttttggcttttgatttgtttaatatattactattctcttgaccaataaaaaaaaaagcctactagagcaataatgaaaaagcaaatggtcattaattttagtgttagcttattggagacactttacaaagcgaggcggcagagtttgggtcaaaagtgattcgaggcatataatatcaaagtatactagtagtacttgatggtatgatggttagtgaaagcaaagttcatgatttaaatgatgataatcatcagcttttgttatcattatttttctaagcttccaccatttactattcttgtagttgaagttggtccacatttaacctttttcctaagtgggcgacagctatgtgatcggtcttcatttgggcttgaatgggttgggcctgggccactgcatatcggtttttgtgtggaaattatactttatactttttttcatatcgttctcttttattttactttttttttaaagtttatcatttttacctctttcttttaatattgtaccaattttgcccgtcactttaagataatctccacgtgactctcttatgtcagggtattttaagtacaatacatataaaaagaggtatgtttcaattaaatataaaataattaattaataaaagtagtatttttctacttaccctgattttttttccttgaaattacacaacttttagtagtttttactatgggttatttcatattttttttttataaataccatattttaaagttttttcttatctcttctcttcgtctagagtcgggcaagagaagttacagacgccggaaactcgctggagaatacgttgtaggagagacggttacgctttaggctcaaccgctcgagactcggagctgagccaatgcagtgagtgactcgaacgagtcgcggagatcgaggttctctaggacgtgtctgtaaactctggttgatgcaagagacgccggagaagctacatgggtcgatggaggtagagttccaatcagagaggttattcgatacgtctgggctcgctttgaataccattgaagcttataaatctgagctcgaagaagcgccatgaaaaagtgagaaggaacaaactaagatcaagaagtagagggttctctccgaagaaaatagaaagagagttcaagtgtgatggtgaatgttgagtaaaagtaatcagagcttattaactcaaatagcttgaaggaaaaaggaaacattgttacaacttaacaagttatgataattaatcacttggtataattgaaaagttaatatgttagtttatattgtaggcttttggatacaccaactaaataaactaggctggagtgagaaacttaaaaagtacgaaaaacattccccaaacgtaacattgaaagctgggctgctatggtttctgctgttgtggacaactcggctaatggtgcttcctttgtcgcggaaacctctactggtgcttctactggggcgggcagctcatgggctttgtaattttggaagagctattttgtgcacctattattacgtaagccaaattgtaagagacaaaaaaaaaatgacactgacatctttcctgcaatgtcgagaaattatcttaagtgatgtgtatttcaacacataattatctgcacagaactagtgaactgctcgtgtttgaatgggaaatgcagtcaagtaggaatgtgattttcatattttctatgtcttagctctatggggtttcatagggatcgtagaggctcggccttggatatagaccggctaagtttgtctttcggacttatttttgttttattttttttaaaatatacatttttttttgtacttactttaaaatatatcacattcttttttaaataaggacgcaaaaatattttttatgtcctactaaatttcaagatcgaccctagaatcatatatgaatgtttttcaatcaaattaacatgtcaataaaaatattaaaactttcatatattgtagaaccagttttatttaatttatgttctagtgttgttggaattgattcttttttctttttaattagaattggtttttgagttattgtttgttatttttttagtcattttattgtggaatgaatctattttaatgtatgtcttaactaattttttatttagtcatttattcttgaattatttatttcaaaaactaatttttgatttaattaattgaaagaactagtttttaatttagttatttcaggaacagatttttgatttagttaattcaaggaactggtttttaatttatttatttttatttaattggtttttgtgtgtaaatttttatctttgttgctttatagaactaatttttttttgtcaaaatttttaattagttgataaatataaccagtttctttctcatatattttgagttattgtgtgttatttatctttctatttattttgttatggaaccggttcaatttagattatgcctcagtatttttagaattgatcttcgtcttttttttttttaattataaccagtttatgaggtattatgtgttattcgattttacttaatttgttgtggaactagttttgtttttctaatttatatttcagtattttaattttttttttaattataatcgatttgagttattctatgttatttgtttatattcattatgatatagaattagaaccgagtctattttaattataactggtttaagttattttatgttatttgtttttattcatgttatagaaccggttatgttttacttataaccgatttgagttattgtatgttatttatttttattcattatgttatacaatcggttctattttaatttatatttgagacatctaactctggtgaccttttcaacgacgacacaactctattgacttttttgatgattattctgacgattcttctggtggcgataatttttccagtgatatttccagtgtcgatactttctagtgattttttggtgccgatgtctttttcggtgactttttggcgatatttgctattagaggttttatcaaattttatttattggtcttttttttttgttt

SEQ ID NO: 296483 - DNA, 1909 bp, Cannabis indica
ggatgcatccctgttagaaggataagaaaaatctatctcaaaccactagagtaaaatgacaaccttaaataacacaagaatatataatataaaagtctttcgccacaaaattgatagcgagaagcaaagacagtagtaggagtatctctttttccctttttggggggagagcggtggtggtactggtgattattacaataagcaataaagcttcaactctccgtatctccgtttctttatgcgcataaccaaaccaaatggtaactaacaccagccattatgtttcaggtgaaaatagtttcactaaccttcatctatataacgctctgattgtttcataagctccccaatgaagatcacggtagaagtggtgccatctccactaatatcatcttgagcaacggctgtccttgcaatcattattgctgtaggattttgaatttgctgcaacaatgttacaaaataaaactatgttattagattgtaaaagacaaaatactaaccaaacataagtaaagtaaccagcgcgatcatacaaaaattagagcacattaagtgttataaagctcaaactttcgagaaaaaaaaataacactatactgaatcgttattataaatctgaaagcaatttaccattacaactataaggtactcaatcaggaaaactcggacataagaagttatctagtgataatttactaaaatgtcatttcacagttcgatctaatgaagaatacaaacactataacacataaaacaggctaaagctcaaccgcttaaaagatctgaagctttacgggtgagaaaacacgaaaaaattaccatttctttgagcaaagtgttaccatctttggtgagcttgatatcaccggctccaccaacaagcctggaaattatattttacaaatatgaatatcagatgcggaagggatgaaaaccagtgaagaaaaagattaaatatatagagaacaaaactgttttacatcttgatggtgcctttgggaccaagattgctcttgagaacgtcctgtaaacccttggcggcattgatgttcatgtgaagcgccgccgatttgttgaggacctctgcatttgggttaagcacccgaagcgacatcttcgatgggttcgactaagcacggagttagaggagtgaagtgagtgagtgagttttcagagttagaaatgagacagagagctgtcttctctaacttaggaagtgagtttcgacacagagggttttagggctttcctgaacttctcacctttttggttatattactctcgcatttttcctccgtttttgcgcctttctcttccttcctttcgcttaaacgcagcgtttcgatattcaaaatagatctttattggatggaccgggtggtcctcttcctaggcttcaagcccattttatatttgggcttttttttatatctattctatataaagttataggtgactttttatttttatttaataaaataataaaatattatttatatataataaaataataataaaacaaatcctattaatatttgaattgatatttagcatatttcaactctatatataatcacaactataactctagaaattaaaaatatatatatataaaataatcgtccattttatttatattatttagaataattcattgtggttcaagatcacaatgaacagaaaaagtggcaaaaacacaaatgtagttcaaaatcatagtaaactaagaaagaatgagaagagattattaagcattaaatattctcagtaaacacactcaaagaatcgcattgagagaggaaaaaaaaaagaataccaattgtgatatatataaataaataaaagcgaagaatattatataattatttatattctatataaagtatgcctatataacagaattctt

SEQ ID NO: 296484 - DNA, 1604 bp, Cannabis indica
aaaaccgtcgcgaaaacgaatatttgtagtagtgttgggtttcaaagatttggagttgtagaataaagccttagttccaagcaagtttggaggctgatttacaattcagattcatcggtgtctaaggtgcactatcacagctatctttataatggtaattttcttaccacaaaattggagaactcgccttcatttatttggaaaaacttgttgagaggaagagaaataatcttacaaaggtataggagaaggctgggttcgggagatacagttagaattctaggtgatctttgggtccaaaggcctaaatcagtttctttctataacaagtcatgtcttcgtgctgaagtatgtgagattgatcttcgacttgcattaagtgagtgggatgaactatttattaaggctattttcaatgaagatgatgttaggatttatgtcttgaaagccaatagacatttctgattatcaataaagagttgaacattttgatatatgtatgaatattaaattattaatatttattattgaataatttatatataaatattgaaaaattctctactcatatatgtggttgtgacttgtagttgtacaaagaactaagatcgcttagccatgaataaaaaaatcatcaatataaaaaagtttggaaatctttaattaataatttctagtacgattcactaatgctcgttcttcagtgcaaataatctcagtttggattatggatatagtatgacatcaaagtgaatatgttgtatacaatagagattatatatgacaaggaccggtatgaatgaagttttctttatctaatatgtcgtttactataaagacctaattcatatcataacgatgatcaatggtagatcagcctaaatgctaagtaatcatgaattcttgttcgtgttattagtttctttgattcactcattaaagtttctcagagaatatgattcttacaatttctattttgggaagctaataatgttgatggctaggaacatgatctataattatagaattctgacttgcctaatagatcgaatgctagttccctttaagtgttaattctagaactacaaagttgtgcacaaatttagatgtcttcgaacaaaacaaagccaaagcctgtgtatacaaatacattaaaggtaatatagtggtattccttgttctttatgttaatgacattctacttattggaaacaatgtaaaaaggctgttagatgtaaagaaatggttagctgataaattccaaatgaaggatttgggagaagcaagctatgttctcaagatcaaaaactatagacacgacaagaaaaaggtgttttgccggcaactaagctcgtcggcaaatgtaagagcaactcaccggcatagttttgccggtgacattttgtgctagcaaaagatgccaggaattgttatttcggcatatcaccttttgccagcaactttagagccggcaaaagtgtttacacagatgaattaagttgtcggcataagttcgtcaccagtaatttggtgccagatgaggagtccttatcgatgttttgccaacaagttaattgtaacgccctaatgctaaggcacgctac

SEQ ID NO: 296485 - DNA, 2902 bp, Cannabis indica
taaaatatatttataaacaaaaatttacttttcctgattaaatttttttaaaataaatgttacaaatgcaacctaaaattttagtgagactacacattatgaataatttacaaattaatcccaaacccaaaagtttctgctccacaaatttgccgtgttagttgtttagtgaatagacaaggtcataacattcaagacatgaggaccactctcatttgttgtaacaactaattaaaagctttaattagttttattacttttatacccgacaatcatgaattggaggccactatctcaccacaaggactggattactgcagactcactcttttaacatcgcttctcaacattagatttcttcattattgagtttctttctagctttcaaaactcatcaagtacatacaattgaagcaaaactcatgaaatcatgtatatctcaacacaaacactggaattgatgggatatgaatgaaagaacaaaaatatgaaaccccatttctttcttttcttttgggaaaactttatgctaagaatatacacaagacaccatcactcttttccagcaatattttacgacatatatatagctttgttggaaggatactatatattacacgaatttataataagatcctccacttcgttgaaatcacctcaatcattccgtgtctttgcctctgcatttgcctataaacccccagcatccacctcttccatgcctgcatttacatcatcatcatcaagatagcagttaggactagaaagtgagtaaataaataatacagtatatcacatgctcgcagctttataaattcgactttttttcctttttcacgaagaacaactagaacatgaattagatttaaagtcgtctgttaatttcgaatcaatttctaatagtttaccacaaacatttattgtcgtctcaaagttgtggtgctttactagatgactttgaaagttcacctactttgccacgacatttcccatttcatatcaattgttcactgtctttcttaaatcaattatctaagcaacttctcaccaattttataactctttgttttttcttcatcctctttcggttatacaaatctctgtcccttttacctaacaacttcaccaactaaaatacaacggaaaatttatatgccagatattttatctctcgttggttaaaagaagactttactatttttccttttctgggaggaagaattgagaattacaacaaattaatgacgaaaccaaatttatataaaaaaccatttaaattaaatattatttatatatcaattaatgatggaaacgaaagtgcaaaaaaaaggttagatctaatgaataaaatttaccataaaaaaataaaatttatgcttatgtagaatttaagaataaattacaaagtaacatacctgatgctgctgctgttcctactgctgcaactgctacttctgctgccagaactgcttttcatgctaccactgttaagactcgattggtcaccactttcactctctccagacacagaattcctcttcttccaccactctttgtccacaccactattattacaactactgttactaattccagccttagatccatcagaaacaaaaggttttggagaaactttggaactgttattaaccgaaattgactgatcatttctgttagtgaccattgttttcttcttcttcttagttccaaaagagacgggaaaaaccatctttaaaagaagcccttcattttccattgttccacttcttctgatctcttttcccttattcccaaaatcactgttccttttcttctgactatcgttcctacttatatttgcatccttgtcttcgtttcgccgagcttcggccactaccggctgctctacaagatctcttaaggaaagttcgtaacatgactcgggcatgttctgaaccatctccatcatctccttctgacctctgacgatggcttgggtacgagacgccggcgatagactccggtaatgggctcgctggtgatttgggcttctgggtgggctccaaagacggggtgaaatgaccccagaatcatgatctccatggtttccggttggattcggagcagagcaagcatagttcatcctttcccacctgtcatgtccctgatcagttcttgacccaatcccttcgtggaaacgaaaaggatgttcttgttgtggttttagtccaggagcaagcatgttgaggttgttgttttccgggaaagagttgaggtaaagaaagtggatgagaaaataattgtttgaagcaggtagttgttatggcaatatcttcaccgacccttgggtttttctttttttttttagtctattttaatatttatatatattattgtttctagcttctatctaattttttttttttttgaatgaagcttctatctaatttttattagtaactagtatttaatgaggttttattatctcataaagtcaaggattctagatgggattgagatagaggtaggcccactccactcaattttcttatacgtgtatgtgtctttagaggagcttaagcttttgtaatttatgtggaccaaaagagactgcctaatgtttcttctttgtcattttattgacttttgatcccaaagtatcaaatagagatttttacacctcatgtcaaaattgacatcttttttacatttttatcaatacacggttttttaaacttttttaacttttacatttttcaattttacttttcaaaaagtttcataattacaaaattaccttttcccttcttccttacacacgtacacgcacgccacctcataactccttttttattttttttttgaatttttcatttctctgattcttccactcttcaaaccgtagcttcccacgatcaccatt

SEQ ID NO: 296486 - DNA, 2093 bp, Cannabis indica
ggaataaagtcgatcaaatggttgtctccatgtaagtgtatacatattatataatatttccgccatatatatcttaagtaattaaatttaattatgtatatataatttgtatcaacatatataaatataactaagatgatatcagatatatgttatggaaaaattaaaaaaaaaaaaaaaaaaaaaaaaaaaaactctgaaaaagaacagtgttgttaattaatttaattcagtagagggctaaattaattaatcggcagtactttcatttatctctctctgtatattaatattaatattattgattataattataattatatgtagagcggtccgcaaattgttctgggaaaatcgtaatcatgtaagcgattggagatctttgacgaaatccctttgcaataaatatgagagtgttttggcacaaaggatttcacaaaaggtgagccaataataaatctcttatctaattttattagtttatccaacttttttccttattaaaaaaaaaactctatttgttttattttttatatttttcaggttgttccttcaatagagaaagtgagaagtacaagttcattgctggatgaaattgtggagcaatggttattatttgacatttacagaagaaatttagagatcatttttgaaactgtgggggaaattcagcatataattacaaatgtttttcctatgtccttatataaaatgtcaaaaataatcttttgtaaattggtaattaacaaatatacatacctatataaaactttaaaattatatagtctatcatatatattataaattatttgataatgatcaattttcaggtatggaaagaattccacgttcaaatcgaccacctactaactcgaaaggtaaacataattatactataatttctcttttatgttgatccttcaaattaaatattacttatagctatatagtccaattattcatgattaattaattattgttgccactaaatatatatatattgtttttttgttagtttatcactttatttattttgacttgttatagattgatgaaggggcgtttaggaatgttgatgataacctatgctttgacgatggaacgattaaacttaataatttctaccatgaaatgaagcatatacaagaatatgtttacccccaactgccaagaacttttgctatcttaacagaaaagaatatagtgcactataatatatgatcttatatatatatatatatatatatatatatatatctgtatccctgctactagctagatctatttgtgggatttctttctatatcactctttaggtcttcaatatttcccttcttgcagagatgatcatggattttttcaattttttttttcatttttagttttgaagttattttgaactaaatttgcacgatgagcatgatttgttttattagtgttatattgtttatggcaaatgaaagaaatataaatataagaaaaaatttaagtgagtgcattacttttgttctggcatttaagagcatcttcttagacttttcattagttgaatggagtggttgtatggtattaacatgtgttgttaaatagagtagtgtttggtatacaattttttttacaaaattttattgtaattttacatatttatcactctcagcctcttttgtttctttattattttaaaatatattgttttttctttgatagtatactcataaaaagtttgagatttacttttcaatttttgtccctattattatttttattcataaatttatatttttttggaagaagaagtgcttaacaaataaataagtagatacaattaatattaaacaaatttggtatattttctaatgctccatatatcattcttttattgattgaatcaatattcaagacacattggatcggtacaaagaaaaaaatgaatatgtggaaaaactacaactaatagtgtagaatcaaaacaattaaattttaaacaatcaaataataagcgatgataagattaaaaaaaatcataaaccataatggaataaaaaataagggtgaatagagtgaggaaaactagaaaactaaggtggcgtttg

SEQ ID NO: 296487 - DNA, 3637 bp, Cannabis indica
agataacttcattaagatagaaaagccaaattggcaattatagcggtgttaatagcattaggaacattgctactaacaacagtacaatctgaccaataacaagcaccgcgagccagacaatgggcggtattgttagcagatcgcttaacacagcggacataaacattgaccaaaaaattaagcaaattaagacagtcaataataacagaaccaaaaacaaatggcatttcaacattgctttcaagggcttgaaccaccgacagtgaatctgttaattaaagtacttggtaaacagataatgagataacataggttcaaaaaactcaagaataaactaaataatattttcaaaatcaagtatacttaattaaaacgaatagtatttttgaaatagtaagaaaaacaaaataatatttttcaaataagaatatgctgtacaaatttttattgcaattaccttaaattttgtttgtaagttacaactactcaacacatttttaacataattttaattaagaacactatagtggagttattaatctacgaactacatcaaatggtgcttatatattaattagactcagacagagtgacattgtcatgaattatttgttagtgttattttaaattttagggcttctcttaaaattttagactatacttttcagttttgagttatttgtaaaactatataaaaaaaaagtattactaaaagaaataagcaaaaatgtaacatcatttcattatttgtgacaatattacaataataaaatgtcatgggttagcatttttcttttatatatataatataagaagttatttcgttattatttgtggctaaaaagtcaaaaatagcaactagagaagttatttttaagagaaggttttatgttatttgatctataataattgtttactccatttatgaccaccatgcttttttttttttagcagaaaaaggaaacttagttaatagagtttttaataattgaagacatggtgggtttggagggaatgaatatgtaagaattgtataaaccaatgaagttaatattacaaatattcatgaatatagagtccctagctagtgtatagcaagacaatgtaaaatataggtataattgtatgttataaaatttcacaacaaaacagtaaatatgcaacaaaataattcaaaattaaatacgtgtcttgataataaatccacttttacattaattccgtattaaggagtcactcactacaatatagcctcatgtgataaattaattaatattagaaaagttatctacattaatgtagtaaaatcaacaatgtgaccaatgctaggacacacatagtaacctatagctaggtactagaaaaaatatattaagacagaaaaatatataaaataatagtattaactcctgttaaagattggattaaactgaactgtgatatcagagtgggttagatagcatgtgtgctgcaattgtggctaggaatcacttgggcaaagtaattcaaattcatacggattctctgatgcattgtgtggagaagcggcggtctgctgctcggctatttcggtgacactggacattggtgccaaatttgttattgtggagaacgactcgagtgtagtgatcaaggcgcttagtgggaaggatcctcattgaggtcttgaaaattatcgtcttttttttttttttgtattagttcttctctttcgtttttcagttgtaatttttcttatgtcaatagaacatgtaattttgcggctcataacgtggccaagtgggcttttgctcatttgagatttggtgatatctcggtctcttctatcccgaagaaccttctatgtaatgaccatgaaatctaattatttttttcttaataaaaagaaaaccctaaaaagttactcaatggttgtatatatctattttggtaactttggatgggtagatcttatcaagttggtttcaacttaacttttttttcttgaaatctaataaatacaaacagaaaagtactaaaggagacagataggatagtaaaaacactacatcctatttagtagtgactatacaaatcacaccttattactttacgtgggattccaccacacatgatatatagttagttgttattattattattattattattattattattatttgttcatacacacacagagagatttgaagtcgtagtcacacgagtaaaagtagtattttgcatttttatagccaaagtttgaatggaaatccagtcaaataataataacccacaaaaggagcagtgcaaatatgggggccaaaatcccatataaactagggaaattctttttgctttcccatgatatataatcacaacacgtctcaatcggtcagttttcactgcacctgacatctatataatgtaaataaataaatacatgtcacatcaaactaattatataaatggtactctgttcaaaaaaaattatatatatggtactactctctttaacaccaaataattacgattaccagtaaattaactaaagtaattattaaggtcaaattgcttaagtagatattagcattaagaggatataatgccaaattacaaaactacaatatgacctaagaaatgtcggaaagttgttattacttttttggctctgcttttaataaaataaaaattagagacaaaacccaaaatctctattattattattagcctcataatccgattatctgttgggaaaaaacaaaaggttttcccttttgacttgatctctattggtgcatgaatgatataaacaaccaataaaaatcaatacaagttgatatctcttctttggaagaaatgagaattgagaagacaattaattaaagataaaaacatcctttcttaattttaccctaacttttatcttaaaagtaggttattagatatttttgtgtttaaactaaagaatgtcaactaaacatggtgtaggtccttcacactctccctactagtttaattgataattttaccattttaaaaaaataataataaagtatagatgtaagtatgtttataaattatattccaggttgtatatttttaattaaatactatactttttctgccgtgtttatgggacgtgtgtatattatatacaacttttattatatataatgtagacatattattaatataaatatcttagctatgattttgtatgtataattaaaaggcaacatatgagaaaaaggtttcatataaaatgtattaatttgtcttttgttcaaattatttgtattatatatgaattgttctcatcattttcataattcatatacataatatatattatataaatacatgtgaaaagcattaatattgaaaatgggaacttttttttttaagtgtattgaaaatgggatttgtttctatatatcctttattgtctttctcatttagactttgatctttcacatacacaaaagataaaaggcattatcaattagcatgcataatatgagtacacatcactctataatttactgtatttatatccctttacactttaagcttttgttcttttaatggtaaaatggaatttttattaatacataaaccagatttagtttattatatgtaaatatatattgctaaa

SEQ ID NO: 296488 - DNA, 2982 bp, Cannabis indica
ataatatataatatatatgaatataattaatgcagtggagatccacttttcttggagccattttggatgaaaaatgcagataggagtgcaatcatggtggctggttggcacagaatgagttatatctttaaccattcaggctccatgtctaaacaacttgaagctcaaattcaccatatccatgacattgttggaaatgcattaactcaaggaaaatacattatttttggaactggctcaacacaacttattaatgctgctattcatgccctttcacctcataattcctcttctccttctatagttgtgcctttaatcccttattacccggttagtttctctttccatcaaatctacttaattatacagtgtagtaattctattaaaatgttgattggatttgtaattttggcgctttaagcctttattaagtatccatttttgataggagtgttcgcagtgcgggtaatactttttgatcatttttcaaactaacttgcacatgcggtttttctaattatttggactatcaccaaataattaaactatcacaaatataataaagcttgagcaacaattgtcacaaatataaggcttgaaaataaatatataaaaaaaaattaagttttaacaatacaataattagtggattttgagttgaacattcacatattggacctaaataaatataaaaattagtctttatataatgtgcggtgcggtgcggtttgaaccgcatattaacaatttaaaaccgcaaaccgcaccgcatggtttaggaaaaattcaaatcacgaccgcatcgcagcaaagaatttcaaaccgcatttttttttacagtgcgggcatttgagcggtttgatgaacacccctagctcctacataagtacattactttagttgttttgtggaatcatgaacttgcttgcaaactaatatttgtcttcactcacacgtaaacttctcagaaaatcatccaccctaatattatacccaccactctatttaatcatgattaattcttcaactgtgtagtctcatacctacattaatcttaattaaaatcatcttacttgatcttcgagatgccatgttagattaagattatttaccaagaagtacattaattaactacacgtgcaatatgttttttcttgtatatatttatatacatttagacaagttaattaccataatattgtcccttaatttttttggaaaatgtcatatatatatatatgattataaatgtgaattgctttgaaaatttttgcagctttacaagcaacaaactgagttttttcaagaggtagaatacaagtttgaagaggatgcatctttgtggatgaacaactgctctaatgatgataatataattgaaatagtgacttcaccaaacaatcctgatgggaaactcaatcgagctcgtcttcaacacccaaatgccaaagccatatatgacagagtctattattggccacaatttacaccaatttcagctccagctgatgatgatattatgctcttttcactttccaagctcaccggtcatgcaggcactagatttgggtatctactaaatcaaccattttcattattttttgtcatgttatatttatataaaaatgcatttacattcatttagggtttgtcttaattttatatttgatgcattcatattcttataatagtactctaatttgtttctgaaacaagctactagggcaaaaatttctgggtagtataatggtggtattgcttgttccacatcatttatttcttatgactaatatcaattttttctcttttgcaaattataattattatgtattttttttttttttttttgcaaactaagcatttatagattcaacgaaaagttagacttcacaatcattactgaatgtatatacagatactagttcttttatatattttgataattagtatagtataaatattctatatatataaggtggggatatataataagatgctaactatttataaagaactaccttatagtagtgctggataccatgatacttaatattaatgctctaaaatttaatttatagggaaaggagaacaatataactgagaacacttttgcctttttgttaagagttttgtatgagtttagtgttattataatgaggttgttattgttgtgcattgtgtagatgggcagtggtgaaggatgaaattgtgtttacaagaatgaataaatacttgtctgtgaacacaatgggagtttcacacgaatctcaactaagagctttacatcttatgaaagtaattattgatcaagcaaaagaaggagagacaatatttgattttgggtataaaacgatgagaaatcgttgggaaaaattgaatgaaatcgtgtcggtttcgaaacgcttttctcttcaaaaattagaatctcagtactgtaatttcttccacaaaattaggggaccttcaccaggtaagatatatgagacactttctcttctatgatcataagcattaataatattcatcatgcatcaaaatgtaaaagtatagtgcatggttagtagggctgatcttgagttgtattaggtcttaagaaagtaaaatgttttgatccttattataaaaatagagggtatttttaaaaaatactaaaataaatatatatttttaaaagaactttttattcatttgagtctctaagttgggtgagttctaagcatggacctagtctgtcttagcatagggctgaccctaatggttagtagtagtatagcatttattcatacatttttttctaggtgaaaattagttgaggaaattacattgtatacccactttacttttcttttgatctttacctctatttttattttttttaagatatattcactattatagatgatgtccctattataccccttaagttaatgtaaaatatatgctaaacttaagtggaagatgggggtatatttgacaactcac

SEQ ID NO: 296489 - DNA, 3744 bp, Cannabis indica
cttttttttatattattattttttaaaaagaacaaatcaatataaataattatttgagttatcaatgtaaacaaagggaatgggggccaagccttagtaggtcaaggtggggtttgccagtctcatgtctatttcaagaaacgaagagccaaattagagggaaaatatacatagagacattttaatcttcatagcaatagctacaaaacaatgaagatatcaattgtgatttatgattattttgatgaagataagataggatttgcccaactcatcttaaatgtttcatgcaatcactatctaagattttatgcatgaggaatttagctaaaaattcaaatgattataatcaaaataaattgtatagggaaagcactacaaaaaaaagttaaaaatatcattacaaaccaattttctattgggtaaattaccaacctatgttacattaaacttcaaagaaatcaataagcaaagcatcccacaattacattaaacttaaatacttgttctctacactatattccaaattctagttcttctattgtcaaatcattcttctaagttcatgtttatacacacctacccaaagtgttaaaaatggagctaagaaaatgtgtgaaaaccctttcagatgctaactaactgaaagaactcgcgccaaatcggtatgcagtccatggccaccctaaaccaaaaaaagaagaagaagaagaagaatcagtgttaataacaatacatacttactcaaccaactttatatctttttggttttgagttaaatgaaaggtggaattgttctttaggtgtttcttaaaacattcttcacaccattatctgaaaaccaagttagctaacttgttgaatcgtttacaagataatggaacaaacttagaagaaagtaaattatgtaagattatccgcaaaggttttttccacctttcattctttatgttcaccattattataacagtgaacataattcgaataaaaaccacttgggtagaattcgcttccaaaaactagcttgaggggaggaggctattattaatcaaccaatcccataattgatcaatgttggctcttaacagtacattttcctttggagccgacatcaatgatggcccatgatttttttcactcccaaaagccgacatccatgacaactcactctacgatagcttactctacagtagcttattctgggcctaatccacaggtcgcccttacgcgattcggtctcacttgagagtgcatggctctgataccattcgatacaaccacttgggtagaactcactcccgaaagctagtttaagaaaggagagtgcccaaatggttatataccactaaccaatctcatccttagttaatgtccatttgagagtaataattttgataccataagatacaaccactaccacttaggtagaatttactcccaaaagctagcttgaggaagatgggttactaagtagttatttactactaactaatcctatacttagtcaatatgggatactaatagctcccataaaaaacacaacacacaaatccatttaacacatggttggtgattcttaaacaaacttataaaccttgacagtcaaacataaaacaaaagatggaacacgcaccttgcaaaccactatgtgcgccacgggaatcccttgattcccaaatcttgctaaaagagaaagatcgccgataaggtccaagaccttatggcgacaaggttcatcgtggaaacgaagtggagggttcaaccaacctttactagcactgtaaaatgtaagaaagaaaaaataagtttaacagaaaatcagttgttgaccaaactaagaattaggcctgcatggatgtctaagaactttcattccaccaaattaaaaatttaacatcagtcagtcccagctcaatacaaaatagataatatctgttttagttcaaaccaagctaaagcctaagagtttcatcatcaaaatcatatttagtaaggaaataagactctttggttatgcttttgaaaaatgttttaaatcaagaaatagatatcttcttattgctttctaagagctaattaagaaaacatttatccaagaagtagaactgaagtaagatagctagtttctagtccagcattgacattaaaatcttaaaaagagaaaaaaacaatgaagcttctgacctacaaacaattgcattttctagtccaccacctttgatgagtcctaattcgtacattttctccacctgtagcaaattcccatcataatttagcattagcagacaccaccaatcttgaaaggaaatcccaatttattgtaaaatttgtataggcaggcatagatatgtggtcttgctaataagcaacattaataagagtgagactagttttaatgaacaatggacaaaacatgcaaagtgcatagatcatgatttgatttgattttattatgttagacaaagcatacttgagttggttcctaaacaagtaccaaactcataaaacaaacaaatagataatcataagaagagtaatctaatgatgggagatatgttagaagtgacctcttcataaatacaaaaagttcttgatgaagctatttggttggagtaataagagttatcgaaaggaaccgacgacaagcactgggatccaatagcaggggcctgcaaggtgttgttgaagcttcattaaatgaagctaagtaattctttcaattcaactcaattttatcaagtattactaaattttcaaccaattctcaaaataatgcaattccaaatgaagtgatttcagtccaactcaactgaaaaggtttgggaaataagattctgttcaatatgtcaattcaaataacattagtttaaggagatttagaagctaataatcaaagttttaaatccaataatcacatgtaatacctggggaaagtcaatcccacaagtgatggaaacttttggagatggaaatgcagccacaaaagaacctttcttccgaattcgaatcggtttatttacatgtgctgccatcttttcataactattcccacactcatctgttgccatcttcaaaccaacctcttctattgcttccacccactcacttgctgatccatcaaaaattggaacctgcaatacaatgactcactcacttgtggctaattttactgaccataaattgtcttgcttacccaaaaaccttattcaagctccttgttcatgaagctagacatctctgggttttacattcaataaaacaaagcaaaaatctgtgctttatccaatgatttaatgaaggggtggcaagaaaaattatgcaaatataaatttgaaaagttcatgtgacaatgacactaaaaacatttttttaacacgagaacttcccaggtcacttatcctagtattactctcgcccaaacacgtttaactgcagagttctgatggaatccggtgcattaatgctggtatgatcgcacccacaatgacactaaaaacattaatttaccttataacacgctaatacaatatgaacacgatacgagattttgtaagtttgacactgaatcagaattttatgcaaactgtgttggtgttcatgttttataaatttttcgtgtcaagattcatgtttgtgttgaaaaattttcaactcgacacgccaacacgaattgcgaaaaaataatttggttaggaaaagccaaaaatgtttgattactgagctgtctctctttttttttttttt

SEQ ID NO: 296490 - DNA, 2766 bp, Cannabis indica
tttctcctctccttttctcaggtctagagcttctcctcaagtctctatctttaacggcctccgtcggatgggtcttatgggtaattttctgtaaaactatcatctttttttattatttctacttcccttcctacttacttattactgtattgtattgtgtgtcaattgattttgtatcagcaaaagctcagtctcaagaagctgatgtgagctcagcttctgctgatgcctttactgggttcaagcatttactcctgccaattacagaccgaaaaccgtttctttccgagggaacaagacaggtgacctaaaactttcttaagggcttacttgttttgttctttctgaaatttcccttaattttcattattttaatttgtttcaagtttatgtatatttgggtggctgttgggtttttttagtgttagctgtggaccatttttttttttttttggatatttcaacatgatatacaaataggaattgttattagaaaaaattgtttaattggaaaattgaagagaacaagtgttggatgtttcataaaaatggttccaaacttatggttcgatctatatttattggcttaggaatttgtaagatcaactgtggttgcaaggcactgttgctcaagtttgttgaatcaatgaaccttgcagatattaaaagtattttaaatatgaacaggtctgagtgtactgtgtagtgaggtgaacatttacggatttatctaagaaatctattgctttgcactgtgcatagaccagccttaattagattgtatgatccttgttgaaaattttagagaataaagtttggggaaaggtttatgagaatggtgagcactattcttgaacatacagcttagtggctagatcaagtggttgggtatgttgtgtgggatgggaagagtttcagattctcattgtatgtatataagaaaaaaaaaaactattctttaacaaaccgttgtttctttatttgtgtgcttgctcacccttatttgtaaattttacaggctataggaaccactgcttctttggcgaagaagtatggggctgacatcactgttgtgggtatgtgtgctgacctttgttcataatattctctatttggtaataatggaaactgagttgttgaggcatcacccccaccctttcatgaagctttttaagaagatttcaaggaacatagaagttaatgttctttgcagttattgatgagaggccgaaagactcattgccagagcacgagaaccagctctctagcatccgatggcatctttctgaaggttagtgcattctcttgtgactacaaatgctcatttaaggtctgtcataaatttaaaattaaagaaaataaagcataccaaagtcttctccttagcttcatcatacctttattatatgcctagaaaacataatgaagtccttcatgaacaaattgaaccaaaaagttaggttgcaaattgggcacctgagacagtggtgaacgaaccttttgccctggtgatgttatctccaattttccttttccttctttcttttctgacttaatttaaaccagaccttttcaaataagagctaccctcctttctagttggtaagtagttttttttttcaaggaagttggtgagtagttttgctttactactacagatttcattttgcttttattggataaactatgttgttatatatgtaattgttgcatatatttgcacaaacctgtgttgaaatatcattaatccaaccccttgaaagtttatttattcttatgcccgtgcccatgtgtgtggcgtgtgtatatatatgataggtggattccaggaattcaaattgctagagaaactaggagacgggacaaagccaacagccatcattggtgaggttgctgatgaccttaatctggatttagtggttataagcatggaagccattcattccaaacatgtggatgcaaacctactggctgagttcattccttgccctgtcattcttttaccattataaactgttgtaacatttcagatctaagggatttaactttgatagcatctttgatctccatttcttttctcagactacaaagagagagagagagaccttttgctatctgtgtcatgtgtcatgcttgcttggtttgattggaaatggtttgtgttttgtttgtagtagctgtgtttggactttgtggagagttaaaaacttaaataaaacatggcagtggctccaagataagcttgttgtttctcttatagattgtaaatttgttggaaatgtgtgtactaatgataacacccaatcgatcacgaagtgacaagtcgttttacatcttgtttcctacttcctagtatcaattggacaagagttctacttattcgacagaaccaaaacgtaagtttaatttgtaattatgcctcccgttataaattgtttgttaaaacttaaaagatagggtggtcataaaatactcaatccaacctatatgatacaatctaagatatttacagttgcgcagattggaaaatttgattaacatagtaactaattgagtccacacacatttatatatatttaatattttaatatatatgaatatcatacaataaatatataaaaaattatatatgtataattaatattttattataaaaaaaataataataaatgtactacatatataatgatataaatatattttaaaatttaatagatcaatgtatattttattcttatttatatagaaaatataatctaaaacaaa

SEQ ID NO: 296491 - DNA, 7156 bp, Cannabis indica
ggaaaaaaggttggattggatcggatgcccacccctaggcctagccttagtggcttaaggctaaaagaatctctctctcgattttttttaaagaatgccataaggatagtcacctcacttcaatttattttaatttattttttaaagtaaaaatatcaaatgacaattttattttttcaaatatatcttacaaacaattattttatattatatttaaaaagataatttggtgaatttaagtattttaataatatttattgataattataatttgtcttcaaactattttaatagacaacatattataaatattaatttcgattatatctcatttattttactatattttttttattaatttattttgattatgatgactgtttagtgaacgtacatccaatctagaatttctattcctcccttctttatggatactcaaaataaatatttaactaaaccctaactaaaatacaactcattagttagttagtttgtttgcttgttttttttagatagaattgactagtttgttttgaatattgtaaagtaaaagaatctaagttgtgctagaaagcaaagaagagaaatgaagaagaaacagagctatgaatgaatgcattactcgactgagtaagtataggcctttattcataaactgagaccaagtacaatcaagaaacgaaagaaaataacaaaacactacccaatctaactaactaatagaacaatctaactaatttgttagttacactagaagttggttagcatatcccctcaaacaaaatgatgtagtagacatcttgagtttggacctgaaataagtgtatctttctgtcaaaagtgatttggtaagtgcatttgtaacttggtcaaaaagcaggtacatattggatagacaactccttggacagttgaaggtcttgaacaaaatgcgagtcaatctcaatatgtttgatcgagcatggaacactagattagctgcagtagcagcaacactttgattgtccacccacaagattggacattgaattgggtgaatgtgaaatgcagattgaagagatacaagtcatttaatttctgcattagcattagcaagtgccctgaattcactttctgagctagatcatgtcactacttgttgtttctttacagatcatgagacaagattgcctccaaacattacatagccactagcacttcttttatgatgctcaatctgcatcaaaatagccttcaagagttaagctggaaactcgagaaaaatgaagaccacactgaattgttcctttgagataccttattaatcgtttgtaagcctcccaatgtccagaagtgggaccatggatgaactggctgaacttattgatgatgaatgcaacatcaggtttggttagagtaagatattacaatgctcccaatgtgcaactaactatgtataatgttttatctttaggaggttcaccttctgcaagtgaatagagaggtatttgactatgatgcacaaaatccccattgaatgtaagtgtctttgagagtttgattccaggccctacgagtatattttaggccatatagagctttatgtaataaagaaatatgattaggcttggaagcatccacaaacccttctggttgcttcataaacactctctcattaatgttttatttagaaaagtattacttttatctaactgttcaactatccagttaagttaagggacacatctagagtaagtataactcttacagttgcaggctcgacaactggagagaatatttcttcatagtctatgccaagtgtttgcaagtaacctttagcaacaagatgagatttgattccatccaagctgccatcaacattaagtttcaccttatgtaaccatttgttcccaattactatcattccaggagtgtagggcacaaaagtccatgtgtctaccttcttcaaagtagcaaattaatgttgcataaacttgaaccactaaggatttataatagctgctgaagtacacattgtttcttgtggaataagagcttcaagaagaggtaactttgtagccagataaacttttggtttaacaatacaattttgagatcttatccagattccgtgagttcaaataggaacaacagtacatgtatcttgtacaggttcagagagtattggttgctgatcaattgttgttgatggaaaagattatgccactgaagaaggttgaggatggtcatttgcgggaaaaatagttgaggcatctgtaagagggttgatcatctatctagagggagagggttgaacatctgtgtgaattttaagagatgatattggattctgagtactagtttttggagtgatagtaggttggtcatttatgggtaatgtggcttttgtgtttgatggagggctcataatttgagtggtaacagttggagctattggttgggtagggtggtggaaaattctcagtagctatttcatggtgtggagtgtgcacatgtaaagtatcagtattcgtatgtgtaccgcagttagaagtgtgaaaagtagaagaagggaattggtgagatataggtacctgtgatgaagttgcagtgagagtagttgtaggaaaatgagtttcattaaatgttacatgccttgagattatgacatggccatctggatgctcataaagataccctttatgctgagatgagtaccccaagaacaagtattgtttagatcgaagcttaagtttatgagcattgtatggtcttctgagatgaggaaaacaattacatccaaatggtttcaaaagattttagtcaagttgtttcttgaatagacattcatatggactcaagttccccatgattggtgttgggagtctataattaggaaacacaatagaagacatggcatgccaccaatactccatacctaaacaaacttgggccaacaaagttacgcatgtattgataatgtgtctgtgtttgcgcttaacacgaccattttgttggctagttcttggacaagcgtgttgaaaaaggattccttgatgagtaaaaaacaagaaaatggtcgatattttccaccccaatctgcttgaacacttttttatgggtagaccaaactgtttctccacaaggcttttaaatttgatgaatatgtcaaatgcttgggtctttaaggacaagagaaatatccaatagattctactaaaatcatcaagaaaatacacataatacttaaagccatctttggatatgatgtaagaaggaccccaaagatccatgtgtattagcgcaagtggttgtgtggccgtgctagtggaattaggaagagggagtttatgaattttgccttggtgactagctttgcaaaattgtagggtttttaatgaacccatatatgatatgttaggtggaatctttgtgaggtgctataggcaaggtggcctagtttgcagtgccatttattaatgtcactacttttagaaatagaaaacacttaactagaagaagtaggaaagaactaatatttcttttattgatatcttcaatagtacaagattcaatggacagttttgaatgaaaaagtacaaatgtaaggctcacaagagtctttggaatatgttgttaggtgacactagatagaggagcttgaagcatcatcgagttgataaagaccaccctttgcctctcctttgaggagcacagtccctgttagtttgtccttgtcaaaacaacacgatttataaaattcaagaaagataacattgtcaatggtaatttgagagactctaatgagatttttagtcattgaagacacattaagaacaaaatttaaatgaattggttgaggtaaggaggaaatagttgtgtgaccaatgctagagatgagcaatttcttaccattgccaactacaatagtctcattaccattgtatgtggtggccgagccaggttggttgtgccgaaggagaaatggtttgtggtaccagtatccacaaaccaagactcatcatctccaattccaaggatatagtagttgttaaagcctatggttcatatcaaccaaaagaatttgagagttagagttaccatacttgggggtgacctaatttttgtcaaagcgatagtggcacacagttgcagtatgacccgttcgaaggcacacttggtagactaattgagaactagttcctcgaccatctggatggctgtgattgttatcactgttattgccacgaccaaatctattttgaggatgatagccaccacttcttgaagagacaaatgcaagattcacttgcatcttgagagagagatcagtgaccaaattgtaaagttgaagacatgtttcatgggagagaaggaaggccggaacttcttcgaatgagagaagattactcttgacgtgatgttagacacgaccagattaaattaaggccaagaccgttgagaagttacagcactagatcttgatttgtcataggtaagccaacaatcatcaaacattcgcaattgattgagctttttcaacatatttcgagatcgagagattgtttttcaacaaatgcgagaattgatctttcagttgaagaagatgagctttgggttgactcaagaattgttgctccagtgcatgctagacagtgaaagatgaagtgaaattggctacgaaaacaagaactggttcggtcatggacgatcgaagtcaagataggaggagctagtctttctttttccattatgcatattgatggttgggggttttggtgatcagagtagtaaggggagatacatcagagaacaaaatctgatccagatcatgtccaatgaccgtgggaacaacctgagacttcaacaagagaaagttgttgcgatcaaacttcaaagtcagggaagttgttagggaattggagaagagactctaaatacttgttttattagcagtagcaacaggaaacatagcatgaggatcaaaggtggaagactccatgaaagctagtcaaaaaacaatgatataccatgtaaagtaagagaatttaagttgtgctagtaagcaaagaagagaaatggagaagaaacagagttatgaatgaatgcattactcgattgagtaaacacatgtcttttatttataaaccgagaccaagtacaaccaagaaacaaaagaaagtaacaaaacactaccaagctaactaactaacagaacactctaagtaatttgttagttacattaagtgacatcacttagaagatggttaacaaatattaatgatttatcatttttcaaaatattctccaagttctttatctatgatctattattgttatagcttttttcttgttatcaagtagaactggtcaaaaactgtctctttatagcaaatacttaaagaataggaaacaaaacaaactggaatctttgtgtttgttggtgattttgaattgagtcaataacttaagtagcatgatgaagatgtaacgtggattttgaataaagaaataaggggttgatgagttgcacagtttttaattttaataaatttatcatgaatagtcctcttttcatactacttaaaattagcactggaccattgtcaaagtcctcttttcatgtgtattaattattatacgtatgatttaagcatatatcttctcttgctcaagatagtagactagaagtctatgtatacactcacacttcaatatatatatagtatttttaatttaaaataaacttgttgtagaatcaaatcacatgatcatgtagtatatagacaattaattcattagaaatatagagaaacttgccaatttcagcgttcgaagtccacagttataatagtttaagtttaagccacaacatttattattgatccaagaatcttttcttcgtgccaaaactatagtgacatatgtatatgtatattggcaattgatggaaataaactgaaaatgattactaccaactgaaaaacagaccaactaaaataattggaaatttttaaattgtaaacaaacatataatttcaaaattgtgggaaagaaaaaaaaaaaaacatatatataatttaaaattatatattaatgactaataatgactcatcttgtcatacatttgttctcttcaaaatcagttgactctcgaatgctaactaccacagctagcttattgaagtaaatttatgctttgattaattatgagttgagttaagtaatcaaatctgatagctgcaacaaagtatgaagttgacaaatttactggggctaatgattccagcctccaaagaatcaagataaaagcagtgttggtgcaccatggggatcttagaagcaatcattgtagaagctcttccagccattgaagaacagaagaaaaaggtggagatcgaaaccaatgcacattctgcaattctcctcagtcttgaagatgaagttctgagagaagttgcatatgaaaaaaaggctcttagtccgtgggataagctggcactatctacatgaagaaatccttgccaataagttgtacttgaagaagaaattgtacactttaagaatggaagatagcaaggaatttaggagacacctaaatgactttacaagattgttctagacttgatcaatattggtgtgaaggtagaagaagaggactaggccataatcctacggagttctttacttatattgcatgaacactttattgatacaattctttatggcaaagacaccctcacaatgtcagaggttaaagtagcttttaactctaaggaaattcaaaataaatttgatgacaaacctgtaatgtcctactagattaagtacgttattgtgattttaatttattgtgcacttcattgctaattaacgggtttattattgaaaaacgtgaataatttaaattttcataattaaactttaattttaaatatatatataataatttctataatatgagatcccgttttaaagttacaattgttttacaaaatatcataattacaaaagttgtcgcccaacgactatcaaaataagcatgttgtctcgaagattgaacactctagctctaactgtctcaatatgtacaatcttcattagctcgagctcactactgttcagcctttgttttgcctttacctacacatgtaaacaatatattgttgggttttat

SEQ ID NO: 296492 - DNA, 3970 bp, Cannabis indica
attacgtatataactaaaaattaaccaataaaaaaacccctaaaaaaaaaaatcccttttcatactttagagcttactgctgccagatgtcaaaatgggaggggtacacacagccactctcactttcccgccaactcagaaaatcgcgccaaaatgaaaatcataagccctaattctgcttcatcttctcagaccaaacctagatcaaattaattcttacagaaaagaaaaagaatgaagggtgggacggttcagattaactggcataatctcaaaccagtgctatcccttgatttccaccccatttctggtgctcttgctaccggcggtgcggacttcgaaattaaggtaggaaatttcctgtatcgcccttgtaaccagaaattgcatttttattttgcttcttttctcgattcggtttcgcttgctctgttatttttgttttcgcttgaattttcaaatcttaataatcatgcgttattttcgagtagtagctattataatcgaattcagtatgtttggttggaatttcccgtatgttcggccaccgaaaaaattgaaataaagggaaatggattgcagacatcgaagtttagattagtggcagtgctgggtctttctgaaattgcaatttacatatatatgcatgtatgtatgtatgtatttgtataaatttataccaatttagatattttttagagagtaatcgaacattaatttttggtttttcaatggaaagaaaattgattattggttttgttcagggtttcgtatttgtacttttacacatgtgggagcccaatgtgaataattttattggatattgctgactatttagtatgtttaagtgatgttgtttagcttttaagtcattaatttcgacctaatcattaaggtatccttaattttaccagatatggttaataaattcagctgacccagagaaaaaagtgcccacagcttcgtatcagtgctgtctttctcatcatagtgcagctgtgaatgtcctccgtttctctccatctggtaccgatatcaatatcaattaaattgcagctgtaaatctcatttttattgctagtaatggtgactctgggttcatctactataatgttgttttgttcaaaatgatgattttcttttcttatcttatctttgaaatgcattattattatgtgcatgatagtggtgtaaagatagaaacatgagaaaccttaacaatattggtcagcatgatgcatatttgctaacatatgttagagaatccaatggcggttcccttcctaaccaagacagcttcttaggaatgaattgactattacaagattcaccgtatggttagtcaaaacttatgtaattatctgattaaaattcaccatgtatgtgtttgaaacttatatctcatctcatgtttcttgttatgctatattttatcttgattcggccagatgtcttgcaagcttgatatagcctcaagccctcaaatatctaaatcacgctgacaactggataaatgccagaaccttggcataatttataggttttgtttcaaatggatgtatgctgctaaactctatcggtggtgtatatatatgtgtttatgtatcattttcctaggttcatttgtcattttttttggtggcttcatctttatcaattagctttttcacatttgttgcatgcaatgcctatctattatgtgttttcccctagtctttatgaaatataagtcacttcagaagattttagattacatttactaattagtagcagcggctcttaagactgtttctgtgtaattgtgcttatctctatgcttctttatattgatgtgcattctgcattgacgtgcaggagaacaaattgcttctggcgcagatggtatggcttgtacccttagattttcttttaacatgatctggaccacatgagttgttgcttagtttagtgatttagtttgacaatgtcgttggatctaagaatgtcatttttcaggtggcgagctattgatatggaagctgcatccaacagaaacaggtcaaacatggaagcttctcaagacattttcgtaaggctttaatctttagcaagactgttttcacgtcgtatatagttgtacttgcagcttcatcctgatattggctcatttagcttaggccaaatataagctaggcagacaattttcaaaattgatggaatgctcaaatgtactttgctactatcataaacattattcaagtaagctgaagctctactgatacaatcaacctacattgtatataactaaaatgagaacaaactgtatattttagtgttaaatacgtgtctttttgttgggttttgtgagctaacttatctaccgacattattgcaatttgtattgccttattaaattatggggctataaaactttttctgttgcctagttggcccatgatgtttgctttcaaagaagtgcttatttacttttttattttttgaagttgaacttcagctttattttgcttgtataactcttgagattaggctcattattggatgttgtctcttgccagttttcatcgcaaggatgtgctagacctgcagtggtctgctgatggtgcatttcttatttctggatcagttgataattcttgtctcatatgggatgtgaataaaggtcagataatggacaattataatactcccaaatgctttatatattctactctaactaccaatgcatctatttttcaggttctgtccatcagattttggatgctcactttcattatgttcaaggtgttgcatgggatccgttatccaagtatgttgcatctcttagttcagatagaacttgcagaatttatgtcaataagcctcaaacaaagtccaaagggacagagaaaataaattatgtttgtcagcatgtaattgcaaaagcagaacaacaattgtcagatgattgtaaggttagtatattgcagatctatttaggtaattaatatttattcatgctacatgctaatgaagcttctgtatgccttttgagtgcagtctacaaaaaaccatctctttcatgacgagacattgccatctttcttcagaagattatcctggtcacctgatggatcatttttgcttgtgccagcaggtattagcataaaactaaaatttgatattaagtgctctccctgactgtttgtatacatacctattgacagtattaaacaaactttcttttggctagttgttagaacaaagaaaagaaatgaaagttactatggttggagttcaatttaaaccattcgagttactaaatgatttctatccctctcattatggctgtttggatttatgatctgaattatataggagtcaacttagaagatatcccagaattttatttcatgttcttacaatagtagatcattatcttataaattcttatagatgcaaaggtcctcattatcgattatttcatacttccacagtagtcgcaagttgcaacctatatgtggtaggcagaaggaacataaggaaaaagtcctcaattgttttgttagcttttggcccttaatgatcacattaagttcaggaatcagtttactgcagaaaatgtctgtttctacgctattattacgacaattatgtttgtgtgtaatatgtctattaattttctgtcgtgatgtgtaccataccttttctttttcaggatcttccaagatttcgccttcagtggaaacaataaatacagcttatattttttctcgaaaagatcttacaaggtaagagaaaactctcatttttcagcattaaagtattgtatctaaatatttttttgttaacaatttcaagtttctttttgatagatttaatcacaccatagtagtatttatctaattatcaaaataacgatttcaaatttgtgtctgttaatacaatgtataaaatcatcttatatcatcactttgttcaaaaaaaaaaaaaa

SEQ ID NO: 296493 - DNA, 2062 bp, Cannabis indica
caaaagtaattaagcaaaaaaaatcttaaatagctgcaccttgctccgaccttctccctgaatctattccgccagtccccatctccggtggatggtgggttttggtgatcattttttttatcttggcttcttttgctcaaactttacttagatttttttagagcaacccctcttactaatacaaattggagagttttaataaaacagatcagagcttgagatgttaggctgggaatgaactagaagaagaagaaagataaaaaaaaaattgttaattaattagtttttaaaattatttatttatttataacacaccagattctttggaacaacaaatggagtagttaacactacaaaaaaaaaaaaaagctatttttagtcacaactttttagccataacataattttattgtgactaaatgtgacttttagtctcaactttttcacttttagtcacaagttttattgtcacttaaaataagtttttctgtagtgtaaattaggtaactatggactaaagtgatccttgagttgggggttgttgtcacaatttttcaagattagagacttatctgcatcaaaataaactttttagagacttatgtcgtaatttaatatcaacacatgacattttaaggaggccaaaaataaaagatttgttagaaagatgaccaacagacttacaagagtctcgatcttagggactattattgtcgctattttttgagattgagaacttatctgcatcaaagtaaactttttaagaacttttgtcgtaatttttccttattttattaatttacttttgtattcttttagctattttttaataaataggagtcactctattggaataaaatagttagaaattctctttccctttctttttctctcttcatcttcatcatcctttagccaattctcatagtttggaactcgtctccccatttcatccacctccatgacttcttcccgttcacagtcactttgttcatgaccccagattttgcatcggtaacaaagtagtggaatgcgatcaaatttgaattgtatccacacttttctctcccctgacggaatgaatcatcccacaaaaatgctttcctttattgtaaaaccaatacgaatacgaacataactgctaagtaggatttgttgcgagttactccacctatcctctgcaacctctccagtcatcgctctaattagtttaacattgttcagcataaaagactctaatggaaagcctctgattcgtacccaataaaataatttttctaactttgcatctttccaattctctgtcaatggccactcttccattgtgagtattccccaattgaaaaataatggttgtttgtctagcactcatttggcatcacttcgagaattaaaatttatcttgaaaacatctttaccccccttctcatcaataactttagccttctagttcactaccgtcttcaacatttttttttaaatatactctgaattaatttctcattcattttgtgttttgctaccaccctgcgcaagagagtttgttcaccaaactcatttgctgctttcttattctcctcccattcctcctcaaccttaacctccaacttattagtcatattcactagaagactccatattcaccatcaaactaaacaaagccagaatatcaatcattattgcagttgcaatgtctcataaacagggtcttgtagaccatttttattaaataaaaaatagagtttattttgcagttgaacactccaaactaacattttacttgcatttaaccttccaagctcaaattttgacggtgaaacctgccaaactattgaaccgttagcaaatttaaggtgtcatccatttacttcttttaactgccaacatagctgcttatgtgtacaattttaaacacatatcgcatttataatggtacacctaatttaattattaaaaaaattataaaaagttattttacaaaataaaatttgaaaaataaaaattatttcttattcgctaaaaaaattagattcttataaaaaatacttttattttaaaaaaa

SEQ ID NO: 296494 - DNA, 6565 bp, Cannabis indica
ggatcccatcagaactccgcagttaagcttgtttgggggagagtagtactaggatgagtgacctcttcggaagtcctagtgttacaacccctaaaaaaagaaaaattgcaccctaaaatcccaacctgtctagttgctatatatttgttttcggacacattaaagtaagagttgttttgtaaaaatagtctttgtcaaattttttattattaaaatgacttcacacagaaatttattagcataataaccatgtatagtcacacaagcgactaaacattacattgtgcgaccataaaatgaccattatggtcattttgtgtatggtcgcatagagtaaattgagtgtggttcacattgttagtttggcaaatttcgtggtttgattcttcttttatgtatgcttgaatctgcgtagagttttcttttttatcggtgtgtttcagtacttggaaggaagcattgttctatgtctctatagttttttttaatgatatatttagtttgttaacataattcttatatgctgattttttgtttttcttactttctaatgggggattaaatgcacccgctcgaatgaagataattaaaggcttaaactttccattatgttatttttttctggacatcagtcttattcaacaaattgattgattttttctttctttttttttttcacaaccgccttgataatcttcataataataattcattcacctatctctattgactgctacttataattatcaatggtccttaattagaacccttttcaaattgcaacccctgagtcttatctcataaaaaaacgggttcaattgatattcatattctgcaactccgtttggcctttcttttttgtttcctcctttcgatatgtgtatacttcgtcccttgaattcttctggcctctgtgccttcttcacagttgccttgcaagcatttactattaggtacatatcatgccaagggaaaatgcacacgcgtcatcggttgctaagccagctgaatcggatgagagggttgaccttgatggagacaacgaacctgaagaggctatggaagaagagattgagtatgaagaagtagaagaagaagaggaagaggtagaagaaatagaagtggaagaagatgaagaagtagaagaagaggatcccgaggaggaggaggaggaagaagaggaggttgaagaagaagaggaggatgaagatatcggtaatgctgatgatggtggcaaagttgaagatgaggatgaaaagaaaaaacacgctgaacttctctcccttcctccacacggttctgaagtttatgtcggtggcattcctcatgatgcttctgaagaggatttaaaacatttttgtgagtctgtaggagaagttgtagaggtacgttgtattgttatttacaccgaatctcttaatttcttcattaaacatttgtaataattatgtattgtttattgacaacaggttcgaattatgaaaggcaaagattcaagcgagaacaaaggctttgcatttgtcacgtttagaaacgttgaagtggcttctaaagccatcaatgacttgaacaatacagaatttaaggttggataaattgtttaattatgttcactgactgattatgtagtttatttatttctagaattttaattatcttatgtttgctactcctttctttctcagggtaaaaaagtaaagtgctcaacttctcaagcaaagcaccgtttgttcatcggtaatgttccaaggagctggggagaggaggatttgagaaaggttgtgaaaagtatagggcctggagttactggtgtagaactggtcaaggttagtgcacttcggttatgtgctgtctgttcttaaaacgttgaagtaatctgttacttatcttacatttgcttctaaatatcttctaaattttcacttaatgtgcttgcttcctttgttttggctaaagatttgttttttccttctcgatttctttctatattctatcacaggatatgaagaacacaagcaataaccgaggctttgcttttatcgactactataaccatgcatgtgctgagtattcaagacaaaaaatgatgaatccacaatttaagctaggtgataatgctccaactgtgagctgggctgacccaaaaaatgctgaatcatctgcagcttctcaggttctttttaactcttatcattaaaataaaaagctgtagtttagttagttggacccaagaagttagctatatggtgctgttagctaattgtcattttcatttacactcaattcaccaatttttcgttcaggtgaaagctgtatacgtcaagaatctaccgaaaaatgtaacacaagaccagctaaagaagctatttgatcaccatgggaaaatcaccaaagtggtgcttccacctgcaaaggccggacaagaaaagagtaggatcggttttattcattttgcagagaggtctagtgctatgaaagcactaaagaacacagaaaaatatgagcttgatggtaattactgattcgggtcctatatttaagtgtgcattctgttgtcattattagtaaccttcaaagtttttatttcattgattatcaatcaggtcaagtattggaatgttctcttgcaaagccgcaggccgatcaaaagtcatccggaccaaatgttcaaaagtcagggctacttccggcttatccacctcgtgctggtgccggttatggtatgatagggagtcactatggtgctttaggtgcagggtatggcaccactcctggttttgcacaggtcagacatttgtgaatatttgttttgttttggttctaactagtgacaatgattatgcaatcttgaatttttgttatcttttgcagcctatgatttatggacggggaccgacgccttctgggatggcaatgatgccgatgcttcttcccgatggacggataggatatgttttgtaagtagaattttcattttattatacagtatatgatcaccagaaaagaaccgaaatttccaagaaaaagaataaaactttgttagtcgcctgctcggccgcctagtgtttttgaaattcagtgctattggtagtgatgttatttcactcttgttctccttaggcaacaaccaggtcaacagcctcaactcgctcacacgcacgcgcacgctcacgctcatgctcacacgcctccatcatcgcatcatagagggagtggcggcaggggtggcggtggaagtggaagtggcggaagaagcagtggcagtggaggaagaagcagtggttcgaagggaaggcatagtaataacgacagtggtggtagcggtggtggtggtggtgggagtggacgccgatatcggccatattaattaatgattttcttagagagagttgtctcaagtttttaattgtaactaactattaattaacagtttcatttgatttattgtagtaggatgatattatttagtagaactaaaaaacatgcttgttcatgaaaatcaatcttgtcctagttaaaattgataatgtattattcaatcaaatgtgctttttaaggttttgctatttttatggtttctcttaacaattaacatagacattttcttataattctgttttaaaaatcttgcactattgttcattttagtattctttgttggtttattattagaataatttgctttaaattttgcgatattgattttgttctttaaaatatacaatttaaaaattcttctttaacttttatatatacactttaaaaattcttctttaacttttatatatacactaatttggtcatgttaggttttgtttattatttcgtttaaaagtgtgtttttgtaaattagtaactttatcttttaaacgttgacaactatcaaattgtacccaatcaaaataaaaatgagaaaaatttaacattttttatttaattttaaaaaattaatttagatattttgaatgattaagaaattaaaattttaaaactacaattagctatttaaaaagttatttattttttattaaaaatttatttaaatataaaaatatatattaaaaattcaatttttgtaaaaaataaaatttacgagaacaaatttgagtctattttttttttctcaaaaaatctaggtttatataagtaaacataattttttttaatttaatttataattttttatttcaaaataattttatattttattgaattcttaattattttttttaagatacgaatttataaatataaataaatttgattttttcttaaaaaaatcttagtttgtttaaattattgattggatttttaataatttacgttttattttttaagatacgtgtttataaataaaataaaatttgaaaatatttttttaagaataatttaagttttttaattaatttaatatttttatcatattttgtaataatttctattgatttttttcataattaatagaatgttataatttttattttattttttttaataaaagggagcaaaattttctatcagtcaaaatttagagagtaaaaatattaatttttaatggtaaaagaaatgaaacttaacaaaaaagacataattatataactgttatattttagggaaaatttttaaaacatcatatattttaagaggcatgatcaggtggtgtcgaaagttaaagaaacaaaaatactaattattattataaaataaaatctaattatcacaaatttaatcctcaaattctctattattatgattaattttaattgaatcattaatatctaatttctcccaagaacatcttccaatattttcccaatctgatttctttagtaataacatttccaaatatcatgtttattttttaaactataaattcaaattttaaatttcaaaaaatataaatttattttttatcttcctacaaaattaaatctcttaataatttattttttataatggtatgaattaggataaaaaatttaattttaaatgtgggattgtattgatttctaaattgaacaagaggatcaaggccttcaaaagaaatactcataagagaataattgataactagttgtgtttgattattccttgtcttttgatggttgtagttatgaatgattaattctaacaactttgtcagataatgaaaaagaattctgtatacaactcgatcaataatatcaaaatctgataaatcagttcaacttaacttattaagaggctatcctattaaattacaaaatttcattttagccaatgatccaatcagagataattaattaaaatcaatgtattgtaaaatgttaaacgttacattaggatttacgatttttaattttggataaatgcttttgtaaaacaaatattctcaatttattaaaaagtctatacaaaattgggtgaaataagacctataaaacaatcttttcataaattgtagtatttagggtcaaaatcaagctctaaatttatgtgttgtaaagttataggaatttgtgcttattagaatttcaataagtaatataaaagattctatttaaaatttaataatcagaagttgagaattgataataatgattaatcaataaccaataaagaattattagtgagattaataatatctccaataaagaagtggatcccgaaaagggtagtgcagtaatttggccccatgggacatatttgagacaagagttaggattaggggacctaaaacttaatagtacttgttcattcgagtattataacacttgtacaatgcttaatacccttttttaatctaaacttgcataattcctaaaacatataagaagataatctacataattagtttagtgaagctaaagaagattattatcaaaatcaaccatgagtttgtttaatttcttgttagttattctttgttggtagaccgacacatcctcttccaatgtggtcacattggttgaggatggtggtgatagaatgcgagcaagctcaaccgtgtcttggttgcagttgatgacacggtcaaagcaaagatagcgtccataggcattgttgtcttcgaaaacacaaatgtgagcatccaccacaaatttgagatcaacagttactaatactccattttcatacatctcagcagctcctttcaaataaggatttgtaattgtaaggtgtgaggtcatcaacaatcctccattaaccgagaccatgttcaatcctcggtccatggctagcgcccacgctgtcttctcggctagggttttcgataaggcgtgccacaactgatcatttgaaggtgaaaaatggtgagtattgaatgaagtaaagaataacaaaaataaatgaattagattagtagtaactaatagtacttaacaacacaatttttcattctgtccttttcaaaataattttttctttctttttattttatatcaaatttttacagtatttttattatatgattaaaatattatattttgaaaacactacaataataatatctttaaataattgtaaagcaaaataagatggaataataaaattcttttatgtttacttttttttttccaaattt

SEQ ID NO: 296495 - DNA, 2071 bp, Cannabis indica
gttaacataaatcacttcaaatctcttaaattgataactaatcagattggaatgggtattatttagggcacaaaacccaacactacatcctggtcatctttcctattagcaaatcgttgaattaatccttccacgttaatctctttcggctagttgaagttgtcgttccatgatgactacatggtctaactcatcaggtttgctcttctgccaaacattgtcctcagtaactttgtcctgagggtcatcatcattcatatcctctactgcatcctcggtgttaacttcgacgtccttagaactactttcttccaattttgcatctgcaatggtaaaatcatctcgattcttatcttcctctcaacggattttctagcgactagtcacctcttggagaccactagtatctcatactatggcgccagaaccagtgaaacaaagcccaaattttgttctggtgagggccatggttacttgaacgtaatctacaagtggtcttactactttcttcagctcttaacgaaaccaccaaaatatttaccaagatttttggaaacagagtaaaagtaataaactgaaaagtaaataatcgatcgagaaagtatagaataagacaaatagtttttaatgtggttggggcgtgaaaaagccttagtccacgagttagtattattcagtaagcttttacttgcaaatgcgttatgaaatacacagaatgtatcatctcaagtttccctgagcaaagtatacaagagagttcaacacttaatccaagagattagtgggatatttatagtagttttagaattatattaggttttccatttccctctactgcggagcttataataaagaatactcgtgggcttgaactccagcctgtggaaaagataatctactgactaggtagattagattgggaatgatttgcttaacactgtgtacactgattgtggggaattaatctgaattaattgcttaatatttgttgtgggaagtttcccctttaatcttgattcgatgcactgttgttatctgccaattggagtttccttatttgtgaataggaatataaagggaaactagaagggtcttctaggaaagtggtgtcttatctctacgatcttgtgaggctagatatttcttctgggctcattttgttgaaggcgtaagactttgctagtgcagaaccatgacatgttttcagaaggtaacatccagatgggcttggcccatttttgtctttaaagagggccccacgatgggtcttaaatgttgatatgaagtccacatgtctaatgtcacaaatgaagataacacttctatggtacaagtgttggcttctacttattagccaaaattagggtataacaattgccccataaaagtatttttcaataaaaaatgactttttaaatgtcttcaagtgtaccattgtatttttcccatttgaaaatttgcatgctttatttgtgcagttcaaaacttcgaggaaaatcatttcttcatttaatcctcccactattcttctctcacacacttcccatctgtttgatcaattttcttttgattgaactattactctcatttaggtaaaattttgaactctctcttatttttgccatttcttcccatgaacctttctagtgtttggaattcatcaaccatctcctcctttgcatgccttcactatctttcacattttttttgtcaaatttcatccgactgtatttatcttctaaaagatcatcaagtcccagtttctttcgaatcggagatcccaatttctttttgtatacacgtctaagtagaatctagttattgtatatatatatgcccccaagtaattttaaagaaataaaactttatgattacttgaaatactcaaatcattatttaaaataaagaacaacaattacaaagataaactttaatattaaaaaataaattattagtaattggccacaagtgttcgtagttgtagctgtttttattagcgagccattaagccctgctaatttgtaaactccataggctctaagtgttatgttctttctagggcattggcaaa

SEQ ID NO: 296496 - DNA, 1926 bp, Cannabis indica
tatatatatatatataaaatccctgaattaatttattcgatatataataacttcggtttctctactttctactatagaatcttcatgtcataattaatatactatactatacaaactcctatattaatcttaaagtacgtaatttaatttgtataatatttaaataaaacattaattatttatgtggttgtgcattgtataacatgggttaatgtgacatctatatataattatatataataatataaatatccatatagtgaaatatcttttacgtgcatggtcattatttgagacacatatccatatataatatttgttcacctttctgatactactatagtctttcttattattatactctataatttaaatataccattatacataaggcaactcgaatattctaattaggatttattcaacaattattcaaaaaaatatatattctaattaggctgcactagcttagacaattatattggaataggaaaaaaaaaagctaagagatcatgttctttattattattgtctccatgcccaaaaaaaaaattaaaattcacataatactctttttttatgttctttttttgccaataaaatataaaatataaaacataacataatatatctatgattgagagaataattaactaacctacaagccataatcaaaataatattatccattaaatatatctagatatatcttttaattaattattaacttgtatttaccagtctttcaagttgtaggcataattatttaatttatttttttctttaacacaatttatgatgttattaacccataatatttaatatattttttttaaaatgtcaagctatagaatatagatatataacttagccaacatattgtcgttaatgaattaatattgattttattacaacatagatcaatagtgtcatcaagaaattagctggggagcacaagaatttgttaatattactatcaagaaaaaaaataacagtcaataattaattaaaaattatgagtcaatttttgtactaaaatgctcaaaaactgtaggatatattgtaatgtcaaatctgtcactatcaaaaaaaatggatatataagttttcaagcaattctattcaccaagaaaatgacaaataaaattgaagcaaaaataaattaaaaaaaaacccacttcttttaatgaccccttagctaaggtagatatcattttgtgatgagtgtaataaattaattaagaaaatgcagatattggttaaatttgagatgatgaggtgtccccagtagtatagtactttttgggaaatgaaatctgagccgttgatgccacccctctctttctctatttatatcaccaactcacacttcattttattcattccccaactccatcatttctcacataccaaaaataatcactaccactacttcttatattacttataaaacctctgctacatactcttcattaatggcttgctttaatatgtccaaggaggtcagccaatttctctctctctcactatatatatatatttatatatatgtgtttcattaattttattgacttggggtcctattgatttttccccctaattagagaattttcttttggggtactcataattaaatttatgcatacatacattgcttcaattgccaaaaattctttgattaaatatatactagctagctaatgctattacataaaattttatttgaatatatatttacaaatatatttatttatatatataggtggatcatgaattgaagaaagaagaagaaggtggtgaagtgttcactcttgatggtacggttgattggcatgatcgccctgcaatcagaacaaaatccggtggttgggttgccggaactatcatactatgtaagctcatatacatatacatacatacatatat

SEQ ID NO: 296497 - DNA, 5321 bp, Cannabis indica
tcagcagttgggggttcattgataacaggtccaacacgggctctcttaaggatgtttctgagggagtcgcccaccataacagagtgtggagtgaaagcagaacgtttagcacccgcaatagctttgcctttcgacttctcagtggttctagccatggtctgaacagcatcagagccaagctcgacagtgttgtgcacagcagtggtaaaggtggggaaggcagcttgggtggtgttacaaaaagcatcaacaggagcagcacagttgaaaccaagaggaaagactggggcaggattggttctctcagaggctaagaattcaggggaggagatggggttattttcgaccaggccatgtggaacagcctcttctcctctaggagcagcaccagaggatgaagaaccaacatccacatcctgagtggtgaggaattggttgacagcagcagcaagtgttgatcactgcccctgagataatggcaactcatcaagagggtgagagttagagaggtcaaaaggattccgtttaaagttggttttagcaggggccttgagagggatcttataatgcaaaggaggtgggaggctaaactcatcacacttctttaggtacgagacacatttggtgagggtgtgatcaaacataccacaatggaaacagatattaggtaagctttcatacttaaaattaagccatttatccttatgaatgttcctaaaatcaacaaggatacctctagggataggcttggaaacatctagcaggacacgaatacggaggaacaagccagagactttaagaagagtcattttagtagcttcaagaaagtctccaacttcatctccaatcattttggccaacttataggatttcattccaaaaggaatggagtgaacctggatccaaaagagagaataacgtatctggttgggaagaagggtgtcaagaccagcaggattggcactagggaccaagcattggtcaaaatgccacggctgtccctcaatgaccctcctcatatccccctcacacccaaattccaccatgaacatcccattaccatactcagagaaggaaataggggcacgagtaatccatgcatttcgcatagcttcttcaaaccattcaagtttgacattcctagtagtgaacactctaaagacaagacaaaaggacttccccaattcaaccccctcacccacatcatcaaggtgttcatgaacgacagcctctttctcagtaagggacaacacactagccatattctcagtaataccctccataacccaaaacaagtaagataagtaaattacccagtaatattcagagcaagaaagcaaaatcaggcagaagagtaaagaacgccaagtaacccagacctttaaatagatgaaatgagaagtatacctgtaagtggcaatcttaggtgcgaagaaaatacttgtaatgatcggcctaccctgcagtaatcctagcccaaatccaaaatccttagatgtaatcatcgatccttccttgagaaagccaaaacgacggcttgaaataaatgggatgggatatacgaagagagagagcagataatccaaggagagaaatccctggagcttgattctctgaaagacttaattaagagagaaggagaaagaaagaagagaaaacgcaaaggagaagacagtaaaattaattaggggttaaatcacaataaatgaggaaagagaaactattaagatcaattacacaagattacaaaacaagtaaaagaaagaaactaagatgagatttagaaacaccacgaggagagatcaaactggaagggaaccagaacactgtaacgggatgcaacccactagaaagttccagagagagaaggttcatttctcatttaactaagcttttattgtcgattaatttaaaatttgttaagtatattattgtttctgcatgatgtttagtaaaattagtttacaaaatatcacctaccgagtatgtttgtctatgctcaattgtttgccactacatcccgagtgaggctcccacaagttcgtggtctcgttcaatccactaagaaaggatcatccaccattgatgagtatgttcttaaaatgaaggggtatgcggataatcttgctgctgctgaaccactctcggacgaggatcttagactttatattcttggaggtcttggttcagaatatgagtcgattgtggtgaattttacctccagatttgaaccactgactcttcaagaaatacaattcatgcttcatagtcatgaattccgtctccaacagttcacttcgtcggctctaaacaatgtgcaagccaatctagcaaacctttctgtcaatggatccaaccgtggtcgtggataccgtggttcatatcgtggaggcaaaggccaatccacaaatcgaggtggccgaggaaacaggcccatctgccagctttgtggccgtgctggacacacggcacagaagtgttatcaccgcttcaacattacatttactggaccacaaactcctggtgcatcaagctccaacacaactacagaagatcctcaagctcacatttctgagtctgccatctctgaagaatcccctggcacctggtatcttgatactggtgcaacaaatcatcttacaaccgatgcccaacaacttcacaatactattgattacaaaggaaaggcaaaagtgattgtaggtaatggccaaactatccctatttctcatgttggctctaacagttttcctactaatattcccaaaaaatctttagtgcttaaagatattcttcatatcacgaaagaataataatgttgttctccaatttgactctttgtgttgtcttattaaggacaagacaatgaaccaagttcttctcaagggttccctcagtaatgggctctattaacttcaaattccctcccagtcagctccaagtcatccaagaactaagcattctagtactaatgtttaatgtaatcttcctgtttttaattgtagtacctctagtaacactgtttttgataaatctaaactaaattctgcatggcattgcaggcttggtcatccagccaagcccattttatctcaagtttgtcctaaatctaagagtaaagatgttcgtttctgtgatgcttgccaaataggcaaaatgcaccaattcactttcaaaaacactatgaataaaactatttccccctttgaaataattcacacagatgtttggggtccttctttttatacttctcgagatggctataaatactatcttagttttgttgatgattacacaagatttgtttagctttacccaatgcaaacaaaatctaaagttacagaactgtttactcattttaaaaactttgttgaaagaatgtttgacactaagatcaagagcgtgcaaactgatttaggcaaagaataattacccttatataacctgtttaatgaacttggcatcaagctaaggcaatcttgtgcccacacacatcaacaacaaggtcgtgttgagagaaaacacctccatgttgtttatatgggtctcacattgttggctcaagctcaaatgcctttgagcttctggtgagaagcttatacttctgctgtatacaccataaataggctccccactcccatattaaataatgtctctccatttgaaaaattgtacaatcgaaaacctgactacactttccttaaggttttcggatgtgcttgttttcctctgttaactccttacaacacacacaaggttgcatttagatcaagcaaatgtttatttttagggtataataatacacagaaaggataccgatgcttgcatccaagtggccaagtttatgttgctaggagtgtcaattttaatgaaaatgaatttccccataatgagttattttctgtgtcaacttctcctaaagctacctctatcattgttaaaacagaatgcttcaaagttcccaactttcaaaacaatcagtttgtcactcatcctaccactcatcctgataattctacatctttacaagtatcaaataacacaatttcaggatcacagtcaccaaaccaattggtcactccctcacacagatctcctactacacaatctagcttaagtcacaacctgtccacagactcttctcttccctatcctcttactgtagacagaactgagtcatctcagaccattgccacccactcaccacctcccctaaacaacaacactcattccatgattaccaagtctaaagctggggtttttaaaccaaaaagctacttcacacaaattaagaatctgttagaaccaaccactgtcaagcaggctcttgcctagagtcactggaataatgctatgaatcaagaattctatgcactcaagagaaagaaaacctgggtacttttacccctacaccagaaatgaaaattattactaacaaatggttgtttagaatcaaatacaatgcagatggttcggtggacaggttaaaagcaagacttgtggcccgtggatttcaacaaacatcaggtctagactttgtcgagacatttagcccagtgataaagccctgtactatcagaatcatcttctctacttatggctgggatattcaacaaatagacataaacaatgccttcctaaatggagaactaaaagaagatgtctttatgcatcaaccctaaggttttgttgaccccgaatttcccactcatgtatgcaagttaaacaaagccatatatggactaaagcaagctcctagggcttggtttgacaccctcaatgccactttaattcaatggggataccacaactctacatttgacacaagtctatttttcacaaagaaagaaggcaagctgatcttgatactggtttatgtggacgatatcttggtcacaggtgactgtccaactcaaatacaaaatgtcatcactgtcttacatcacaaattctctctcaaaatccttggatcggtacataactttcttggatttgaggtttaattccagtgtaatctacctaactcagaggaaatatatccatgatctacttgtcaagacaaacatgcttgatgtcaagcccatgccaactccaatgtgtgccactgccaagttatcctttgttggaaattattttaccaggatcttagatctactgacaagtatgttgattaacaccttaaatatgaacttctaaaacgattataaaataaacacatataaagtacgagaaaccttacattaggtgcagcggaatattatgtctccttccgttcagatctctaacccttatatcctttctatcgcagagtattatcaaga

SEQ ID NO: 296498 - DNA, 1781 bp, Cannabis indica
tttaagtataataatttccccttaaaaagtgctttttaaggaaaagggactttttaaatgccttcaaaatcatcaaggcccagcttctctgaaatcagagtttccacgcgaagtttttcaacacccagaatctttcatcacaccagtaagggacattcctctctgctgactttcttttatgttttcaatcttaatttcttggtatgttcttttagtttgcattgttttattatttggtcaaactttatatgaatgtttgagtaatctagggctagaaaatttaaggttatgtgattcgaaagtcctgggttttatttttgctctatttttccaagaattaggacattattctctttaatcatgtcccaatttaacccataattcacactcccagaatccttagaatcacactgtcctcaatttctagccatagcttttaagacgcaaatctaaaatcctcaaaccatacttgaaattaatgatgcaaaaattaggaaccacctcattaggtctgaccagtaggaagcttctaaccattataggcaattcttacaagaagtcattgatggtagacgccattatttgcaagaagcaacttggcttgaatcgtctagtttagttaatatccccttaacgaggttaatgtttttttacttccagtcactgttaactttttaccaaatgacttggattttgaaatcatggctcaaaaagctcgcaaatccaagaatccacagaaccctactgttaccttcgaggctgagtcaacagaatccaaagtcaggtccatcggcccttatgtctaggttgttctgaggtcatgtggcattaggaacgagaaaggatgttgcattcgatctgtggctcagggagaattcaattgtttcccacctgaacgtctggttcaagatgaaggctgcagcaccagtgatattgctttaattttagctcacacaaaaactcttacaggatccttgccagtttagaatcgctttaccacattttgaaatgggagtatccaacacccttggaaattttatatttctattctataaaggcctgtcctacgaggaagcatggagcaggaggtttttactacctcgagacccatactaatgatcgtaggatcatcgtaaggttacccaataaaaagagctcaaggatgacttcttttggaccaccgatctttatccaattaagaccacaaggtttcaaatcatacataagcactagattttaaggaaagacatgagatcctactcaatcttccttatggactgcgagtgacaaacttcttgttacatgataataatttaaaggcatgtgcccttctcgatagagatcaatgcactaatgacttcaaaacctctaagtttccaaactgacagcaagtcctagtgctcgaggaggaagaggactgggattatatcgctcgcattcattatctcaggaatgtaaccactcgggaacctaaagatgaggcctcctgaggtaataattttggtgcttatggatggtctcctactgctcttagggctgatcgaacaacattagttcaatttaaggatagtcaatataactttttcatttagaactgtgtcgacctaatcgcccatagatttgattattggtatcctgaacattacgtccaattaagctataacagttcccactttaggatcgctagacagtatggaactaactttgatagggccagctatttagattaggatatgtctcctcttaactcttttaatctttatatgattactggatctagg

SEQ ID NO: 296499 - DNA, 2756 bp, Cannabis indica
aaactaacctccctagaaatttgatttgaatattgattacagtatagggtttatgattagttactagcagtttcctaagttcttctagggatatatatttgtgataggaaaattttagaatgatggaggtcttattgtaccttactgttccggaacaagcatctttctaggaataaccccctgttcggtgcacaagattaggaattcaagcctactgtcctaaaacttgttgctgtgaccattgctctaggttctccttacaaaatgtctgtgctttggagaaacattccacttcctgctctattcctgctgtctcctgagaatttttccactttcacatcctcagctcatattctctcttggatttttttgaaactttttttttgactttagcccgtctcttattttctaggagtttctcgaactctatcccaagaactattgtctgaacaacttgggaagcgttctccacttttcccatgtcgcaccgtacctaaagaaataggtccacgtaggtgaagacactgacatattccttaacaatcagatttctaggggttctgggaacaagtactgaagaggcaaactcgagaacgaaaatagagaaggcgttgatattcgaggggcttcagtagacttccagcgcatgtaccttccatgtcaaaaacttccctaggcctttgacataggcttggacaaagttctttcccttgtcctacgcttaacgttgtgctacattctgtagcccaccataagctgctcgttgttagaataacattttctgacccctccgtcagactcacgtatttatacatcttgccctctctgcatggttgtgcctctgttgagaaaatagggtgcccaggctcaaaagcaccagtggcctcctcgatcattagagggttaactgggcagacccgtgtgtttctaaagaagcttgggggcagtggtaacaaccagattgtccacattcacctttcccttctcctctcgccagggtaggggaatcggcatttgcaaggctatctctattactctccacaatgcattcggccgaagggtccttaacataacctcctttggctggatctctagacctggcctacagtcaagccactaactttcttcatctatttagcgagtcctcctttacgctcaatataacaaccacaacataggttttagatctttcctcaacttttaatgaaagcactaaaatgttaactgagattttcagaaacttattaattagagtttaaaaaagaagcaaaacaataaatagtagacacgtgattcttacatagtttaggtgttaattattcttagtccatgagtccattttattagccttgtaggcaagcactgcatattacaagtgtatacactttggacatgcactctctattcctctcgtttctctctaaagaaggaactaataggaaatttcagcagaggttgtgtaggttgaagaagttctcatttttttcggtcacaaaatatatgggtatttatgggaggtttcttgttcaatatgccttcaaggccagccctactgccacagatttgactgttgatttggtatgtggaagttccatcgtgtagtgctcaaaggtacgatggatccggatatcccctatgtatcgtccaaatgtctttccttttcaaatcatctcctcacatggccgttggataatgggaaggtacaatggtgcgcatgccttgtactatgacctgacattgggggacaaaaattgatgttgtacccaaaaaagcattaatgtcactcctgtgatctgacaagtgcaggtggtggcccctcgcgacaccgtattaaaggaaaaactgtcctaagcctttctgctatagactcggagagggccttggcttttataagtcatttttgaacccggaagggacatattccctttcgctacaagtatacacgttaatctttcatgtgctcctgccttgtggtggatgtacttttcacgaaagtccttcgcggaagctagagccacgggcattaattaactacaaattagctttacttcttttgttggattctacttgtcatgcttgcaaaaatctaaataaaacttaaaaataggacccacattataaaataatcacatataatcatataatataattaattaatgttaattgccttattaatctcatattcttagttagtggtcattatactacatgatatgccttgaaagagataataacaacatgtttatttttatcttatcatctgtcaatatcggtctagcacaacataaacaaatacgttcgatcaggcctactttactattggcttggaagcaacattccactccctgagtgtaagtagaacatttctttcattattacgtcagtgtaaatcctgtgcactaataaatataaaactaaattatttaaaggatacaatcactattatatttcactgtgaccctatgtcactatgattatatttatgtatatgttcaagatttaataaatatttcttcgtagacctatattcatgtaaataaatatgtaagtaattaatttgatgaagaaaattttaattctatttatcaatattgataacaaaagtataacataaaaaatatgattttgtaagggcataaaaccaacagaacaaaattttgacttcttagtactttgtgatctctacgtgagttatgtattttttctaagggctcgtttggtacgtcgtattgtattgtgttagattgtattgtatt

SEQ ID NO: 296500 - DNA, 6360 bp, Cannabis indica
aagtatttcgatccttaaaattatagtgtatatatgatttattaatttcgcactttattcataatcattaatgttttaatctatacaaaacaattgtctaacacattgatgtattgagactttgagcaaacaataataccagcttcttttcttctagattctctttagaaaattctaatagcacctgcaattccttatctgttttttaaatgggaaaatctctgaaccgtgtggagggtcgaccactaaccaggcccagaatgcagagcaacactgcagacccttacctcatttatcttgaaatctgttcagttgtcagtttgtttgtttttttttccacacgagctagaaagaacatctctataataagaaaaagatgtgattttatttcattctagtttttttgctgggaatggccccattcttctaatagtttgatacagagagaaagacacctccttggtcaaaacacaagttcagagtgacagtaccgaccagttaaaaagcgattatgttatacggttttaactcatgcagtagcgcaaattatatcacttttgcgccgagttaaaaaaaatgaaaaacatgttcagaagctgctacgtttattttttttttcacataatcattattacacaaccataggtgctcgtacaagccaccataggtggctcagcactatttatgtacattacatagcttaacatttgtcgtccctgcggtaatctaaaccaaaagacatagttgcacaaaagaatccacaggagataaaacccagcaaaaagccatagacaaaagtcccaaaaaaaaccgttttcagcagttcacttcaaccattcaccacagtcccacctgcaaaattcaaccaaaaaaaaaaacagaaaacggatgggcttgactagttgattcaatcacaatgatgagaacagaacagtagtatgcaccaagcattagagactcaccattagggtggatgacttgtccagttatgtaagaggagcagtggttgcaggcaaggaagacataagagggtgcaacctcaataggctggccagcccgcttcataggcacttcggagccaaacttagcagtgtggtcttcactaaaagaggaaggaatcaatggagtccatattggtccaggggcaacgccattgacacgtatacctctctccacaagctgaagtgcaagtcctctggtaaaggcaacaatggctcccttagttgcagtgtagtccagcaacttggcattccccttgtatgcattaaccgatgttgtgttgattacacagcttccttccttcatgtgcttcaaagcatgcctgaacagatcaactgctattataatctaattcaacataatcttatcttcaaggggaaaaaaaagagtatcaaaaacgtagtagtgtagaatatgaagaaaaaaaaaaattgttatatttaagcacaattacaaattgcactctcttaagacccgatttctatgaaaagtaaaatatgacactagcacagatttagctcacagttacatggtcactcaatttattaaaatatcatccttctaaacgacttgttagcaagtactctaaccttgttaggaaaaagtaggaaaagatattagtcctgaaaactctctcaagtcttgcctcatcaatctcttcgatagagcttgttacatactgctcggcagcattgttgatcagtatgtcaatacgtccgtacgcattgatcacctcgtccacaactctcttacaattctcatcataacccaaatcaactgggattgccataggttccttggcatccgaggtcttcactttcttaatctctcgaagtgtgtcctgagcatctttgtcctcttgaccctttacatatgtgaatgccacggttgctccctctaaagcaaagcagtgagacacagctcggccgatcccagagtcaccaccgctcacaagtgctatcttgccctgcagtgattgacaagtcagttaattataatattaatgcgtggctttcaaattaataatcagtttcttaaatgacatacttgaagcttattagaaggcttgtattctggggctgtgaactgagggttggggtccatagcatgctcttttcctggctgagtagattgtttctgaggcgggaattgctggccatgggaagccattctttcaaaaaccctagttggacacttctgggcaacagggaaaatttctggacagagggaattcaagtgagttatggttggataagctctgattgtcaagactctggaggaaaacagtcccctgtaaaacatatatataggatacaaataacttgtgtaataagaaaattgagtgggaacgagttattatgtagtgaatcggaactggacagagcttgtgaggtggcaagagagttggtgtccacgtgccatgttactatgttggagtagacacgtccagttttagctctgggttcatcttattgagaatttttctcttggagagtctgggcttagccaaatggaagatcatatacggagaattcagagcctactagaaaaaacatcacgattagttgttactagttgaaatccaagttttctttttgtatttccgattgaaaacggtgaagtttaaaattaagataaaccttccaagatatgtgttgttgcatggtttgcatggaagccacgtgtctaccaggcacgatgatacctgtctgtcttttcctgttgtctaaaccagcacacaaacacttggaaactccttcacaacgcggtgtcaatagtaataaatgtaagccaattcattaaataagctctcaatgtctctgttttctttacgtagttacagattctgaatctccttttgataacggttctctgtccttttaggattgatataactccatggcattctccaaacttagtttcatcttcgtgcttgttcatgtctctcttttattttccaacttggtgctcagtaatggtactcacttcttatttctcatcattttatttttttggtgtattgaagataacatgtataaactgtaggatgttcatagatgattatgcctgcaaatctcagtttttccagtgttaacataataaccaacgtaacttgatttctaaaagttgacttaatatgaaattccatctttccatctgtttgacattttacatcttcaagatctgcatgcaaacaactaacaagtatgccagttgagttatggtatgattgtggctttttctgaaacttgcttcactaatttacgtgcagatgatgaagacaatcttcttcaagggatcaacagttacaggcaatcagtaaatttaccccagttcgtaaagaatggcaaagcagagtgcctagctgataaaatagccagtgaattagaggaccaaccttgcaccaccataaccacaggttccaccattgtgccagccacccagacccaactggccaactaccctaagctcttgaacaagtgcaaaatcgatatgaacaccacatcagatggggtgatactcccagtttgcgtccccaaaatggtcccaacccttgttctcacaaactacacgcattcttcttatgcaaagtacctcaacaattccaagtatactggggttggtgttggatctgaggaggattggatggtggttattttgacaactagtacttctactggaagcttttcaaaggctgtgtccttagtttcccagatgggttttggtcattacttacttcccatcgctttagggggattaatgtttgttttaagctgaagtacacaagttgggttttttgtctttcttttctattgtgtactgttgtagtgtgcatctttaagcaactttcatctctgtaaattatgctttttttaacatcagaaaagacgtgattcactagagctttcttcagtttttttgtttttttcttttctttctacaatttctattgatttaattttggtgtagatgtagataatgtcaaaaagtaaaaaaattcatttacaagagatgattttcctccattgaaatccaccttttgtgatcaaaaggttggtacagtctggcatacagagttattcttgtaacataagtgtaatgagcaaatatggcatatggaatcgcctccattgccaagataacttaaagtaagcaaagtattaaagaagaatatttaatttgagagcaaagaagtcttcaagtacaagaggtttttttttcttcttatatatattggttacatatccaaaggctcttcacacctaatgatatatatcttccaattaaattgaacacataaaccaaaggaaggatatcttcagatacttatcaatggccttctccaacatgagcctagttgtttttgcacttgctagtactttgctcttgtattctcatccagtggaatgtaatggtaaacctcctccttttgtcaacttattatcttttctaatgctttagtagttaatgttttctaggctaaattgctctcttgagagattttactaggaaggctcttgaaatcacttcacttgtcccaatccccaatttgttcagcatattgtgtagtttttttaacagctcttatttatctattatttatgatgatatttaatgttttaaaatgtaacataaatttcggttatttaaagataattgtagcattttttttagattggcggtactaaaatattatataaaattatatcattttcaagaagactcaaattcactgtccacgttccatgtcttcaatcaagaaacagccttataacattggcataaggcactattagcgatagttcctaaaagctattatattaaattatgtgcaactcaatacttcgttaaaccaatagtaatactgacatataaccggtgtcttaccatttctcaaaaaataatatatttgttaattgtataatattttgttaaaaattaattatatttactaattagaacttcaactcctcctaagtagaccgttttacacttcttcataaatattaattatatcaaatctgtacaatttattgttatgttataattcaaaattcaaatcattttcagagaaagaagatgatatattcaacgcgatcaacgattaccggcaatctcataacgtatcggctctgaagagaaacaacccagcagattgccttgccgacgaaatcgccgatgatctcgccgatcaggactgcactggtaacgaagctttcgccaaagatccatatcgcacggttcccatgctcgtcaatttccctaagctcgccaagaagtgcgatatcgaagtaaactccaccatggacggtatcattttgccggtctgtgtccacaaattggtcagagatgtcgttctcaataacttcacaaagactgcctacacgaagttcctcaaagataagaagtataccggcgctggtgtcggctccgagaacgactggcttgttatgattctgagcaccgataagcccagcgggagcttttcgggtgctacttctttggttgcgtttgggattgttcagttctttgttatgtcgttttctggattgcttcttggtattacgctgtcgttttgatattctcgggcgaattttctcatttttttatgtcgtttgattgattgattgtcgtttgtgaattttaattttctcaagtgtgaagtaaagaataaatgattttgtgatgacatttgtgaatttttttttacaaaaaaggggatatatttgttatcattagtcaaagcaaaatattttaactgtaaattttatttaacggtctcaataaagggagattagacttaagaaaatacgatcaatatataaataagactctatagctataaggtgaccaattagcaaattgtttgacaaaacgtacatatatattactagaaaaagataaaagttgtttacaatcttcaaccacaccaccaaatatggatgacaaaatatttaaatttctaacagtttataccaaaattagacaatcagattccataatactaacacccgggaaatcacccttcaacctctaaagcacttgtccaatttccaatctcgaaatctcagtcacgactcgaccctgaccgaacaaattgaaatttatgctctaaaagcaagtaattaataaatattatattatagaatatatgatatacaattataggataaataaatacattaattatagaagtataattaataaatatctaaaaattctttattcatatagagaatgtataatcttgtaagggcagggatggccctagacataggcgggctaggctcgtgcctagggcccatacatttcggcggcccaaaataaaaaataaaaaattttattaggcttttatttaag

SEQ ID NO: 296501 - DNA, 5233 bp, Cannabis indica
tatattggccttagaaggcttgtataatgtattacgttggtgtttcaatgaaaaaccctaactcttttctcttcttctagtttggttggtcaatcaagtattggtcccaaagtgtttatcgaggttctcaaaaactaaaaaatttgagaactaaacaaataataaaatgccaaaataaatgagatggagattttacgtggttcacgtgttaattaaacttagtgcatgactcagtctattagcctctaaggaagtctttaatgtgtttacaattttttgtaggaaactctaactctgtgttcttagtttttcttgaagaagaagaagacttagaataatattggcagagatttggctattaaggttaaaattccccctttttatagaaacataagggtatttataggcttagggcgggaatggatatgcccatgacatgcctagggtttctgccaaaagcccactaatgggctaattacttcaaaaaaggagctgactattggggcccttgaaacaattctgcttgtgtgtgtagcagctggacatttggggaccattgtacatagtggacacgtgtatcaaaaggtttaacctttaaaagtaaaggcctagaataacctttcggtgaataggtagatgaggtgcatgcactaccatgtctggacataggagagaatatctatttttgtgtaagaaaatgcataaaactcactgggtgatctggattgcattaaaggaagatgtccacgacaatcttagaatgagtatccacgataggcccattgattaccaaactgggtatcagctaagcagattctgagttaagacctctttcgctcctgcagagacaatatctcttttgtgttcaggtagctaggataaggtgaggtagacctctaattatctcttagccttgacttgttcccgattctatgaggcttctctatgataggattgtaatgggggattttaattagtgagattatgggattatctcttcacttttatgccacatgtcaattgcttagaaacacagataccatttaccccctaagcttttgggactcttctagttttgggagctttcaatcatcattcatttcgtagagaaaaatctttaacacgtggtcattgttgggatcatagatgtatcctgtgagctatcatcaattaaaggacccaaaactgaaggaaccataggcatggcatgcatgttgaaccttcaatgcatctattgataacatgtgcgtgcagggggcgcatttcttataaaaaatatcattgatggcaggtcaattaaaatgacctctctttagtgcatacaataatcaaggtgggaaatgatgaaaaagaaacaccatgagcaagttttaaatgtcatcttttgaacttcccatccatcagttcaaattgttctatttggagagaaaatctagaccattcatttcaaattgcatggacatgttcaaagtataaataggttcatcaagcccatttttctttttttcactacataagatcttcaaaaacacaattttcgaatttcaaaccacagcttttcattttgcaaacaactcccatatcgcacttgtttccattggtgaatgcaagaggctttcgacttcctgatttagtacttcctgaaccttcattcaacctactttccaaatgtacagccattagaccttgaactgatcgaacctcaggtagatgagaacttcaacgctcaggtcagctacaatcacttgatcgactagggtcaacacacttttgtagatttccacgagaatctttcattctccactcatatacgaagtaagtatcccaatactttattgaaaattttccattttgtatctaggatagagtttcttagttcgagataggtctaggatatctagtatgtttgaatggtgaaacgtcgcccgtataaatatatttctaggaaaggataatgagaagtttattgcgccatgggagtgttgataatgtgtgcatagatagggtatggtcgtctgaactccctagacatttgcatgtatttatgattcatgctttagggttggaaccatgtgcaatgcacttttaagtaaatattaggttcatccatcttctgtgcatcgatttggagttgctaggacttcgaatggactaaatttctagaattttctttaaattttgttcacataaattttccatgggttctagatctatcacttttagtttcttgcaaagatacgcttctaggagtgatgggtccggtgtggacctctctaagaaattttagggtaggccttccgggatacctattttgtcatttagatattgggtgtttaattgcttcactttatctttcctctcaaattttctagtgatggatttgaacaaagaattccatctttaagtgttggaaattgaagaaaaccctatagtcgctcctatggatgaaatggtcattgaggaagctcgggcagaagttcctgctggacgacttcaatagggcactgcccttgggcctatcctagaggctactccatacgggatagtcgtgaaatccaaagggaaggggaaaggcaaaactctgcctctgcatagacatttaatgcttccatctgggagaaggaccaaaagatgaacaacttttgttcctatggtatgtgagagatatgcgccactaaagattagctgcaaaatatttcgtggatgatgtggcattgattatctataacgaaggaattatcatttgtgagcactgatggggtagtgcctaaagttgggcccgtatctcgagcagagcacaccttcccttgagagcttatttcgtggagttaattgtgcaaattgggaaagctcctttctagttaatagctttggcttatgagctctttgccaaatggtaatgtttgtcaaaatccacaagtttgagctgcccactctggaggagattctatacttttatggcatgaagcctaaaccagtgagaataaagtataaaaaggttgggttctacaagtttgagaggtactctaatgctgacttttccactagtcatgttcaacattcacatgacctcaaggagtagtggttcttccccactggtaccaggaaagaaggtgcctactctccaacttaaaattcaaaatcttccttgtttttgtttaagtgttaattgggcttccatacttcattgttactttgacagagcctatgccttggagcactgaaattgtgaaaatttccaagaaggtagtccattacaaggccttcactaaagcaaaagtcaaagttaaaggcttagttaccacaacactgctatgcgagcatgggctcatttctagtttctaaacatcaataacgttagtggttggggcaaaattcaggcttcaaaagaggccaaggtggtgatagctcgtgatttggcaaagattatgaaagagatagccaaagaggataagctcctagaagctagttagatgctctgccacccaattcccatgacagatgaagaggaaattttagagagatatgttgcagtgtagccgaaaaatgagggtgccttaggagccaaaactttttgaacggtaacagacccttctgtgtgttccatacccctagcctccatcacatatcccaaatggatcaaagtggattcgacaaatatttcttaaacatagattgctttaagtactgcatgaaggatttcatagacatggtagatgagatcattaggagtcctagtaacccaaagatgtctctagataccattagagtggaccctttcgtgaccatgtctttttgcaactccaaagaatgtggcaacttcattggttgggatcacatagtcttctttgcctgtggggaaccctatagcatgtcaatgaatggttgcacccactgatacatattacaagactatttgtagtgagttatccttattttaactttgctgctttggaaattagtggctaatgttgtcattgttacgttggtagatactctagaagccaagatgatgaggtcttggagctacaagatcaccaagtctcttgccaagtcagaggcctccaactacttcctcttccttaggggtttaagaaatctcccctcctatgaaggcactcgcaaaggcttctttttcctagggtcccagtgggatagagaaaactcttattgctactggggaggcctcctaggaaatggttgtgttttggagtggctcagttcacgcatgccatcctaatataaagccttggaagaggcttcacctacgtactttggtcatggagggggctgtctaggggaattcagtgaccatctccatcatggatgacagcttcgatgggcccatctttcctaagaaaggtgtttctgggaaacctatgcgtaaaactcctcaaccataatccgaaaggaaggctaagaagacaaagctttcttcactcagtcagtgttctacaagaagatagggggatcacagaagatccaccactcctctgccaccaaatctatcacaattggctctactccaacaataataatagcaatagcaacaacaatagcaacaacaataacaacaataataataataacaacaacaacaacaacaacaacaataatagcacccacaacaacaacaaaaattacagccacagctaccaaaaatatcaatccccaatccgctcaaggtcaccacttcttaaacagagcctatcaggccttcgaaagcaaagcagtcctcctccaaccaacaataagggcatcaaattgttactaccttgctaaagattctacctttgaattttaggtttcctttgaagcgtagaattcttagccacagaatctttaaaagaatgggagaggcagagcattcaataatgcaacaccatgagaaggagcatatagtgttcccgaaaagagttgacaacctttcctccatgaagagggcaaagatctctcggagagtctgaacttctccccgaaaaagaccactgattaacatggaaactcttagccaatggatgggtcatagagtggaaagggattttgcgacttcttctacagagcttttagatggattcgcaggaagcatttgttatctaactttaaagaattaggcaatttgaagaagcaatgatgccttctgtaatatcctggaaaataaataatatttaaatagacatattttattaaatatgtaattattttggaagcgaagtaagattatgatcttact

SEQ ID NO: 296502 - DNA, 2795 bp, Cannabis indica
atgtgggactaactcttaataaagtgtctcttgctgcaaacataaaattcaaggccatgttttcctccaaataaattgacaacagaccaaaatcagcttcatcatcattattctcattattattattagtgatcatgagttgttgttgttttagtgagatgcatgttaacatgaattggtcaaacatttctcgaccttgagctagctttctctctgctccgattttgagccacctttgtaacttccaaagagtttggggaagtatgtgtctttgaaacacagccttatgtatgtcttcaaaagctttctgatactcaagttgaggtagttgaaacaagtgtgagtgtgaagctggattcaaccccaaactcaataaaattgcattgtcaaaggtgatcatcctttgaaatgattcttgcaagtcaacctataatttaaacaaaaaaatatgttagtgaaaaaaaaaaaaaaaaataggaaacaaccctaaacagtaaaaatagttttcgaaaacaaatacctattttaatttggtaagctttcttcgtatacaagtttacttgtagttgtttgataaaaaaaaaaaaagtttactttgtagttacgtaaaatgtaatttttgtttttaaaagttactaaaaaaaaatattgttcgtgcaactcaaaaataaatattgcatggatatactacatcttcattttctatacgatggtctacgtttaatttatttaagattttagaataaattagaatatagaaaacagaatttaaaaaatttattttatatgcatgtaaataaaattaaaaagatatatgtgcaataaattatttaataaatataatttttaattagtggtttaattaaattattttgagtttttaaaaaattcagagaatatcttaataataataattataatatacactctcacataacaaaaattaaaaaattaagattaattgaaaacacaaaaaagtgcatcggttcattatttttgggggtgcaccatttgttgagaacaaacacaaacttattaattaatttatttttatttaactctatatatatataaaattatacaactaacaacttgtaagtaaatgattattgcaccctattaaataattttatatataattatataagtgacctgaagtcgtgtttgagagagatgatgaagaaatgggatgaagtgatcgaccatcttatggtgcatagtgttagcaataaatgacacaaaattttagtgtcgtgtgctccacagttgaaacattttcctttgaagtctccacaagtccgaatcaacattcaaaatcccatctccaagaacatcaaacacttgtctaaactcttctccttttggataattagagaagttggagtttaagatgtgttgtaaattagatggatcacaagttataatgaaatccaaatcagttgtaaaccaagaaggacctttgaacacaaaagtgcccccacttttcctcaaaatttcagttgcgaaatcatgcacgttcgaggcatttagtagaagtttgggtagcattcccaccaccggccaggccatcagcaccgcgtttctgtcgcgccaccagtggtgaatcgtcgccagaaagtataccataactgccccacctagggcaccctccaagtatccaatattctctagagccatcatcatcatattccaatattttgtaaattaaacaaagctatagctatatatatagtattgtaaaccgtaataatttttgtctttttgaattattatctgttttttcatatttgaattattgtaatctcaattttttgtataatatattatgtagctatttaagatattatgtaaaattttgagaaatttaaaataatctacattattaaaaacataatttaaataatttattttacacatataaaaaataaaaataacacctataaaacaaactgtttgaacaattattttcaacacgttaaattttgttaattttttttttaaaaatttacaaatattttaaataattatattaaatattactatatatatacaaatagataaaattatgattatctcgaaaacataactgtttggttgaccccttttagaggtgtagaagatttttcatatatattataaatgcttaattcattaatttttttttttttggctgaattgaattactcatgaagtacgtactccatattgttttatagtaggctaattagcaatttttcccctcgaactttgacatatactaaattataccccctgaatttttttggccgttaaaaatttcccctgaattattgagattgttaaatttaaaaatttgtctaatttcattcaattttactgtttcagatactattgacaaatctattaaatttttattgcatttttccaattaaattgggttataataattaatttctggaaacgtcctgcacatatatttgacacataatcatcacagtatttctgacaatatatataacaactcaaaaataaaaaattgggtagttgtaattttttaattcaaacacaatttataccattttgtcaaaaaaaaaaaaacaaatttaatactatgcatatcatatatatgtacttaaagagagatggagacagctctatatgttaggtactcaaaatttatgtattggtggccacacttaattaagatcaactctatgacaagaaatattaattatatctttatatattaaaagtgcctatttaacggcattttttggtttaacagaatataccttacaaataaaagaatattctgt

SEQ ID NO: 296503 - DNA, 1742 bp, Cannabis indica
gggcacaaaacccaacaatttccactctattgatcgattagaaaactccaatttacaaatttaagatttacgaagttttttagatagacacttagcagtttatcgttgatgtgacttagaacctccaatcgttaaacataattccacttaggtttgctgcacacataattctggataccaagtaagaaaagtattcaaatacacatatgaacatatttagttatacatatacgatattgccatatagcgagcaaatatgtgtgcacaaagagttacgaagatattgatatctaggatgttaagtaatattgaatagtgtaagataaagctaccaacatcagtactactagagtactaagattagattggtattatggctaatcatgatatatgtacgaacattcagagctcagttgacacattagatgcggttagtagacttgtggtaactgtgtgtaaggacgctcagttacaagtcagatattatcaatatattatgcatgctttttttacagagtctgtcgactcccagttgcttcccaatgtgtaggttgtggatagcaaaattaattagtggtgactcgagggttccaataaagattgtacatatttgaccgcctagacttagagggctaagagctatgggagattagctgccacaactttaattttttgttagatgactgattcatattattataacatatatgtattttaatttgtaattgaaaatgggaacccaattcgtaaacgtttaaacatagtttattttagtaaaattttaattattacaaattcttccttaattatactattattgtaaaatcttttgattagaaaaagttaccacaacgattaaaatacacgacgtgttttaagtagggtattaaatatattatactgtaacaaatattttcaatatgtaaactattccctaaataaatagtcaactttacttaattttttggattgagaaaaagattattctttttttttgtgtgtggattatttgttatactttcaattaaaagcgtaataacaaaattgattctcttatgttaagtaaaaatgagatatgtaagatatagattatttttgaaaaaaattaggggtactttattaaaatctaaaacactataaaaggtgacatataattattggtgtatttactatttttatctttacttaacatgagaggaaaaaaatatacaacaccgaattacaaaaaaaaaaaaaatctataaacaaaaagttaatacaccttttaaatatatagatctaaaatccacattttgagtgagtacattgtgaggttgaatcttgatatgcattcaaatccaaatctatctcatcatcaggccacagggggttcctccttatcagcttaatcttctagaacctttctcattattttgttgtataccatttaccaaatactaacatattatgtactcttttttttttaagagacatattatgtactctttaaagtttaatatctaatcacatgtcacatttattccatcccaaaaaattacaaaaatatttcattttaataatttttattttatataaaatatatatctttaatttataagattttttttttactttaaaagtcattttttttatttatacggaatacacataacaacctaaatcgcaacccaaatccatatattaaccctcgcagcaaatatcagaatgaccccacccgtaaaaaattaataaaaaaaaaacgt

SEQ ID NO: 296504 - DNA, 1789 bp, Cannabis indica
tcatgcttagttattttcattaaagaagttttttattgtctttatcttaaatgattttaaacggactagctagtgtgacgtttcggaaaatcggagtgttacagacattgatgaaaaaagatctactacatgattttgtgtttatgttgacccaaatctggtgagctggacatctaaaaagcaacaaactatgtatcaatcaagcactaaagccgagtacagaagtttagctagtgttactgcagaaattacttggatccaatcactactttctaaactcaaagtctctatccctcgatcaccaactgtctggtgtgataacctcaacacagttctaatggcagctaatcctatacttcatgcaaggaccaaacatatagaactggacctatattttgtgagagaaaaagtccttgccaaaactctcattgttaaacacactcctgcctataatcagacagtagatattcttaccaaagccctgtccaacaccagcttcgagttgcttcgagccaaactcagagttgagtctctctccacactgagtttgagggggagtgttaagaatcgtacttcataattgtatttcataatcagcagtttctgtttttctgttatgttagttgggttcaagggtagttttgtcgtttatctttgtttattgttttcatgtataaaaggttgtatctactctatattcaatcaaagagaatcagttgttttgttgtatttgtttgttatttcgttccctcacacaagagaccccaccacaactgaaatccagactcattatttctttcctattctcatgagctcacccctccttcccattctctatcactctctctggttgggcgattcacagatgaaaaccacccagtgaccaccaaagtaccaccgagcaaccacgaatcacacaatgaccagcaaggcaccaaaccaccaccgaagtcgacccaagtaaggattatttttttttcattttttaggttaagagaaagtaaatgttggatatttttttgttgattatgcttgagctggagtgattttgtgagaatataggatgatttaggtttgatttttatgtttgggttcaatttttgtggctagttattcattttttgggtttttctatagttattaatgttttgtgatattactagcgtaaacgcctagagaaaagggaatagattattagtaatattacttagcgatgtttagaaaaatttttggcgatataaaatgatatcaatgcttttagaccaaaacataaacatttatcgatgtgtagcaatttggttaccgatatatgacgatagtgtgagtatttcaatgttactttttctttaccattactttgaaaatgtattataaatattaaaattgttagttttttaattttatacagcatatagatgcctatttgtacttgatgaagaggagataacatcttttcacaacttgtacccttaaataggtgtcattctacacactttagctccataaatttttgttggtataagggtatggatgatcggttcttactaggggtgtgcataaatcaatctaatccaatgacaactgactgattcaattacaactgactgtcaaacattggatatccaattctgctcagatcaaattagatgtaattttaaatatacaattggatcagatcagatgttggatggggtgtctaaaaatctaagacatctaacatcctatcgaactaattagtatttttatttaatttggatgagtaattagattttataatgttatacataaa

SEQ ID NO: 296505 - DNA, 5235 bp, Cannabis indica
aaaaaaacccatttttttttcataagaaggtgacaatacttagtattacacttgtcctacaccccttgtcaaaataatcgaattaaactgaaacgaatttcactcttaacagttggaaaatttatagttgaagactgcatacaatcatattttgtaaattaaaaaagaaatatacaatcaattaacgaaatagttgcaaagccacatcagtaaaaataattaataacctatggggtgttcaaaaatttgaggatttttctgtatattaaaaaagtgtgtgtgagtgtgagtgttcaagtagtactgctgtaccatttgactgagttctctaatagttcatggttgttgcctggaatttccttaaccctggaaccatttttgtatatcttaaaggttggaatggtggttactccttctgttttgaccaagtaagggtagtcctccacttctaccttgaggaaattcactgatgggaatctcttgcacacttgttccaatgcttgaaacactcttttttgttttgctttgttacaaaacaacactacacacattcctgtccacattcctgtcgtcacgttattaaaaaaaaaaaaaaaaagaaaaccactcattagtctctactctctctctttcctattattctatgtatgtatacaaatcatatgaataagaagaataattaataaccaggtgaagttactatgtgtctgaaacgttcagtgctggagattgaaaccaagttggatcccaacttcatgtccttaatgtcttcaccatgttgtctttcgagttggattttagcctcaaacaaagctcgcccaacttcttcattccctggcatctctcttataagaaattcgtaatcttgaattgcagcttcccacctctccaactaattaatcatacaatcttaccaatcagtcataggcatttttattttacaaaaataccatatttcacacatatataaagtttttttaaaaaatctatttattttataaacatgttatattttaaattttaacaattatataataaaaaataaaaaaaaaataaaaaaaaatatatataattgctttcctttagaaagatattttattacggggaattttcattttttatagtgttttttggcaaaatttacaaagatataatttttatgagaaaacttaaaaaacagttttaagtaataaagttagagtaactagaaggtagccagttacttccttagggtaacttaacttaatacttttttttacacatttttatttttttctttttttccagctggtgctccaatcagtgcttgatttttcctttcaaatattaagagttaagagagagagagaaagcatatgtgggttggcttggtttgcattaccttggcattagagtcggctctacgtagcctggccttgctataagaaggctgtacaacaagagctgcagtgcagtcttcaatggccttttcgaattggatgagcttagcgcgacaagctgcccggttgcatagtaaaacagagttgtacggatcttgttctagtccttgactgtatacaacacaggcatgggagtacttttccgccttgaacagaagattacccgttgatcgtgccgatgaaaccgctttggctctctttactgatgtcatgatctccttgttatttggatcaagttttgctgcttcttcagctgccactacagcatcatcaaacctgtttttcaaaacaagacaaaatacatatatcattatacaagcaaattttttttttttatcattttcaattgtgaaaactagctgatctgattgctatacagaaaggaagaagaacccgaaagagttaaaacttcacttagattattagatcaagtggggttggaataaattgaaattgatcaagtggggctggatgttacttttatatatactaatttttaatctaaagcataatcattacgttcttaatttggaattgtctcttgcttaccccctcttcccccatttttttttaaattaaaaagaagtggagtgctttgttgaagtttgctaatggtggagataagctttaaatggaatcaaatggcagggaccccaatctgattgtggtttcatcaaaaatagatagcatgtatattgaatgccccctttagaaatatccttaatttaaaatggaaaattgttagttatattggtaatgtactcattacacttgtgaaaacaatgtaatatcttattatgtggcatagcactgcaaaagagtcccttttttcaatttcagaattcgtttcattcttattatgaaggttaatcacaacattattgatagtaattgtgtcaaacccaacctgccagaagccaagtaaacttgggatccaatcattaaccggtaagcactagaaggcatgccaaagaagttggtgcaaacatcaatgctgaaattggctcccttttggtatatggcgtatgcctcttcatgtcttaaaagcctaaacagagcctctgcttgtaaagtaaacaacttgaacaaacaaagcacaaattaacgttagattgtaatcttgttaaacaagacatggtattaaaatttgaaaaaagagttgaggccaaccagtggagctgaattggcaccagaggatattgcaaattgggtctctgtcaacaaagtattccagttttggagtttacgagcttcgtcacaactcagtagacatctttcaagagcttcagctttgtacgtgtcttttgtgttagtataaggcccagattgtttgtagtaatacaaagctttctctgcctgccccaatctgaaacgaattttagtttgacacagtttcaaaacacagaaaatagacacaaagaaacaatgaataataatatatatatatatatatatattatatatatatatatatacctgagatacaatgttcccaaacgatgatgagctctgtgataagaagggtcaattctaatggcttcgttacattcacaaattgcttcaataagtcgtcccaaaccaatcaaagcagcacttttgttgctgtgataagctgccttactggagtccaaagcaatggctcgattatacaaagccaaagcatctttaaatcttccttccttgtatgcctcatttcccattctcttcaacgcttcaggctccaacttattattcgaaatccctcgaaactcatcactgttgttcctcacaatgtttccatagccatttttgctagttgcatagctcatctcttgatgaacttgaaggcttttagaaagtgccaaaatagtacttctagacgaacaggttggaggagtagtggtattattactcaacggttgcttcaagttacccaaattgttatgtcccaacaccatcccaccattaatattaatattggtggtacttgttttggacagagctttggtatcgttaactcgagcgagttggagagaattattgggtgtggactctcttattctcagctttctctcttcccctgaaccattagatttggaggaagaagttgagcttcttgcagcgtctgagattctcctcccttgaattttcctctgtgaaactgaattcctagtgggtttttggtgtagtttcatcacagcttcaatggtgggctctggcgaggtggtgcttctatttttgtgggagccatgattgttgggcttgttggggttttcagagcttgttagtgaatgaacagcaggggattttttggaccagtggctccaacggttgaaaattccactcatgaaaccacaaccaaactcattgcttattctgtaattggcaatttctgccattactgctatctttctgggctatgaaactataaatcagaaaacaactcgagagagagagagagtagaaggagacaaatatgttaggaaaaatatggttgaacatataaacaaaatggaagtgtcatagaaataggaatatttatatatattacaaaaaaaaaaaaaagattggcttgtctgtgaaggaagaagaatttatgtttcaatatactccatctgtgtgtgtatatatataggggagtatacatatgtttataatttcatggcctcctagagtggcttccaagaaatcaactttatttttgggaaaaataacatgtagggtcaaggatatcttgtgaaaattcctacaaaggattttcttccctcttaaacataattaagtgccttaatgttaataaaaattaaccacatgactagtgcaactgttcataattgacaacttaaaagtgctaattaagacttgaattagtatgattacattacaaagttgaattctttatttaatgactaaaacccttgatcaatctttactagtcaaaattattattgttgttgatgaaagcagctcattactcattatacatttaagagtcaatattctcttaaaattaaccacactgtaatttaattttcacttttcatttgaaatatacgtaggcttcctttttttgtcaactttctttttattattggtattgttaagtgagcaacacaactgaaaattcaattcattgagccgacctcaaatattgcttttcaataaattgagggagatgtgactttccatgttagaacaaataaatttagagcattattattggatattagtggtgtttaacattttttataggtagcaatttaagattaattaatgatattttctaaaagttttctttttaagttatacgagactagtatttaattacatcaataggagtatgataccaagaaagatactaaacaccaacagtatgcaaactaatttttttttttttttttttagaaaaagaactagagaactttcaataaagaagcagatacagagtttagatacaaagtaatcaggccaatatggaaggtaaagaaccattccagatatactcattgtctaatcctaagcttgttttagcatgataatgagctaacgtattgctatcccgtagtacatgaactataaacaagttaggattgaacaacaataagttgttaatacaattaataacatcactaagaacagaattattacaataagaagctattaatcttatccaccacatttttgcaatctggagcaaataatcgaaatcggcaacttgactgcttgaatccaagatatagctactaggatcgctttaccctctatcacttcaggaggaatcacacctgtacaaggagttacaaatcatgcctttgaa

SEQ ID NO: 296506 - DNA, 5261 bp, Cannabis indica
tgttaatcaacatacttgtgtgtaaatctaagatcctggtaaaataatttccaacagtgcaaactctaaggaaccagaggtaattggatttgtcgactcaaactatgctggtgacttagatacacgaatatcacaacccgaaattgtgttcgggatcaatgattgtgccataagctagaaagctaagttgcggtcatcaatagcactatcaaatattgaagtcgagtataaggcttgcattaaagtagttaaggaggacctatggctaaaaggtttaactagagagaggcctataatagaaaaagtttaaccattttccgtgacagctaaagtgctttgcacctcaataagaaccaagtctatcataaaaggataaagcacattgatgttaagtttcacttcattcgtgacataataccaaatggtagagtcaagctagagacaggtttcaacaaatgaaaactcctctaatctactcaccaaggcactaccatttgccaagttcaaccactgcttacaactgttatctgtcatgacagataaaaatagctcaatttgtccaaattcttgaagattagctgaactaaagttcaaggtggagatttgttagttagtgaatgttagttcagtttaatctaagtggttgacagttgactgtcaagtaaactaactgtattatgttagtagtatgtagttcttagtttgttcttacaactaataggcttagctactcaattgtaataatgcctataaaaggccattgtgttatattcttttagttagattgtccatattacattcaacacatttaaggagctagttcatttattactctatgttatgattgctcgaatggtgatgtgaattgaatcaaaacttgcattgattcctaacagcaccctaatgaagtgatatcctataaataattaatagttttttataatcattattgaagtaaattaagtgagactccatgttgaacaacaccagtaacgatatgacaccttataaagatgttaagcacaataaataataataaaattgcttgaatattaaaatttaatctatattcactacacgagtaagtgtaaaattacagatgaacttcggtctaagccacaaagtgtttttgtaaaaccaacattgatgcccctattgatcatgtgtaaggcatttgcagttttggtttggtagagtgtgatctgaaggggggcgttcttggcgtcaatagtttggatgtgtgtgcattttgagcattgtatactcccacatgtttgaatttaagtgcaaaagtgtggcttttaagctgagagattacatgattttagactcttacttgagagtgagtgattgttctattaaatattaatgtcattgcattagcttgattgcactcactttagagaaacattttatggcagaagccatttgatcaatggatatcttatcctcgacatgcatgaatagcttgctaaagtgacatccaaaatgaatcatttttatttttgatagatttcaacgacacataaagatgaatcaataatcatttgtattatttaccttcgtgaataatttgattgtatccaaattttaacacagctaccctacttatttttcttttcttttttatcctagtgttttattatatcaagaataccttatacaaactatgctttcgacaaggctaaattcaaaggagaatgcatgtattgattggatggatcatttaaagggaagcaaagcatattgaggtctttcaaaactgggaacaaaaaattgtatcaaagtatctgaaatcaataccaacacaaaaacaaaggcacaataagtagctagcgttcttgctgagtatagatctgaaatattaagtctaaacaaaaataaatccaaaactcggttgtctttccttgcagtactccactctatcatctaaatgaaaaaacacctacaaaagccaaaccaacaaaagtacagttttaacatcagatcaacaaatgaaatgccaaaatcaaatacgattttaacaagttaacaatcaccaagatcaaagcatactcctagtatcaactcatcaatgctttgcagataaaaataagcaaaatttcagtgcacaaactatgaataaacataacttcgtagcaactccgtcagctatttcacagccaaacattataaatcaatgtatcatgatcaatacttatagaaatttaacactcccacaatatagattaattcttatgcaaatcctatgtgataaaattctagctttaggttagtgattgaaataaaaactgtggaaaagcaaacatgaacttaatacgttgtcttaaaatgatttataacaaagtcacaacaatctgtcttttatttcagcaacctaagaaaataatatatagctcaatgacttcaatttctgaaaattgaataggtttcatatctagaagaaaccataatgccatatcataaaacacaatcacaaaaacttaaataaaaccacaaacccaataagcgaaaagagaacttgtgagccactttcacatatacaaaaccagaatctataagacaagttcaaacacatattgaaatccatttcaagcaattgaaataaaagtacctcatatgttgctgggatacatgaacactctgaccctagcaccctgttcaaatgagaaaagaaaatgaattcatatacttaaaagctataatgagccaaaaaaaaggacccaaaacaaaaaaattaccatggatttgggaggaaggttagaagtgaacttagcacgaacgacaccactgtttccgtgaggtctaataacctttccccaaatacaacggtaatggctaccgtccttcttcaccttggccttgtaaatgtaagccattctcttcccggcgtaccatgatacttcctccttcgtgttcacgccctcgatctgaaccagagaagtgtttgggtactgattcgacttcgacctaataaattaatcgcacataaaatatactcaattaaaaaaaaaagttcatttcttcaagtgtatacagaattcaaaacaggtaaagtatgaatttcttcttaccttttgtatccaagaactgtgcctcgcacataaagcctgtgaaaacgaaaatggaatacaaaaatatcagtaaggagttagggtttcatggatgataagatttaaaaaaacctgagaagtggaaagatttgtaatgacctgacgcgctctccttggcgacccttcaccattttcgatcgaagcttgttctgaaatctggtgaatgaagatggacagtcggaaaccctagccctatcgttggatgaggaatatatatacccctgtactgtggtttgagatttaaggttgacgtcgttttgcaaatattatgtcgtttattaaggttcgcaaaagaagccatgcacgtgacatttttaaaaaataaataaaaataaataaaggattgataatttcatattatatgtcgtttaaaacaatattccttaataaaatttaggctcttaattaattcatacaattaaatgtcattgtttttaatttctaccgaaatatccttcttttcattttttctctcttccttacaccaccaagaccaccaaccaccaccaccgagaccacttagacccaggcaccgagaccaccaaccaccacaaccaaacttcctcatttacccaaaactcaacccaactcccaaatctcacctacccaaatctttctctcttccttctcctcgacttctctcaaccaccgttgccacctaaccctcaccctatcagaaactcattatacatcgccaccacaccacaaacgaagaccaagacagaccactagaagctcttcattaatttttttatgtggcaaaaaataatataaataataaatagtgtaaaatagtcatttctctacaaatttttaagttaggatatttacttacataatgctattaattaagttcattttctatagttttccttagtataacttgtaattttgtggcacataatgtgacaaagtgaacctttacctacaaacggtatagttgtttgcttgtttcttccattctgacttacatcttttgtaatgaccgtgagatttaatttttatctatgcatgcttatttcaaaaagaaaaaaaattaatatatatttttaaaatatctaattataattagatgataactggattgattcggtagattgtttattggattggatgtcccatccaacaattgatctcgatctaattaaatttttaaatttacatccaatctaattataattggatatctgattttattaaatttaccttaggtgatgtttgctttgatgtaatgtaatgtaatgagaatgacaattgtaatataaatggtaatgtaatagaataagaatggtattatgatgtttggtttaacactgtaatgagcattgtaattgaataaagtaagaagtatattaacaaaaatatccttaattttactatttttaatatttaaagttaaataaaagtaaaaagaaaagcaaaataggtttctaacaatgtagtcactattatattagttttataatgtaatagggattacaatatatggactaaagagtgagacactaaaactccacctatatggactagaggtggtgccgcctcttatgagaattgggagtattctctagagagtctatgaattggaattttgcacatggccattaacggtgcaagagcgagacatgcggtctcaagtgagcattagcgagggtgtgtgtgttatcaccggtttgtactaaagaaatagtggttcaatgctacggcaaccaaaatttcatcaaactttgtggtaactacactaaggtaaaattcaagtcgaaagacattttacctaatgcacctaagcaagacttctttgaaagtgtgtatttattcaatcaaagtgggggaatgttatattttgatataatattttgattgattaaataaatgttacaagtgtgttacacattttaatctagtgggggattgttatattattttataatataataagtgtagattaaaatgtagtaaatatattattatgtgaataatatgtattaggtgtttggtaaataaatgtgtaacctatgaatttaacctacactttttaacctacatgttataacttggagaagagttacaatttgttatcatttgtaactcatgtgttgatcacacattattagtgtaataaaagggttgttacacaatttgatgata

SEQ ID NO: 296507 - DNA, 4195 bp, Cannabis indica
agataagtaaggcctatgatcttattgaatgggattttcttggtgcaatgatgattcgcatggggtttgatcaacgttttgtggacctaattctttgtactcttacttcagtgcaatacaatattgttcatggtggtcaggttttgaggccgaattattcctaggtgtggtcttcatcaaggtaatccactttcacctgatttgttattgttgtgtgtggagggtttttcatcccttctccgtcaattgaaagttgaggtgatcttaaaaatattaaagtggctcatggggctctccagtagtatcacacatgttatttgttgatgatagttgcatttattttcgtgctaatgatagagatgctcataatgctctgcgtctattgtgtatctttgaggaagctttaggttagaaggtcaactttgctaagtcatcgactttctttagttctaatacacctcatgtgacttgtgatagaatttgttctctcttagggatttctcctactgatactaatagtttgtatttaggcttgccttgggttatggataagaatagatttactattcttggtttcctcaaagaaaagatgcaaaagaagaatcaaagttgggaggggcaatttttatctaaagcttgtaaaaaggttatgcttaagactgtggcacaagctttgtctcgttatgctttgttagtctttcttttaccattagaaacttgtagttaacttgaacggttgatgtcataatattggtggagttctggctctaattgttgtcgtgtggttagttggatgagttagtctcagctttgtaagcataaaaatgttggtgacttgggcttttgtagcttgcgtgaatataatctctctttattaggagcaaggctggaggcttttggtgaatgaaacttctctagtgagctcaatctataaggcaagatactactcttgtggctctattcttcaagctcaattaggccataatcctagtttcatttggaagagtatctttgaagctcaacgtttaattaaatataggtgctagagtaagtataggctcaaggtgtaatattgatatcctcacggatcattggctttcgaactcatcttctccttttatccaatccacccacctaggctaatttaaaatttcaaagttttatgaagatttgttgttgggaatgggatgaagaagttattggtgacttgtttgatgagagggatcgcattctcattcttggaattcctttaagtatcacatgtgtaagtgatagttggtattttatcattttctccaagaataaaaagctaattggcattgagcaatagaagaagatttttggaagtacctttggaagcttaaagttctgcccaaaatccaacatttttttatggaaaacccttatgggttagcttcctacttagcatttattataaaataaacatgtgttcattaatttgaaatgtttattttatcatcaagcacctgaatcgaaatctcaaatttttttgacttatccctttgctgactcttgttggaatcgttcttctatcgataagggtggtattggccaagttgatttttgtagttggtttcaagccatctaatctcggagacaaaaaaaattagttgaggaagtgacaatgattgcttggtccctatggaaaagatgaaatgatattttgtgtcactcaaagattaattcaactttagtcttagtcttgttggcttgttttgttcttgatcaatggaagttttttcaatccaaaaagtttgatccacttttgcttgtccatcatatagacagaagtgttgagcgttggtttaaactagataataataagatcaagataaatgtcaatggggctatttttgaagcaaaaaattctttaggatgggtttagtggctcgacaatctaatggtttttttgctttaagcttttactattcatcacttggggtgtgttcagccagttactgctgaagtaacaggtatgaaggaagctttgagttagattaaaaggaagaatttgaatgatgttgttattgaaactgatagtttagtgattgttcaagcaatttaaagtcctctccgaattccctctacatttagtttattaaagtaattgcaaagttttattatctactcttcttaatgttgagttatttttgtttcacgatctgcaaacaaggttgcacattgtttagcacgctactctcatttttaatctgatcgccttttcactgagagaaatatttcttttgctcttcaatcccttgtaatggttggtattattgtttaatgaaactatccaatttcattaaaaaaaacagttgaaatgaggcataaacaggcataagatatagacaaaccaaacactaaatcaataccgccaacaaatgaattctcatatccatcacctcacaccccaatgtcaccacaccctaaaccaagagtcgcaagtcaaatacccacaagcccacaccacccaactctcactaaccaacccaacatgttggtccaaacccacaacctgccaaaactagcgaacaacccaaatgcttgcaagcttcaagtccctaccaacaaatcttcccaaatccaccacgtataccactccacaacaacaagcaatgtcagagaacaaatgccagaagttggttgggagtagaagtgtaaggacaaaagaaaagagcaatcaacaaagatggggaacctcatgcccacgatgtcgagtcgatcaccaacccttaaccaaggccatgcacaaggccagaaagggttggcgggcctgaccaggaaaaattaagaactagtcgctgctagatagaaagaagaaacactaagagagaattttattctttcaaagcatgtcaactgagtttattatgtcctacaaatgaaataataataagacctcatccaaatataaaaattttatacggtagatatgattttgttccacatttttattggtagtaggtatttattttagcaagtagataaattagaatataattttgtagaacatttatattgtagttatttagggtgtgtttggaaatgtaattggacttaggtgtaactataggtaattatacaatttgacatgtttgtctgatcatataactgtataatgtgagataattgagttatttcaattatagtagggccatgagaatttgtgtaatgaaactgtgtaattactaaaaaaaaattattttaaatattaattactaaaaatattagttttgatgtaattactaactattttatcaaataaaatattagaaattcatatataattgccacattatatctaaatgcactttgtatttcaaaataaaaaaaaaaaattagtggcataggttctcagaaagtttactttgatgcaaataagtttccaaacttaaaaattggtcgtaatagttctcaaggtcatgtttattgtaagtccgttaatcctcttttttaatagattcatttattgtttaaaaatgccacgtgttgacatattattggtccaaattataaatttgacttaaaaaaattaaaatttaagaaatttttttttattttttcttcttcttctttttgctacccagaaactgctttccaaaacccatcacccaccaacccctggtccatcttctccattatggcacaagctctggtcgactcagagctctatctcgagcagtcgtccctgagccaaactctcacttcaccactggcatccttgctctgtttgacaccctaaaccccgagacccgtcgcgacccctctccatcactaaaacccaggtctgtttatgtgttactcatttctgcctattcagaaatgtaaaaaattgctccgcctcttcgattgaaactaagaagctatccgagaaacctgctccactcagtccacccaaagcttagtcgcattaccgcctgttagaatattagttgcaaagaaattaggaaaacttggagcttgtttggttatattttcagttttcagtttttaaaattgtgtttttaaaagtgtaaatagaaaacaattttttgacattttaaaaatttaacggtgtttggcacaagttttttaaaactatttttaatttttttcttactaaaaaaaatcaatattttaacaccataccataatatgaacccattccggtccgggtctaggatttgagtatgtg

SEQ ID NO: 296508 - DNA, 7737 bp, Cannabis indica
ttttcatatatacatatagatttgacgtataacaatataaaatctaattactcatccaaactaaatgaaataactaattagttcgattggatgttggatgtattggatttttagacaccccatccaccatccgatccgatccaattggatatttaaaaataacatccaatccgatccgatcacaattagatatccaatgtttggcggtcggttgtaattagatcggtcgattctcattggattggatcgatttatgcacacccctatacgtcattatttgaattaaatggacaaaaaggtgtccaaatgtaaattttccttctttttaccctcatctactttctttctttctttcttcactccgtggatatagctcacccaaaacccataaacccatgacccctttccgcccacaaacccatgacccctttccgcccaaaccccatttctttcgtcttcttcttctcctgcctccgatgacccatttccggccatccttcttccccgtgcaaaccccgaaatttaccttccatcctctccgtcctctctccctccatctgtctcttccactctggtcttccttgttctttcaattttgcatgtggcgtggaatcatgagctctgcctgaggaaattctggtaagccctaaatatctccatagctatgtatatatatataatattttattatgattggtgaattatctctgatttatattcttgggtactgattggtgaatatttttatcttatcaatgctatagggttgggttacatattccatgtttttatatggctttgcattttattttagttattccttgagtaattatgtgtattgtgtgtgcttgggaaagataagtttctggattttcgaatttctgggattgtttggctgctggggaaatgcaggagaaagaagaagaaatatatatatatatatatgtgagtgtgtatatatatttgtgtgagtatatacatagagagagtagaagatgaggaaaaaattaaaatgaaattataatgatatgttaaaaatgattttttaaaatataaaataaaaaaaaaaatctacaccactgagtcacttggctatctccatacctttctaaatagaaatcgcaccacaaaaatttatatatataaaaaatattcttcattcattatttaacacacacaaaaaaaaccaaaaaaaagaatagtgacagtacacaccaagtacagtgtagttgcacacgtatttggtggaatgatggtctcaatgttagagaggaaaggttgaaaatatcatcaaatatgatgcatgattggagttggtattaacggagctatacttattattgcagcacaatacttaggccaactccaacgctgcactatatttggttatttggtgttggtgtccactttttctctctaatgttgacactatgtttggcccaaatatagcgtgtagttttagtatatcccatatttggtgtgctgtagccgcactatcacttattcatttttttttttatatattcttatattatatttagtagtatttaaatatatattattatatgattattaagtaatgtactaatagaagtattcttttttttttttgtaagttgtagtattgtggttagaatggaaagataacatcttggtgttggtgcaacatcatatttggtgacatggttggacatagcctcatagaatcaaaattgttagatagtacaattggttattgacagtgtagccctggccatacattattttgccagaatttcaccgtttcaaatctgcagtaccaataaaaaatggttgtaaaagattcattttttttttgttataaaaggtaatagaatatttacggcacaagtacttatttatgataataagcggcatgaatctaatatttaccgcacaagtaattaatgttagtaaaacagtaagtttgttcaattctgttaatatatattttgttaatgtattgttgggtacatgtgtaaggttcaaattgaaaccaatttaactagggatttcaataaaagaaattaaaaatgtgatttaatatggaccttatatgtgtaccattcaacatactaacagaatctatactaatagacgaacttattttagccgctaaaaaacttattggttctatgccgattttttttttgaacaaaaatatcccaatgagaattgaatgaacaaaaaccagtcaatgtgcaattgaaagaccccccagattgatatataagttggatcttttcagttttccccgtgagaacaaaaacggttacaaaaaagaattttttttaaaggatacagtttgaatggctctgaacttgttatgccctgctgaagtgaaggttctatccgttttggactccatcaagtccacctgcttccctaagctgtgtccaggttttgcttccattcttgatattctctatttggctactcagaaagtaggagggagattacataaaatcaaggctcttattttttttagtggggaagcattaagttatgagctcagctgaagagggatgagtggttttgtcaatgctttctgaaatatgacaaagaaaataaagagcaaaaatgtcaagctttgtgactttttttccttttcttttagtttgaagctattaacttcttgcttatactgaagaattcttgtcccaacaaactaaactgtgttttgtgtccaagttttcattgtttagtatagattttagaagtgattcttatgttgcttaaaacacgtaattgattcttatgttgcctatatttaatatgattattaccagcattatttgggtttgaaccccaatgagggtattatttatggtgttttgatgtagttgataccttagattgtctgtttttgtttatgctgctcccagactatgacagcttgagtttatgccattctcttattcgttttctttaggtggaagtagtttccatagaaaggattgcagagtaccacttagaagaagagttcattgttcggtgcagcaacctcctccagcttggccaggaagagctattccagaggaaggtctctgtaattggaatgtcccaaagcctgtttcaattctaggctccactggctctatagggactcaggtacaaaatcaaaccaaaagactaaggaaagaaaaagagtgaattttgtctgtgtgattaacctgggaatcatggtttaaaggtcctatctgaatgcccttagtcaaaaatagttcctgtttcagaatatgacatattaaaggcctagtcataaactttatatgggaaaaggattcacaaaaacaatttgtaaagatttaagttgtgaaaaaaaaaagatgggtcctttcattaccccaatcatgttttagagttacttgtataaatatttttttagcaacaaatgaaacataacttttattagccaggtttctgtaacttgactccagtcagagctacctatttcaagagagtttgagttctctttcttcagttcaggtcttttttgtttgaaaacagaagacattttctgtatttgattttaacagtatttggtttcttgccttattattattatctcttcatacattccttgtaactagagtatgttgattttcagacactgaacattgtggcagagaacccagataaattcagagtagtgggacttgcagctggttccaatgtaacccttcttgccgaacaggtattctgttaacctgacctaaattcacagatcataactatgatcgttagtgtatgaagatttaaaggttcaaattcaaaaacttcccatatatatgttagtttcatcattttgacaggtgaagagattcaagcctcaaatagttgctcttagaaatgaatcattaattggtgaactaaaagaggccttagctgatgtggaagaaatgcccgaaattattcctggggaacaaggagtcattgaggtgatcttgtttctaacagtctgatgataaaatgcatcttttcttctagattattattatttttttattattattaatgccattctatcagcataaatatttctaacagcataaatatttctatttttaggttgcccggcacccagatacagtcacagtggttacaggaatagtaggttgtgctggattaaaggtaagtccataaaggtttagatgcacactatttttatagtatgatatcgtatatatgtagaatcaactgaagtgttcttcctattagctttatatttttttttaccttttttgtaggaggtttatttaaaatgtggcaagcatatttctggtactattaccagttgaagtatatcttgctttttcttttttcttagcctacagttgctgcaattgaggcaggtaaatacatagctttagccaataaagagaccctgattgctggaggtccattcatccttcctctagctcacaagcataacataaaaattcttcctgccgattcagaacattcagcagtatttcaggtacatatacaaacgaatttcaatggatcttgtctaccctattcattatttctctcacatccattagactatattgtcaatatgtgaagcattggtaaatgtcaggaccaatattatcatggcattgtcatcattgtgccacatgttttcactatagttcattagaagtgaaggttaacgaaatctgttttcttcagtgtatccagggtttgcctgatggtgcactacggcgtgtcattttgacagcatctgggggagctttcaggtgtgaaataagtattttaattgaatttggtagcggaatattaaaattgttttaggccgttgataggacacggactttactacgggctactgcatcagcatttaagttatatattgatttggtgctatgatttacattttgaagttaaaaagcttgcataaattattttttaaaaaaaacatgcttgtagattgtcttattttctttgaataagaaagttaaaacttaaaattccataatctcttgtctcgtgtacaagatctatgtgtattatccttttcaaaattctttggacatgattagtcattaaacaagtatctggttagactgccaattttggtgatttcaatttttgaacccaagctcatttgttaagattctgatttggtgttatattaaaactcctttatgacagagattggccagttgaaaagctaaaagaagttaaggttgctgatgctctgaaacatccaaactggccgggtatgggaaagaaagtcactattgattctgctacccttttcaacaaggtttgatacttgttttcattgttttctaatgtattttctctttcattttcaactgcgagcagtaaaaaaaaggtgtctttgttttttctttttatcaattctgaaacagggtctggaagtcattgaagcccattatctattcggagcagactatgacgatattgacattgtgattcacccagaagctattatacactctatgattgaaacacaggtataaagctaaaactagtagtcttggttcttcttttgctagtttgcaataggactgtaaattacaaaatggagagtctattatacaaaattacggtctcttcaatttgtcttgcaggattcttctgttctggctcagttagggtggcctgacatgcatataccgattctctatactatgtcatggccagacagaatatactgttctgaagcaactttacctcgacttgatctttgcaagtaatcgtctttttccataatatttttccacaatctttttccgcatgttttatcgaaagatatgcctacagtaagccaaaattcagcttttacatgtaaatccaacaaagtctactgctgacctttatatctaatttgtgactttcagaaccaatgtgaactgaggattttcccccctttatggacatccgtaattattcaataaattagcatatttctgggtttttttaaataaatttctcaagtgaaagtcatgtttattctttcctagatgcctttttcatttttattatttttagttcttttcctacaaaaaatttgggctgagtgtataaatggaatcgacattgatgcaggcttggttcgctgacctttaggagtcctgacaaccagaagtacccatccatagatcttgcctattctgctggacgtgctgggggcaccatgactggagttctcagtgcagccaatgagaaagctgtagagatgtttgttgatgagaagtaggttttctatttcatcatctttcattgataagattgtcacttcaattcccaactttgcactatctatcaacacactgctatctgttatatcttcctcattccaaattatattccacccatgttttcaggataagttatcttgaaatcttcaaagttgttgagctaacatgcgacaagcatcggtcagagatggtgacttcaccttctctcgatgaaattatccactacgacttgtgggcacgcgagtatgcaactactactttgcagagctcttccaatccaaaacctgttccaacggcataagaggagacaacttttccattgttgaccagggcagcaaaactttattgggtttgaatttatgcttagatattatcatgatttccctataaaagtggcaaataaaaaaagtagtgtgtgttggggtttggatgagttaaacaaattgtatcatgtaaataatattcatccaaaatgttgttccccaatagagaaaaaacaaggtagttaaaatgcttaaaagcatattccctggtcttaaaagagaacgaaacaataagacaaaattaatgcaaatcaatgattgcataatgcgattccatttcattctcttctaagtttcatattgttgattgtccaactaaagttacctcatgttttatactttgattctaattgggcgatttgcctaatgttttgactgaattttatttgtagaagagaaaattataaggttttatttttatgttatatttttgtaaaagaagatagaaattatatatttgtaaaataataataagttttgtcgagaaagtcatcggcgctggaaaagttagtgatgcgaaaaaagtcgccagaaaagttattgtcgccagaaaagtcgctgtcgttagaaaaagtaacctgaagtaaatgtctcaaatataaacaaaaaaaaaaaatcggttttattacataatgaataaaaacaaataacacaaaataacttaaatcggttataattgaaatataacaggttctgtaacataatgaataaaaataaataactcaaattaactcaaaccagttataattaaaatagaaccggttttataacagtgttataataaataaaaacaaataatacaaaataactcaaaccggttataactaaaatagaaaaggttatataacataatgaatgagtatttttgggataaatattgtatgtgtgtgattatttggtgggttggagcatgttgaatggatgtttttgtttgagttattttatttgactgatttttgtgtgtgaatttttatcttagttgctttacggaaccaattttttgtctcaaatttttaactagttgataaatttaaccggattctttatattatatttgagttattgtgtgttattctttgtgcttatttattttgttatggaaccgatacttttcatatatatatatatactagcgaaaagttacgtgcgaggcacgtata

SEQ ID NO: 296509 - DNA, 2115 bp, Cannabis indica
attattttttatagagttggtattaggtacaagtataatgaaaacaaaacacaacaactcacaaaaaccaatttgtttctattataaaaatagaggtttagtattatcattacatgtgttaattgagactaaaaagctgaaaaccttgcaatcaaaaagagctttagtgcatatgtttgttcaaacaaaatatcagctaattaactatttaatatattagtggtggctatagttggtaaacctactgccttaattattatacaagataagtacaaagactttgatataatcatcattaatagaacgcaatatttttagttaatatttattagtgttatattgttgcttttagtttatgaaaccaaatccattcacacaccacacactcaaacaatgcttctttcaactttctttaactatattcattcaagtagaaattaaccttcagatcaaaaggtaaaagtaagcactgtgtctcgttatggataccgcctttttccactcatcatcttctgttttctgctcacatgacaatgagaatcggaaatttaaggaaagaaaagtagttgcataattagaacatatgaactaggaaagaaaaggaaatgataaacatgaacacatatatagtgcaaactattgacatttattaatatagtaaagagcacctgtggtgcaccccgtataaaatgttatatcgctactggtgcaattaaatatcagatcttatatgaggtgttatatcgctacactgtctgataaggttgctaggtaccatggtgcctcgtagaaaaatgctccttctataaattatgaaaaagctaaagaaatgaagttaatgtgaggtcaatatggaaaagtagtagaaaataataaaaccccacagctcacatctttttttttcaaaaaaagagaaatagactacccctaccactatgtattaataatggttataagaagaatacaaaagaggaaaagataagatcacaaaacaaaacagaccaaaacatcaagtctttttacatcaacacactcccactccctacacaagtctagaaagggaaaattctcaaaatgttttgttctaaaggcccatgtgactgtccaaaatcgaactctctcccaaacgtcctacgctggaacattctgctatttctctctcaatccacacagcccattacatatgaaaacgagcagatcaaacttcaatgaatgccacccaactgatgcacccaaatcatgaacttcaaatggttgaatatgtgtcaatgcagagtctgtaacaataacatcatgcagttctgcaatggggaacataaacaaagcataaataaccacacaaagcaagattattttgggagtctattatgtactgccaccaactaataacatccattatataccaattagtcaatctgaattcccaggcagccactttagctaaggtttttgaaaccaaaccaaaggtgaaacaacaaaagtcatttaagttgttcttcagtatagaggatgaaactctgattacacatcaaaaattgattgtgtcaaacatgttaatcatctcacaaccataaaaaattctagcaaaatacaagcaaagaattacagcaaaacatcacaaaatataaagatgaacctttgggttaagccagaggtagaaactggtacaggtgatgatgcttccaatatatatactacataaaaatgaagaagaatatgttaggcctcaaaaatatgctttcatatccaggtgtataaataaggcattcaatttagttcctttaggaatgattgttttgttaattggttagttagttagaattcatatgttaaagaaggtgaaacgctttctggggagataccaaactgtctcaaaaagtttgaaactttgtaattctttcattgatatcaataaaatacctttattctagttctatcaagtattggattggatcaaaagtgtcatacctgggttttgtgcaatagattcaaccaacctcctagtgtcatacacacaacacaacctaaaactaagaatgaagactttgattcaatactgaataaagcttttaaacaattacaaaagacaagaaaatagagtaatacctatatttt

SEQ ID NO: 296510 - DNA, 4637 bp, Cannabis indica
cctcggtcaacaatagcaatttaggattatttgagttatgcttgttgtttcttgatgaaacatgttcatttttagaaagtttgataaggtttgggtgagaattgacgatgaaaaataatgtttttttgttgtaggaatggtcaaccatttttacagggaccagaaaaaatggcctgctatttttaaaagatttcgggacgaccgaaatttgtattttggccataacttttcacttggatgttcgttttagacattttatataccgtttcaaaaatcttgagaagattttcagcatgagatatatttttggtccaaattattttatttattttagggtgtcttcaccgcatagttcggtaggaaaccatagagtatttacagatatcaataagtgttatagagtaaacacttatcagttttacacttgtgacttagggccactaattgacaagcactaatttcctctcccgttggctggcgtacttgaatttagaattgagataagactagtataacacatatacatgtggacatggttgtattttccactaatatgacatgttaataagattgttaaaaatatacatgttagtgcatattacatgttatgattatatgaattgttgctaccatcactagtgtagttgtagtacatagcgcatatggtataatgtattacttgattgtgaggatacaacatagtagcgttacccacactagtactggaagagtattgagtgcatgtatataatgaacagttgtatccaacattataaagaaagtatagcatagtagcgttacccacactagtactgaaatggtactaagtgctcgtgtataacgagcagttgtttcccacataataatatcatagtagcaccacccacactagtaccaaatgggtatagagtgcgtgtgtataatgaataattgtactcatactataaacaaaccctaccaacacaagttttggaaggttattgggtgcatgcaatatagaagtcgtactattgttaagagcttttgagactcatagagcgcatttcacatgaacatacttgtaaccaggtgtatgggtgcttaggttatgagacaaactatacatatatgaaattatcggttatctgttttgacttgttgacaaatgtatgggtgcctagtcacaaatcaattatctgttaatgcttttcctactaattttgtcgactcatagatactatgttttgtgcaggtaaaggcttgtcttcaactaattaccagtgagtttagagcttagtgaagattgtatatatctcagcggttagacttggagtatttagatctgtaggacaatatgggctcatactttatgatgtatttagttgtaaaatatagaaataggatccttgattttttaaacatgtcttaaaatttatatttattgtaaaagtttaaattaaatcacattgttcattaaaccctttgatttgtaaatgttgcacaataattaagaatgtacggtagtacgcctaaactagtagggttttacaataatcaagaattattctttagtgattctttgatctaaaaccatgtaggggtcaccatcagaggaacattgatctggatcttttgcaattaaaatagaatcttgtttctgatttctcttatctttgagtttattcttcaactcagtgcaaaaacttttgatatgaccaattttaccatagaaaaagaactttctgtccttgttgtattttcctttgaattttgatctcgatcgagatttgtgatgccccttggaataatctcttatgttttgatcccttcctctagattgatcccttcatctagcttgatctttcctctggccatgaacacttcatattgtttgttttataataccaaatcaagtacacaatgaaagagttgttttttattataattgtaccatataccgaagatcaccatatgtatatatatattaaactgaaagtaaatatatgaaactaatatttacctctcgaagcctatcaaggtatcatcaagtcttttcatatgttatatcctcataacagtaatgacaaaattcacaccttgatcttctagatcttccactgcacacaaggacttgttatacccaaaatttgatgaacacattagaagaagacacgtgttgagctaggaagaatgtagaactcaaacacgcaatcgtaagtacacttgatgtggaataactcgttaaaagcataattaacagagtatgtttataactcggctgactgaacagtcttatgagagataaaatgtactaactgttgacttgtgtctcgacgagaaaccatgtaaatgcaagtgtgtatgacaatgcattaacctcgtcgcgtggaggagatataataacactagaaatacttaacgtatatgacacggtatacaaactgagtataaacagaggggtggatcaaggtgacagatagcgaggcgtctatctcgctgtaagatggcatgcacgcgagaaagatcatcttcacactagaaattgtagttgtcagagttaaagtaaaagcaatatctacctcaagaagatatatgacgagctccagctcgccatcagagttaactcggctccattcccagttaactcggcatccccatgagataacacttaccgaatatctttcatatgcattcattttggcccaataaaagcaaaatattcacagctgtgtgaattttaaataaaaaccgcatttacttagcgtgatttgtaatcaaatcccatgattctaggggataatcgttgtaaaaaaattaaagtcaactttgtaattaactggccactatgtaattataaatagtggtaagcaagatcacaaaagggtcgggaaaaaactcatacaagagaggccctaagaaaacaatcagcaatctgaataagattgactcatggactatgcagaattttaactgcaaaaccacgtaaaaaaccttgtgttcattttttacttttatagctttatttatactgtttgagattgtcacgattaggctcaaatttggttaacaaaaatctacgttaaagtttggtgctttcattgagagcatctgcgaaaaagctcagaaaaagcctcatgacataaaagtaatggataacgctaaagaaaataatcctcatgaaggactcagtcatcgccctggaaaagagccattgagtcctcagggatctattgagtcatcagatgaacagaatgcaagccctaggaaaacctagtattggggtccccggcttgacggacctatggtaaacaacgaccggtcacttcctaaccatgttgatgaggaaggcgcctatgacccaaccaggtacatagcaatcgtggagttagaaaattgccatcttaggcgacgagtggaggaagcaaaccgacgtaatgccgaattagagcgtgaaatagccacagtaagggcatcgcaagagaatagttcttgaaatcaacctgagcatggaagaagagattcacgaggcaaaccttgcagctcaaaaaccaaggggtaggagacaacccagagatattctcagaactcttaggaggggtaacctaaggaaactgaggaaaattaggggacatagcctgggatatgtggaacatcggatgaaaattgccaacccctctccaagttcataagaaaggaaacccctatagggggaatgaggtgaatcaaaccttaggaggagagcagaacgaaaagaggtggggggtaccacgaggcgtacgttatctcataatcgatccatgcaaggaggagagaacagttgttgcagaaataatcaaagaggtataatacatcatatgggaagagtaaggttcgacaacagtcacgaccggtgtgacctacgggaatatttgaacttgagaaaacctgattttcgtcaacgacttggtccaaaacaaagggatttactccattttcaaatggatgagttggagaataagtccagaagaaatcaagtcaaggaactcgggaggcaatcgagatatgattctattgaagagtttgagccagaagcctcaggatcaaaaagaaaagacgattccaaaaggctaccgaaggataagaaacacaacaaatatatccctttttatgctgaatataccgagctcaatgaaactcagaaagatatctacctcgcacatgtacaggaagttgcttttagcgagccaaagcctacgaaacatgcgagaagcaaaagggacccaactaaacggtgtgaatatcatggggatatttgtcataccacggaagagtgtcgtcagttgaaggttgagatagaaggtctcatagcacgaggacactttcaacaatatatgaaggggcagggcaatgcccataatcaactcgatctgcccagtaactcgagcgaccagggataataaccctcctcggtagaaggaagggagacctctgtcatctcgagagggaacgagtcaaaataagagaaggggcagttaacctggtaaagcaattacgtaagagaattgagtaaatattggcccgctagggttgccatatcaagctacaacgtttaaagctggtcgtaaaccagtaacagttaaaaacaaacaactaaaaccaggattagttcacctggaacc

SEQ ID NO: 296511 - DNA, 1059 bp, Cannabis indica
atgtgtatgtgcctcatacatcacaggtttttcccacatgatccattgaatggtcatataaaccctcaaaatgactgaaaattaaataataatgtatcactactcaaacttcagattagtcccttaaaagaaacttgtggattagttcatcatgagatatagaatgctgtctaaaacccttagaccatcaccaatatatggggtaaaaatacgataaatttgacacaaaaaattaataaatactgtatatatttttttttttgcaaatgtgttccaatacataaaagcaacttaatatacaaattgataattatcattaataataatcaaataataatcaataaattaaatataattttttttaaaaaaataacaatattgtaataaaaaaaatgtatgaaagtaactcattaatgttaaataacaataatgtaaataaaaatgtttattattgtgcaaaatttggtccaacttttaacatgtgtcaaatttgacacaccactgaaggagtttttacataaagtataaaatatagcattgcaccacttatttagcattctattagaaatactcttataaaaccacatttcttgtggaattcatttatcaataaagaagtagaaatcatttttgttctgtcaattgtgttgtttacatattttattacatgattaattattattaatacaactatttataaaattccgaacatatagtaaggtcacggtaaaatataattgtaattatatgttcaaaacactttcgtcctaaaactaaatcaccaaactggatatttttgttgattcggtaatctatgatataatctacttacacatctaatgtgatgtcttacccaggagaggacagtgaccaagtagatatgattgaaagtattttattacattggactgaccaatattgataattaataagataagataattaagtattgttattgttatattatttattacataatataatatggctgctcgtgctgaatattttttccataaactctttgactcccctatgctctcttctctctcctctttctga

SEQ ID NO: 296512 - DNA, 2793 bp, Cannabis indica
gactggaattggtaaaagtaaaaaaaaaaaaaaagaagagagagagagagagaaacagttattatttaggataatgttaaaacattatagaaaccaaattacattctttagttgataacaaaatatgagtacgttactattcatgaatatcttccattacatttggcaaattagacagcaatataaggcttttctatcatttttctttttgcaaattttctgtgttccatataacgcaaaacaaaaaacaacaacaaaaaatttgtccccaaaatattaaatctggattcataaaaaaacacacttaaggatagcatgtacaagaacaattaaggtattcacaacttacaaggaaatgaagaaacattaattggaccttttggcagattaaattcaccaagagaattttgaactcccactgcaacaatataacaagagacaaactccgtgaatagatccttgtacagctataaataaatccatttcaacaaattaaattgttcacgcttaccaaagctgacaagcaaaatagaaactgtgccagatctagcctccactgcaagcttattaatatcaggcagtacaaaatttgcttgagcttgatttctcccctcaaccccagtagaactggtcaacatgcatgctcggttgaatcgatatacagctgagttctattttttttccaaacaaaactacaattagacaacaagaacagtcgaccataaagatcttccaacagaccagacaatatttgaaaagtaaaatgaggataactatatgcattgaccaatcaatttactttactcgattgtaattcaaaacaataagactaattttcactacatgtaaatgcacatgctttacctctgcagctgcaacatccggaactaatcttgccaagaaaacatacataggaaacaaattcggagtatgtacagcattctcaatccttgaaagggtaactgtcatttgtattctacaattcaaatacaaaaattaaattagtccctaaaaatgttaacaataaagtccaacttctccatgattttcagcatatgttgcacttcacattgaaagaaaaatccacaacatctactaaattagaagtgggtgtgagaatattaacagaataaacaagtctagaaagtaataagaatgcaaaacaatgtagataaagatgcatatacatgatactttgtttgtgtgtgtgcctgtgtgaggcgagaagaagggtcgaaacctgagatacatacatacatattctcccactgaactttcatgaagaatggggagcaaagcatgtacctgaccactggaacaaccttcctatatactggactatgaaatatcctaataaactcaaacaccaaatgggtctaccctctacagtttgtctattaagcacgaatttccaaataaacataaaactacctccttttgtgcttcgcctccatcttgtaactcaaacatctttgaagaaacgacggctacaaacagaaaaacgacacaaaaattagaagaagaaaacgagaatacgcaaaacataaatgttagagaagaagcaagcttacatttctgatagcgcggcgttgaataatgttgtaaaattcgacaggcttacagtaaatggaaaggctttcttccgcagcaacttcctcttccgccgacatacgcgcccgcgactcttgtcggcacatctgaatcaaaattgttaatgaaaaccctccaaatcttatgcaaacaaaattcgaccttgaattcgaagaacgtcaggtcagtaaaaacgtcgtaggtttcggtggagaagaaaacagaggagggactactagggcagagttaggaggagctgagaggtatggagttgtggtgagcgttgttcttcgtctttgtcttcgtctaaactctactgtgttggcaacctgtaactgtagctccctccatctgacgccaaatccctctcgtcttactcttctatttctttctatttttctttttctttttttcttttttcgttttcaaaattttcttttgagctaacgatgtgttgaaatttaggctacttttggcgcacaaaactaattgggaattatcactgtgtacccaataatgcaaaaatattaagataaaaaaaaaatgcaaaaatatagcgtataaaaaaaattaagattctttcaaaaaaaaaaaaaaattaagataattaacgtgaagtttagttatgttttaattttatacagtaaacaaatttatgttttaatttttgtacataattttttgaattctttggcaatactttttatatttaatttcatgtgttagttaaatattgctcttaaatattaattagatttttgttattatcattgtatatacacatacatatacatagtatatttttattggttttaaaattttaatgtcaagtgtattgtatatagatatacatagtagacttagtagtaatctcatttaatatttaacgatgaatttaattgatgtctaaaatttataaataaaagattgggtgttgtcaaagaaaagatcaagtaaataaaaatttcaaacaaacaggagttttaccaaaataataataataataaataatgcaaatatatcataattaattaattattaatattaagaaatttttttatttttatattttaaaattgttcaaatataacataaacaaagtagataaattcaagagtataacataaaatccagtggcggaactatgttatggtatggggtggccatggcccccctaatattttggggaattatttttaatat

SEQ ID NO: 296513 - DNA, 2007 bp, Cannabis indica
attgtgcccaatttacgacggccgaataggcgacggttatagaaaccgacgacaatactttaaacgactgtttaaaagcgtcgggaaaacccatttttgtagtagtgacctctacatgtacacactgatgtgtacaatcatgtcattgattatgtgttaaaaaaattatgcataaattaaaatcattaatcatttgaatgaaagatagttattattttattaattaatatataataatgaaaataaataattgcaaagtaattaaatgaataacaaactaaaacattaatgccatctatttggtacatgccatttgtaagaaaaaataacaaaagtacaactatgtgttgtacttaaattatctaaccactcaatatctcctatgctagctttctctttttgaattaagaaaacctaaaacaaatttttcttttaattctacttacaagaaaattagaaagtataaacttgagcattccacaaagtattatttgttgcatcccaaatattgtagaccaaggtatgttggctagtttctcttgtgaaatagcaaaagttttagcacttaaaattcagtcattcaatgtcatctgttgggtgttgggttttcggaaagtgcaatttgattctaatatttatttaaatgtgattctgaagtttaataagcaatttctttaacttcttctttgggtttagttttatcaaatttgggacatagtttgtctattttcactctgctaatctttctttatgtccagatttattaatattattgcttattctttggttaaatatgtcttttcgaaaattattaccaaaatttagtagctcggttatctttcttgtattaacaatctcattattagtaagataaattgattaaatcaacttccctttgtgtttgaaaggtgggttttgcgggtattttctcaaaaataatataaactaaaatattaattaaaaaaaaaaaagaaaatggaagaaatgaaaatctgctctaatcttcatatatactctatatatcacacgttttgttgaaaaccaaataatgcaactataaatgtaatttactgtaacataaacaaattattttaaaaaataaacaaaatgaaattaaatgttaccatgaaaaatgtttttaaaaaaataatattccgatattatttttaatcagttgaaatataaagttgacgataatagttccttattaattattattaaagttaattgatactcataatttaatttaagtatattcatgtggcgcagcgttattcaactaaactgagcatatgaactggagaaacacgtagaatgatgatacataattcttggtaattaaataaatggaaaacaaattaaatatagaaaaaaaaaaaaaagttttaatgtgtgcacggcagtctgagactctgagtgaatgtgtacatgttttttagattgttttttaataaaacagaaaaatggggaagtggaaagtgggatgaacccgggcacctaagttaactatgacgtaagtgcataaatggctgtgttgtgcaatattttttgtttgcattgaactatgtgacatattatttgtttagagtttgctgttagccatttacgtttgattcaaaaataatgtttgtctcgttcaaataagaataatattattcataagatatacggcggtctcaccaattttaaaatgaagaaggaagaaaaaacatagtctaaatacaattccctaacgaactgaacttgttataggctaacatattggtattcttttatttatatggatattaatactatagacgtgggagaggaaatatatttaaacaaaataaaacaaaaacatccaattaaaataatatgaaaatatgagattctgtattctctgatctctccccatatttcaaggggaataatgatacgaattactgactgacttgttccactttttaaggaacaattttgtatataatatttaataaatttttttatatttttttttttataaat

SEQ ID NO: 296514 - DNA, 5168 bp, Cannabis indica
atcaaagctgtttattttattttgtttagtactttgttacatgtggagattttagatggttgtttgggtgagatgagggatgttatcagagttaatgaacttcttgaaggcctgttttcggccaaggtcgaaacggtatgttcacacgggttcagattctgttggtcgccaagaagggttgttgtggtacaaagattcaggacaacacttcagtggtgacttttctatggctgttgttcaggccaataatttgcttgaggatcaaagtcagattgagtcaggtagtttgagttcccatgaaactggcccttttggtacttttgttggtgtctatgacgggcatggagggcccgaaacgtctcgctatatcaacgatcacctctttccgcatctcaagagtaagtgtcttagaagaagacatttgaattgatttgagtatttgagttgtcaagttcttaatttgaatgtcatgatgttgcagggtttacttcagagcaacagtctatgtctgtagatgtaataagaaaggcatttcaagcaacagaagaagggtttttgtctcttgttacaagacagtggccgatgaaaccacagatagcagccgttggatcatgctgcctcgtcggtgttgtttctggtggaagcctttacattgctaacttaggagattcccgcgctgtcttgggaagagctgttagggcaacgggagaggttctcgctattcagttgtcagctgagcataacgcgagtatagaatctgtgcgacaggaactgcattctatgcatcctgaagattcacaaattgtagttttgaagcataacgtatggcgtgtgaaagggcttatacaggtacttgtttcactgcaaaaagaaagattatatagtattgggatataatattattcgaaaacagaattaaaatgctgtggctttatgtcaatgatgctttcagtatccattttcaggatctacttgttcttggctaaaggaaggatgaatataaaatgacaggaacaccttgtgtagttgctatataatatgattcttgcatcaattactttggtaatgacacttatagctaataggtcatttgttcagcaagtgtgatgatgttttttatcatcaatttgttgataaaagattatgatttaattactatggaggaactgtgatgtgatataatatttttttgttggtcaagtaagtatgaaactgagtaaagttggttgatgtgttattgcagacatgttaatatcttaagatttggtttgataattcttgttcttgttgaatgatagtttttcgaaatctttgtgttgcagatatctagatctattggggatgtgtatttaaagaagtctgagttcaacagggagcctctttatgcaaagtttcgccttcgtgaacctttcaaaaagccgatattgagcgctgatccatcgattacagttcatgagttgcagtctcaggaccagtttgttatatttgcatctgatgggctgtgggaacaccttagcaatcaggaagctgttgatatagttcaaaaccatccgcgtagtgtaagtaaatcattactcgacactaaactactgtttttcttcgactttggtcgaaattaaaacatgatttttgctcctatgctcaaaacatttctcttcttacatgtgaatttcttatgaatttaaattgaaacaaaactatagctttacacttgttatgtttttccaactcatttaagtaacaaaattataggttgtaattgtattactattaaatacagttaaaaaaagataataccaacttgattttacatgattatatgcatttcattagtaacaaaatcatcttttgttgggtcattcttgaacaaaattattgacaattaggtgacatgaagcagtttcaaaatcatttggtttttggtgatattttaagaagagtaatttgcggtataaatacttaagtttaactcttaattgcagataaatacaaagtttaatttttgacggtaataatacttaagttatatttctgaaacttcagtaggtacttggccattaaatgtcaagtcaatggctacgtggcaatctctgattggtccaggtagataataacttgacacttaacagtcaggtactttgagaagttttgaaaatataacttaaatattattatcgtcaaaaattaaattggagttaaacttaagtatttatgccgcaaattatttacatatctatagatttttatatttttcttcctctttgacccacttattcttgtttttccctttgtaagacaaaacaaataacagttccagtccaagagagtatgaggatccattggttaagttctggtttgaagtctatataattagtatgctacttagagtagttctataagcacattgaattgccttcccttcccttcccttcaattttttttagtaaataatctaaaaggaatgatccccaatagcaaattgaccaaccaaatttctgttcatgaaagattatattttttggtcaagaaaatgggaaaggagaaaaataacttgtgtttgttaaacttatatttcatttcagggaagtgcaaggaggttggtgaaaaccgctctacaagaagctgcgaagaagagggaaatgagatactcggacttgaagaagattgaccggggtgtacgacgacatttccacgatgacatcaccgtaattgttatttttctagacgcgaatcatgtgagcagagctagttctgccaagtttcaaaatatatcggtaagagggggcggaatcagtttgccttccaacactctggccccttgcggtacgccaaccgaagctggcaatacctgaatcagattaggcctgtaatctcatctcaactcatgtgtttgttgtatgattctcttgtgtgaataccaggtagcttcaaaaagagattaaaaacaagaaaagaaatgaaaaaatagaaaagaaaaaagcaaaaaaaaaaactaaaaaaagaggagcaggccttcaattctttattgtatactgtaactttttaactggatggaaactaatacttgcatttagccttgagaaagagagctcttctaaggtgacagtaatattagttgtttcctcaagcaaattccttgcttctttttctcagttggcatttgttgttttataaacttcttcttttttatttttcacataaattacaaggtagttagaagatagtagaatattaactgtacttatttaatatcaatccctatttgttatcaaaaaatggttgcaaattcaaccatcccagatcatcagaagtagagcgctcagataatgacagtggcatgtgatagattgatcgactgaccttcgaagaagaacgggattttcggggactagccttacatgccagtacccttaggagaagcctttgctaattgctacagaagttatttttaaagggaattgagaaagcatattagtactttagcccatctccaaccatgatcaccatctttttttcctttttgaatttcaatcgtaacactaaaaactacatcaaattttacttttcttatcattatattgattttaatattatatatataagttagataatattaatattatgacaaaaactggtgtatattatagtgtttggttggagataaattatacactatacatgatatatgcaatttagttgtaagtgcccataggctatctctaaccaaacgttaaaatgttatatatgatgtgatttttttcacaaaatgatccaaccgaaaaataaaagtaaatttatttttatggaaatttataatgttccactaataataataggaactgtagactatgatattttcgtttttttttaccctttaaaatttaaataatgtttttataaaaataagaaataattatataattatataatctaattatattaataaaataatataataataaaaaatataatctaatttttagtggcgtggttggaattggaaaaaaaattaatgttgaaatgatatccttttgaaattgattttattcttaatttagaattcactgtcagagttactttaaattctttgcttgcttgtaccattgcctagtgaaaaaaagagtgtagttacactatactttttgccaagttgtgtttggagagagattagctatttgtgattttcttgtttattgttgttttgtttcacaatctgcgaataaaactgctcacttttttgcacctatttctcgttttatgttaggttgtattttttctataactaatgctcatgcattattacaaaatattgtgatagctgatttaactatttgaatgaagttatttactattttttaaaaataaaaaataaaaaataagtaacacttaatattaaattgctcttataacaatattatagcatttctcatagtaaaagagtactccttttaagtgcattagtttatttgtaacacttttctagaatatccaccttgcattgcatttgcaatctcagaaagaagaatatatttctgacatgggcaatgggctgactttcaaacccacattgaagatagctgtttgaatcaaaaatatatattaatattgtttaaaaatgctaaacaagtacattgctttataatacaagtagtagtagtactactacttctactaattttaaaaggctaccactgtttgtaaatggacctgtttttaggttgagtcatcactcatcagagaacattcttatatgaaacatagtgagtgagcaatgttaaagcttgaacttggtcattcatattaatagacataaatagggatggcaattatacccgcgggtacccgcctctaatggagcaggtataggggtagactttcgggggcaggggacagggccggccagagggtggggcagccggggcctcggccccaggccccacaattttggaggccccgaaaaaattaaaattgatatatatacacatataaaaaatatataatatataaatatttaacttattaaaggacataaaaaatgtatagcacaaatggtaagtgagttttttattagccttgaggtcagggttcggctccttcctcagtcactttttaggcttttagttatttgtgaaaaaactgtataaaaaatgtcttttagttatttgtga

SEQ ID NO: 296515 - DNA, 1314 bp, Cannabis indica
taacaaacacagggtccaattggtaacttttgtaaaacagagggtccaaaatgatatttaccctattaaatatatgataatatttttttaagtgtagcataatgatatataatcaattaatagcatgtaatttaaaagttttggattcgaattgatgacctctttctttccctatctcttcctcaccactaagctagcttataataccataatataatcatcgtcatgtataacacttaaagggtgggatatttctacactcaaccaaatgtaggtccgtgactccgtcatagaattacttttttaacttcattgatacgcttgctaaattggaaaaatgaaatgaattgtgaatattccaaatttggcttaagaaattcactttcatttctagaaacataatgcaaacacataaagtgaaacgttacttagaaagcccttaattagctgtctaatttttatttctgttttaatttttcatttttcttaataaaaactacagtccactgaaccagttggtcaggaatttaactttttttcatttttgtgcttttgttatgtcacacattgtcattattttagctaataatggcttttacttgtaccagtgtttaattattttatttatttatttaagtaaagatagacagtcctgcagacatgcgtgtatttttagtttgttcccttatttacaaaagtatgtttaaattttagtgtgtgagcaggcacacagtatggcacataatttggatccagacagtgatggtagaggtgttcttcagtttaagactggtttgatgtctgtaatcaaggtaaagtttaagcttgaattgtttacagtgattagtgaatgcagagcaatcttattgatgtttcaaccattcaattaatgtggattgtggaacttactttgagtgcagagaaaacttgcaaaaagggacggggccccagtagatcgtaatcatgatattgagcacctctacaaattttaccaacgctataagaaacggcatagagtggacgatatacggagagaagaacaaagaatgtgggagtctggaacttttggtactgattttgcaaagtaggtccattttctttttaaatataagtttatcctattaaaaatatcagtttattcttatccatagccgtgttgtattttttttttttttttttttaatgttattctaatctttttattattttagttttaaaatggaaggaagaccattaaattcaatccaaaaagaaaaaaacttaaataatttttttattaatttgttttatatgtattttaaatttaattttatt

SEQ ID NO: 296516 - DNA, 1593 bp, Cannabis indica
atagcaaagcaatggattgatttcccttctttgagcagacctaaattggcacaagaacgtagaacactcatcatggttactgaattcggctcaactatcatcaactgcattttcacgaaaatatcaatagctttgtagaagcaaccagattgattatagcaggaaagcattgcagtccaagaagaagtagttggatgagtaacatttcggaaaagaatctctgcaccatgtaaatctccacatttgccatacatggtaattagagaactatccaaggacccatcagttttcatgttccttctcacaatgtaaccatggaccgatttgactagccttgaagaccgcaaatcaccacaagcatcaaccacactaagcattgtgaccgaatccgggttaacaccttcaaacaccatccaacaaaacaagtccaaggcttcatttgccattccgttctccacgcaagattcaatcatggcactccacgcaactaaatctctcaccgacattgcatcaaacaccttccgagcattatctaagcacccaaagtccccatacataaggagcaacgaagtctgaacaataccatcattatcaaatccacatttgattgctctcccatggagcttaccaccacagtccacatcaccaaaactggaaaaggctcttaaaactgaggggaatataaatctattgacatggattctaaggtacaacattttatggtacaaagcaatggcttctttaaataagtggttccatacatagcatttaataagcacaccccacatgaaaaaatctgggttggggaaggtttgaaagacttgtttggaggattgaagggaacccatttgagcataggactgaattagcttggttgaagcttgtgggtctttgtgtagaccagaaacaaagaggtgggcatgaagttggacaagtgttcttatggtggtgcaggacctgaataagggcatgtaaagactcatagctatcttcttcaactaaatcagtggcagtgggaagggcatgaatgaattaaatgtaattgatgcctgtaaatcccattatcataataatttcatcaatgtaaataaatatgttcagtcattttgctttgtgcacttaattatcaaacaaaaagaggtagctttaaattgaaacaaatcaagataaaaatatgaaaatggtcatggtttcagttcaattgaattcaattcaattcaagtgagatattcacatatatagagagagtgttggagttggagacttacttgtgaattgtgagcacaaacagtaagagaccattagaccaccggagaagtaatttgaagagaagagaaggagtgaatttagggtgcacagagacccgtttttgttcgggtcgggtcgggtcgggtggggagccggagatgctttgtgagattctttcaatctttggtaggggtgttcatccgatccaatccgtacttttttggtcaaacaacatccaatccgcactaagtgcggatttcatattttggatccaatccgatccgcataagagtttaaatccaatccaatccaatccgcaataatgcggattggatcggttatttt

SEQ ID NO: 296517 - DNA, 3053 bp, Cannabis indica
gacttttaaaacaacacaaaaaactcaaagttattagctttttaggagcttgagccaataatacctatacatacatatagccccattgcacttcaattttcttcattttttttataacctatttcaaagtttccaaatttattattaagaatttagttatcattaataaagttaacacatttactcattagatcttttcctcaccatgcacttcttttctaaccattatatttacttaatcattagatctttcttcataataaatagttattagctaagagccaagaatctatcaaaacatgaaaagaacacatttttaaacagtaatggccaatgtgatcaattcatcaagaaactacaaactacgttcatgcatggcatgttttttttttattaaaaaagaaactttttaagacccttcttgtgatttcactcacatcaactcaaaacataatctagaaaaccagttgcacagtgattatttgccatgtgttgtgattggaaagcaggaaaaaggaaaagaaaataagagaaagagaaaagaaaaagctagctatatatactatatattcaactactaaattactaattatatgtaaagcaaggtgttttataatttttcattataaatttttgattttgttttatgggttaaagtgaggttgttaattaagttatgttcctctcataaccaacacatgacatagccatggggaagttaacatctgtcaaagacttccttaacaaatgctagtgagaagggaaccaaaacaaaagagagcaataaaaggagacaaccagccgatcatggaatcatatcacattattcattcacaacaatccatgcaggaatcaatatatatatatttatatatatgtatgtatgtacaatggccaatgccttttgagttgtttaagattaccaagaaagcaaaacttgttatcattcattcatggctataaaagaaagatatttataatatatttttatgtgtttaaggagacggaaacctatgttatgtcatgaataatgaggagaaataagaaaacacaaacaaacaaacaaacaacaaacaaagaaaagaagcattattgatgatcaatgaaacaaatttgtaataataataataataataataataataaaagattaaaaagagagattaatttgtatttaccagaaagaagaacatgttgccaagaggaatcttcatatgcccattaataaagttcagttctttccttttcctttgtgctgctgctgctgatgctggtggtggctgttgtggttgtggtggtggtcagaattatggcggtttccatcgccgtaacagagttgcaatcggccatcaacaaacccagttgggaattgatgatggtggttgtggttgtggtgatgttgatgttggtgttggtgttgattctccatggaaggagcagcagcctgagcctgagcctgagccggagcgggaggtgctgctcctataaagaagggtagattgtttgttccgtctatgggagaaaacctctgaaaatgaggcaaaagagacggtgaattggactgaagggtccccctattgaaaccagcaaggcctccggatgaagagatagagaagttgaggttgtaatcaacaaccccacccccaccaccattgcctccgccgttgggttgggatgacgtggcagcagaagcagcaaccaccggaatgagatgttgttcaggaacaaatgagaaatgttgtggtggttgcagtactactgtactctgatgatgactctgattattctgatcaccattatgttgttgttgttgttgatgatgatgatgatgattatgattgtgatcaccaaacatagacattgacatattatgctgctgttgtaatgagttaccaagattgattatttgcccagaaaacccagaagaagactggttatgatgatgttgttgttgtgttcttgaaacagatgatgaagaagaagataacccaagtagccctgatgcaaagtaatccatatgagcacctgggttttgttgggtattgggactagaactgttgttgttgttgttgttgttgttgctgttgttactcattccagctgtgagaagctcagtaaaggttgaattttgagaaatggaattgagattgttgttgttgttgttgttgtcgttgtggtgaacaacaattcttgactcattctctttctctttctctttagctgctctctctctagctctctccctggccttaactcggttaacccgaatatcggaccgggaaagagacaagccggagcctttactagtctccgatgtactactacaagctgatttagacaaaggctgattttggttttgattttgattttgctgatctaattgaagatgttgatgatgatggtaattgataccgtccatttcaacctcagctgaatcaaacccttgttctccgccgccggtgttggttccaacactacccctcttctcatcgctaagctgtttaggagtatcgggaaaagagccgttgagagaaggaagctcagcaatggcttccgaagccgcattgattaaccattcaacagctttactgggttgatcgaaacccaatcgatcttgaaggtcgtagaaatgaatcgccgtcgttaccgataacctaactcgccggtctcttaaccctttcgatgtccatactttactgtgccgatctttgccacctgaagctctcgaaaccctaataattcttgaagagtggtgccaccctcgaagccgattggctccagctcctccgccgccgttaacgatggatagatcagtagtagtagcagctccggcgccggcaacccttttgatctctcgactcccttcttcttgttcttcatcaggtgggtaattttcgtttccccctttcctactgccatttccattaatcctcgagtactttaaggcttgagcttgaatctcctccacctccataacagcagtactttcatgccttttctaaactaaaacagataacccaagtcgaactcattcaaaaagtacttcaccttta

SEQ ID NO: 296518 - DNA, 6104 bp, Cannabis indica
ttactgttattatatattgttttggatatttttgcaactagataagtggtccaggatggtaaatctttctatttttaaggaaaaataacttatccttttctttttctcccaacatccagcatataggagattttaactttccaaggttagcagattttggagctgccatatctggtgcaaacaaattgcaatgccaagaagtgcttgaagagctagatgtgagtatcattcaacatatctcaatgtggtgattagtcttgagatgggtttgggttttatttgccgtacttgaacattttcagaaaattactatttcaagaccatttttttttctatctatgttgccacttatgtaattctgaaatataacaggtgtataagcgattaaagctcacactggaattagtaaagaaggaaatagaaattaccaagattcaggtacttgatgccattgcttaatatgtgttgacttcattgttttttaacccttatttgaactgtactttctgcactgtaattaggaatccattgcaaaagcaattgaagagaagataagtggtgaacaacgccggtacttattgaatgagcaacttaaggcaataaagaaggtatttggctccattgtctttatatgttttttatatcttactctgcaagcatttcttctttcaagcccatttgtttctccatccaactttaagcatcttaaaatttttattgtgtaggaactgggattggagacagatgataaaacagcactatctggttagtcagtccagaatatctttgatgtaatttactaggatagttattataacatactaggtttcattctttctcatttctctttatagggtagatttataatttagttttgatgatttagtttttcccttccatagtaatttgtttgtcatcctatgtctagaagaaaaacatggcaaagttgataaattgctaatagatgaggctattcttcacttcatatcagtttctagtgtgtgtgttatattatattataattttctgttacagtgtgctttagttttttagttgaaaacatttatcccagtaaggctatgaattatttatagacattttcgttcacacttttttgtcgattatgctgcagcaaagtttagagaaaggcttgagccaaacagggaaaaatgcccacctcatgtcttgcaagttattgaagaagagcttacaaaactacagttgttagaggcaagttcaagtgaattcaatgtgactcgtaactatttggattggttgactgcactcccttggggaaacttcaggtctgcttatcactcaattaattctgttgactgcgctttaatttcttacttgtatcatgttttgtctgcactaaaattgataagaactaaatcaaaattcgataaaatatgaattgtctagtgtaatgctttatacatctataatgggtttgcttattgttttttctttttaatgtttgtagcaatttttattttcaatggtcttttaagccttacccctttttattgcagtgatgagaattttgatgtccttcatgcacaaaagattcttgatgaagatcattatggattgactgatgtaaaagaaagaatattagaattcattgctgttggaaagctcagaggaacctcacaaggttgatgtgattttcttgcttagttttaatggcattgcacctacaggccacgtgttatggattagacttgttttttttgagccagtcttaacttgttttaagctttgtattttcgatttgtgacaatcacaggaaaaatcatatgtctctctggtccacctggggtgggcaaaacaagcattggtcgatcaattgcacgtgccttgaatcgtaagttcttccgtttttcggtaggagggttagccgatgttgctgaaattaaggtagttaaaacctcgttatattgagttgacatcaatacacatatttaaagtgatagaatacagttatatctatcattaacttccaaaaatttatgtccagggccatcgtcgaacctatattggtgctatgccaggaaagatggtgcaatgccttaagaacgtgggaacagcaaatcctcttgttctgattgatgagattgacaaggtactacaagactggcttgataagtgttgggcagccttaatttcagtgatttcattttactctcttgggtgatggtttgctgtgctcataatgagcgggctatcatttgtggtagtttttatttttattttattgtctaatggcagttgggaagggggcatgccggtgatccagcaagtgctctgttggagcttcttgatccagagcaaaatgcaaattttctagaccattatcttgatgttcctattgatctatcaaaggttagtgatgttattccagtgctggggagaggtactctctatatgctagtcttgtacagtctatccagcagtagtagccattgttaacggcttttcacctaaagcttgaaaatgtttcatttcaggttctgtttgtttgcacagctaatgttgtggagatgatacctaatcctctcttggacagaatggaggtcatttccattgccggatatattacagatgagaagatgcatattgcgagagattatttggagaagagcacacgtgaatcatgtggcattaaacctgaacaggttcttatttatctgtgaatttcatgctttgtgtttttagttgtaccagtgtataatacaactaattgtaaatcaggttgaagtgacagaagcagctcttttagctcttatagaaaattactgccgagaatcaggtgttcgaaatctccagaaacagatagagaagatttaccgcaaggtgagtacgctcttgatagtgattgtgaagccctaatatattttcacaatattcaactacaaatttggaatttttctcgagatgttgatattgattgagttgttaattcatggaatggggaatgcattggttttgaatgctaattgaatataatgcattggttccactcttccactgaagcttaacttctttttatgtgttctgacagatagctctgaaacttgtcagacaaggagtatcaggagaaaatgaagtcactgaaactaatgacgcagaagtagaacaagtgaatgggttggttcagaatacagatgacagcaagaatcagtccgggttagaatcagtggagggcgacagtcatgaacaagttgaatcttctttggaacctgacacaaataaggtgagcctcaaagttgatcaactaataggctcagtacaaattagtttatgataatctaatactgctcaatcacaaaatttctacccttgttcccattctttttcactatgtagtaaattgcttggttacaataagaaagataaatatcacaattttcaccctttataaatttattttgattactatgtgctaagatagctttattacgtaaatttgagttcatgtatgggctcacatcttttcttttcttttcctacaggatgcaaaagagaccgaaaatgttaatgaaaaagaagcaacaatggaaattgagaaagtattggttgacaaagaaaacctatctgattttgttggcaaacctgttttccatgcagaaagaatttttgatcgaactccaattggagttgtgatgggtcttgcttggactgctatgggtggttccaccctatacatagagacaacccatgttgagcaaggagatgggaaaggagctctcattcttactggtcaactaggagatgttatgaaggaaagtgcccagattgcccacactgttgccagggcaatattgctcaaggaagaaccagataacacttactttgccaataccaagcttcatctccatgttcctgctggtgccaccccgaaggatgggccaagtgctggttgcaccatgattacatccatgctgtcccttgcattgaacaagcccgtcaagaaggatctagcaatgacaggagaggtcactctaacaggaaagattctcccaattggaggggtatgctaaacataatgcgatttcttcttaacatttttctaacgtctctcacgcatttggtttcgtatttcattaacttgccattttgcaactttcccataagtttttgaatttagattataggtgtttaaaaaaagtaaaaataatttgttgttacatatcgcttcacgctgtttcaagttttcaagctcaattgctgctggtatatctgtttgttattgattgttgtactgccttcaaacttattgtggttgcttctgttaaaacaaatcaggttaaagagaaaactatagcggcaaggaggggtgaagtaaagaccattattttccctgcagcgaacagaagggattacgatgaacttgcttccaatgtgaaagaaggccttaatgttcacttcgttgaagagtacagtcagatatttgatttagcttttggtgatgacgagcgcagcgaaaagtaaatccattatcggcgaaagaatgctctggaaatggacatttgaggcgaagattggtaaaccccggccttgaaacatacctatttttgaattttgattttaaattttaaacagaggtgtcgggacatagtagagctcatataggcggaattcgaaacacattatttagtctttttttctttctttcttgtaatatggagatattcaattctcccatttgtaaacaagtaataacatcattcacaccatttgtgggtcgtgagtgtagtttttgcatggttaagacatattcatgcatataaattacacaatggtcttaataattacacaaaaaagactactctctctctctctctctccacataacttggtttcatattaaatcccaactaagggttggttcttgccgatgttaaattaaacatcattgccattttgacccaggaaaagagtatatagatgttaaatccttttcattggaaattgacagtgggttggtagcataaaagtccttgaacgtcagaaaaattggatctttcttctctttggggtgtcactatgataatgaatgatcacaccacctaatcaagtccaccacatatattttctctcaacaatggagaattgcaattgaatcattttttcctttttggggtggcaaaagaaaacaaaatataccctcttcatcaaatctctgagtcgactctgatatgacataatgtcacacacacacaactcactttctcttttctttttcaattgccatgccttaacttcacgcgtgcatatgattgaagaacttaacaaatgattaaaaaccctttaaataatacataaatgattagcatatcttggaatttttcggatcacaaaatcacacccaagttggtgactaataactattttgttttgtactcctttttgttttgtgacacttcaagaaaagaagatctaatttggatgcatggaccccatcttaagattgtatgcatgaaccaaccttcaaagatgtcattaacaataataagaatggagagtgaaattctttcaagtttcatagaattgagtcacataaagtgatcaatcactatcacaagagcttgggctgctttcttgatataaaactaaattatcaaatacaattgggtcatgtcatgtgcgttttatagtcaaaagtggaaatcttagccatgaaataaatccaagtaaaataaataattaagtaaaagaattaaaaaggcaaattgagaactatatcatacaaggatgataaagatgatgatgataatgatgatgattttttttttgtgtgtgtgtgtgaatagagggcgcctaactaccattatccaaactttggattctgaaatttctgagcagccaaatacatcataaaggaagtctcacgtggccctttttcataatattttgatattctatttatttataattttatacacctcaactaaatctttaagtgatctaactatcccaaccaactaactcacaatactcagcttctttctttccataatagttagtaattaagtggtgtttggttggaggtaatgaaatgaaaaggaaataatttttatttcattcatttgtttggt

SEQ ID NO: 296519 - DNA, 2143 bp, Cannabis indica
aaaaccaaatgcattgactttgtaggtactaattaattgagatattattgtattttcatattttggcaaacatcacacattattgttaggtatacatatagcatatattttatccctaagtattacctacattgaaattaagttattttttccaagtgattatttttttttctagttcaaagttagactaattaaaatcaatcaatacaaacatttcttataaacataactaaaaaaaaaaaaaaaaaaaaaaatcaagcatttcttattttactaaattaataaaacaagttagaacactgagaaagcaaatacacttctttattttattgatgatttattattggataaattagtcaaatatatattaaataatataattaaatattcataataaaaaaaattatttccaatagttattactaacaatgacttcatatccaacttttttttttgttatattccttcctctgcatttattctaggttaagttacctcttaattaatataataatatatgtgcataattaactaatgattttatttagttattaagtaaaacctttagataaagttagcaggtgtccttgtgcctgtgttgggtctgtagcagtttatgcaattttaacagttttttaacaatttaactactttttcaaacttcttcctttccctcccgtgatactggcagttcctcccatcctccaccgccgtctcttcccttcctccccttcctcctctgtttgcaccagcagtttttgtcatgtcttcagacattgatcctctcctccactctatggattccactttgaaattaactgatgaagaacattcagtcttccttctccatgatgatgtgattccttccaccaataccatcccaacccctactctccttgctagagtcatcacccacaattatgtccataagcccacttttatcaaccaaatgtccgatcattggaggggtcgttttccggttactatcactgaatatagggatgagtattttaaggtcaccttcggctgtgaaggagatcaattccgggttatgaataaggagccatggcactttcaaaatcatcttgtggttttctgcacaccagatgctctgcaaaatgcctcagccaataccttcaattctacttgcttttgggttcaagtgtatcgactaccctttcttagcaaatccaaaactcttgccaaggctttggggaatatcattggtgaatatgtcgatgttcatgaggagtcccttgatgaaggatggggcccctttcttcgaattcgggttaagcttttggttaacaaaccgctccctagagggcggatgattagtttgtcccgtattaaagatgatttctggattgattttcgatatgagcgtctaccggaatttttctttgagtgtggagtcattggacacctttttgaaaaatgtgttgcttttatggaaaggatggacaatggtaatgatgatgatttggagtacggaccatggatgaagggtgctaggcttccaacaacgggttatgataagtatagaacagattttctaaagctgatgcctggcctttgttacccgacttgctcgcaaggctctagtgtcatctattcctaatttggtttcaagatctcagccccatccatctaccctctatcaaggtgaatcttctaatgctgcccctaatccaagaagtgttgtcaataataatgcttttgactccctgacagtgcttacttcccacacacgccctcctaaccattatcaatcccccccaattaaccacatcaatgtcactgctggtcacaccaattgctatccttccattcccaatactattaactccaaccgtgacaggcccccacttacatccccaatatcttactgcatctcacccaatcaacaacctccaccaaataacagtttcctttcaaaaaaccatgcccattccgactccacacaaccttccttaagtcagcccctctctcaaaatgttgatgttaaaggcaaacagaaaattcttgagaatcacccaacatcacttgcttcctgcccactcacttcctccaaatcaattacctcgacacctccattattcacagacctctcacatatttatgtgcctgacattcactcctc

SEQ ID NO: 296520 - DNA, 1639 bp, Cannabis indica
taccccccaaagctcattaaagaggggtcgagaattctgggtttcataagaactagaaaagtaaaaactcaccaagaacattctctgtattaaatactatcataaatatacagactcgtggactaaggctcattaacgccccaaccacgtaaaaatgtctctcttaatttcttacagttctctaaattattattattttattggttgccgaaaacctcggtcaacattaagtattgccttactaacttaacagccttgtttcttgtagccaccaactttaggatcttattcctaagcctataaatactaccaactcttataatttcatacatacgacgatcagagagagagagagagagagtttggattttgtaaaaagcatcttctgttgatgaagaagattcttggataagagtgtgaaagctgaaacactttgagagaactctttagagaatcgatctcaactgtattgtacctgttcttgttcaatcaataaagaggttttagtggttttccaaaattgaattagagccttaggtcacatcatgaaccagtatatatctcttggtgttgatttttattgttttactaccttaattgtattttggtttttcttactctgttcatctttatttttcctccaattattgtttgtgatttgttagttttgttattgctaattatttaattgtttaaagtctagtagtatgattctatacttttagttgtaatttttccacaataataattagagtttttgttcttagtgtctgctatgttttagaacttatcacatgtatgttgaaaaattagaataaatttctatatatatacttgaaatagaatataaattgttagagtaaatctgctattacaataacaataagtagaagaataataagaattgtgttgatgggaagaatatatgatttaaattagctttgttatttttataaataatttcaaaattacgtatatacttaaaagattctcttaaaaaaggtttggccctttgaaagttattttgttgttgtaggtggtgtcatttgtgtggtaagaatttttggagtgaaaatcgatgattcatttaagaaaggctaaggtataaaacccctataactgacatatgatctctagaatggtcaaaatgactaaaggagtaaaaaaaagatttacaccatgtaatctctttttctttagaaaaataaactaatatgcttggaatgttcaagttaataagttagttaaaggtccactagccacaagatatctaacataatctgaatagactgaatatgatattttaaatatgagtgagctactaagctcattaaaaaaaatgttacttaagtagttaagtggaactaacacattttagcaactggttacaaaatatactatatatgctctaaaaagtaaaaacaacaactagtaaccgataaccaaaaattatagcacagaaagttttgttagatcggccttaaccctgatgaaccacataaaggaaggttgggttgggttcaatcataacatattattacacaacaggtggatgagtctttttatccaaaaaaaaaaagagaaacgctaaagggcactagtggtgtctagtaccctcctatgtgtcaatattgttatt

SEQ ID NO: 296521 - DNA, 3232 bp, Cannabis indica
ataagggcccaaaaaaatttttttccctatggcccactttgtttcagggtcggccctgtggatgagacaacgtcgatccacatgcaaagctacattctttttgcgagtagtgagtaagatcttactatgtaatgtgtctccttgattagtaatagggaatgcattttttagaagatcccatgttgtagtagtccatatatcatcaagaaccaccaaacatttccacttcatttggaagtcatgaagctccttagctaattcatcatcacttaagcttttgatgtgatttctttgttcatttgtgggagatgtgaaaccaaataaaataccttcccatacatcgcgtctattacattgctgagatatcgaaacccaagcataacaatcaaaatgtctcttgattttacgatgttgatagacctttcttgcaagagtagttttgcccaaaccacccataccatagaccgaaatcaccttatgcttatgagatttctctttttcagtcaaaagggctaccaactctttgatgtcattgttgaagccaacaatatgattgtccacaacatgagaaggaactttcctcaactcattttccaacgaagaatggcttgaagaagcttgatgatcatgattgtttaacactgaagtctctagtactccaatctcttttaattcagttgtccaagtagcaatgttggatgagatcttgtttatctttgatccaactttatggacattaactgagtgagcaggccaatgaattaaccaattagaattattattattagccacttggaagaggtaagtttcaataacatcttccaagtcaagagatttttctctcatcagctcaaccaaaaggcctactctctcatttcgtccatctctggcccaagcatcggcttctttcaagaaagcgctcatacatcgaagcttgatttcggcattgttgacttgttcttcaactccatgcaagaatttagcttctgaaactactaaccctcccacacttttaattatagatgaaacaatagcttcagccatatcttatctttcactcaaataataagcaatggctttaaataggtaaaattgtatacatagctaaattcaacaatggctgcttcctagcttatacctcaattttattccttttcttgctttttgcaaaagcacctctgattaattatcttattataatgataatgcatcatatgtgctgtaaatacatagctttatataaagctcatcaaagcacagaagttaattaataattaacccatgctatagtggactactaattataattagagtattgctattgaacattaatgatgtctagcgctttctagaggtgtcgccttgcaattggctaacgatactctctaaaatttattacattaaattataaggaccccagacgttaaagggtattaaacaccactggtatcttttaacatttcggctatcttcaaatgttccaccaactacatatgttatcatataatattctttccattataattgcaacacaaaaaagtaaaattattctttattgttacactactttctgtacttagaaattaatatatagtgattctcaggaatgcttttggtttgttttctttcaatgaagtttccattaaaattaattctttattgttactgttatttattcgatcctaaataaaacttgttcacattaatgatatggtaagcaagtcaagttggatcatgccatatcatcaagacctttccaagggaagaaggggatctgtattcagggtgcttccaagggggttcatgttacactaagaaatagagtaggggcttattagtaatttgtaattagtgtgaaaccctataaatatgtaattgtataggtattcttgaatatggattaagaaaatagaactttggttcaattggaagattagcattgtctcgaaaagtccatttagaagatatgtaatgttaggtaacaggtcctcttcgacacaggacaaatctctgaaatacactctttgatgcagtgttaatctcccaattgaactaaagttctattttctcaatccatattcaataatagctacacaattacatatttatagactttcacaccaattgcaaattactaataagcccctacattgtttcatagtgtaacagttcaacttcggatcaaaactcaaacaaggtaagtgttacaccatcattgatctctaaaactatgtgcataatttcagataatattcttgctattgtcataatgaaagaggaatcctgagggagttcaaaggagactagactcttcacaaatcgaacctctataactttttgtgttctttaatttctgtcattttttattccaaattcaaactcgggtcatttgatttctggtttgttaattttgtttcatgctagctgaggttgttcattaatcccaacaatgacactacttttttcattataattctctagtctcttctccaccattagttgatcataaaggtagagaagagactcataatggcatcagctcctctacctttagtgatcttaaaccaagttggatgcaagactcataatggtctctggtatagctagaggactattgtacttagatgaggcttgcactagtctgatcatacattgtgttattgcacaacaatgccatatcgaatttcggtttggcaaagctgttaatggtagaacaaagcaaaactaatacaaacattagaggaacaaaaggctatgttgcaccgtagtggtttaggagtaaatcaaggtattactagagatcatcagtatagatattgttgggattaaactcacttaacctctcaagtcagtatgtccatttatttgctcatcagatgaatctgaagaaagcttctgcaatttataacaattggttttaataccaacttaaaggggacctaccagcaactatatataggggttatttgaggaggtctgagtggagagttctgatctctaatctccaatgctcatactttagattcagttgagagagagagagtccaagatcatagtgagtgtgtgtggagggatgtaaaaggggagtatcactcttgaagtgatttccctcaatgtgaggcatttctttgtaattacttactgtgttgagttgtaatcttgagctcaatatattgtgtactgctgactattcctatttaataaagattcatcattcatccattattgagtt

SEQ ID NO: 296522 - DNA, 2425 bp, Cannabis indica
tccttggagaagccctaagaactatatatagtgctagatattattatggtgaaaaatcaatcaaattacacgatccaatatattgacaaaaaattcaaaccatgaaaaatcataatcgtgtttaatttttttatgtacttgttggttgttgctatttgtcctagtccctttaaaaaaaaaatgcacaattttttatttctttctaaaatctaactagaagatattgtgcccaagtagaaattagaaacgaaaattgattgtttagagtctccaatagtgatcatctatggtgttggagatgctcgtccaatttgattacctacatacttagatattaaaaatatgtaaaacaaaagacattaacataataataaaacattctctcaaataagtttgatttatttattatagtagttctcctacccttaatggagatacaattatttgcaacatcaaaggttgcctcttttatttttattaattaatttggatcaaaatcataagtatgattaatccttgagcaaacacatttcatatctaagctggttctttccctttccatccactgaattattgttgacatttttcttccggtttcgtttattggtttttccacctaaaaataacaaacaaaacaaaatctcaataattagaaagcaagaaaattatttttgtctaaacttccctaaaccaaagtgatttaagaattttaatagtataataaatttgtggtcagaaaataatagtgcagatgataatgtcaaaacagaaatagaacatgatcaaacaaaaaaaaaaatagtgagttactccacatatgatgattgagttgagtacattgattgtggacatatataattcaatcaaaataactaattaatttttctcaaaaaaaataattaattagtaatttgtaaagagttttaaatgatggtttacctggtggtggtggtggtgagttgttgtaagtaggtggatgagcaacagcagcatgagagaaaggaaaatacaccccagtcccaaaatattgtattatatcaaaattattagacatcattccaggatggctgggccactgcaaagaattatttataagagaattcacgtcccacacacacttaaatatataaattgcatatatattttcacaaataactaaggagttttgattttacctggattggaaaaagttgttgctgcagcattgggcttccattgttgtgaaaattgggattttggaagtatgggaaaggagcaaaaaaaacccaagactgaatgtaacagactgaagcaactggttggggaggctggaagtgttggaaaggagcaacccatttgcgaggagcaattgttttgggtggctgaaatggttggaagggagcaaccgatttgcgaggagcaacggttttggggtgttccaaaggagcagccccagaacttgttgctcctgctgttgctggagtcttagactcaccatccaaaccattacaatttttctataaccaaacaataaccgcaacaaatttaataataaatatttttacgaaattagctctttatgcataaaatattgtttttatagctagattagatatataacaaatctacctacttatcatttttccttaaaaaaaataaaaaatcaacctataaagaattatataaaacaccaatttttataagaagagaaagttatatttttacgattaaaattttttatatatatatttttgcgatattctataaaaaatacaagaaaataacaaaaaaattacataaaaataataagaaaacaacataaaaaaaatatacaaatgataaacaatcaacaacaaaataacaagattacaacataaaaagattgtattttatgtaaataaaatctaaacaaccgtaaaaaaaatgttaaaaattccatacagaccatatttttgtattttttttttgtgtcttttgaaatcatttttttaggaacttttacaattatcttttgcaaatatactatgattaaaaaaaagctcaatgttgtaatatataaacgcttaaatcaaaaaaaaaaaaagctcaataccacaccgatctaatgcgttataagtgattagtagttttctatatcatttattaaattaaaatgaatgagactcgatattaaattgtatcaataacgatatgtcactaatatagtatttgacaccttaagatgcccatttttatattaaaaaaaaatactagatatgcctcctgttttcataaatattaagtggagaaatttatttgtacccaaaaaatttataaaaaatttacacttagtagctaccaagctataaccccataatagaattttggtaattggataaatgttatgtttggtgagatttaaaaaaaataaaaacttataaaaatattaatttttattttatataaa

SEQ ID NO: 296523 - DNA, 2193 bp, Cannabis indica
ttttttaaaaaaaaaactttcattgatggacagttggaaagaaaaaacaaagccaacttatttattcctaattcgaccaaaaagaaaaaaaagtaaaccgttagaatcttgaacgttaagcctaccgttctctctctgtactataacacttatcacacttttgctctcctggaacgaatcctatttctccatacttcgtctccttcctttctatataaatatccaccttctctaatcttcttccacattcacacctcttctctctatcagactatctctctctttctattctcgctttgatcaaattaagagcctttagcagatcccaaaaacacagaggagaataataaatatatttttagaaatgggaatggtagtggtgatttctcttcctttgattttcttctgcttactcttaggtttcggttgctacttcttcggacgatacagaggaagacaagacgtacggaccaaccctcagatctatggcatccccaccccgccgcctggtgccgccgccactaattcttacccttctccgtctcctccgcctcattacaaagagggcttcgcatccaacgtttgacactatatatacatacgcacatatatatatatataatgtattgtgagttattgagattggggaattggagaatgtgtattcttttattgatggtgttttagcctaattgggacctctttaacaagtgagttttttttcttcttctttatatattttgtttatttgatgtaagtttatgtatcagatttggagaaagaagattttctttattatattagtttgtttgttgtttcttaatgatttttcttaacttcaaattttatttaagactcactaatatgtaaaactaaggtggtgtctggttgtgtggagtgattgtcaattggttaattagctaacttgttcacgattctccagattaaatcctaaaaatttaactttgttgcatacaacttaccagaatgggctctaagtttcagtgcttcagttgggaactcaattcccaatcagttctattgtaataactaataaattatgaaattaataaataagattgagtgtgtgagtaaatatgatacaaaaaattggtgaaaacactgctttgctaggagatttattcacaagtctcaaaatagtaattatgagataaatattattaattaatattcattaattcattattaaaaaattaaagtaattaaaataaaactaagtaggttaaacaatattctttaattataaataataattaaaactaataattatttaattttatgttaactatttaattaattattagtactttttacaataaaactaattagttaaaataataatatttaattattaaataataattgtatgagagtcaaatattatcttatttagaagataattatgtaaatctattatataataaaataaagctatcttttttagagaaactaaattaattttaaattaactcatatttttttgagataaatattattattattattattattattattattattattattattataaataaattatcaaacttcattaaaatgaaatattagcataaagaataaatttaacaaaattatgtgcgtcttgttaacaagagacctagcaaaactcagtaggaacttgacttctactaaaaattcaatttggaaaaggacaaaagatctagcaaaattatgagccgtcttgttagcaacaataaataaaataaaccgagaaaaataccctttatgatcaatcactaaaagagaaaacattgtaaaattactataaatagcctggacaataacaagactatcagactctagcaccacttaactccaactccacatcctgatctaactaagagtctcccgaatgccaataacttcaataaccattggagtaacaataccttcataacaataggaatgagtttccacaagttgatactcatgatttctcaccaactacctgaacctaaatcgtccccgagcttcaaatattgtagcatcgaaattcatcttgacttgaattaattgtgcgtttactcaaatatcacaaactattagccattaaatcattcagcattggtgtgatattactactagtttgggcttttctttattgttgaagatataacaagggattactttacaaatacacaaaaataa

SEQ ID NO: 296524 - DNA, 1934 bp, Cannabis indica
tgtgatagaaaggatacaagggttagagatctgaagggaaggagacatattattctgctgcaaccaatgtgaggttttgtttagctttatatgtgtttattatcattttagaaagttcatatttaggatgttaaataacatacttatgagtagatctaagatcctggtaaaaataattccatcagatagtagggctagtaaccaattaacttcatatcttggaaagattcaaaataaacctgaatatggtggtaagaaacaaatacaattgaagatggtagtaagattcccattattcatgtcagaccaggctttataaaatctaatgcaaacaatccattgcttctacataatatgcttcatgttccatccatttcaaaaaaaaattaataagtatttcaaaactgacttcagacaataatatctcaatcgaatttttctctaattcttatattgtgaaggaacaaacaacatagagatttgttttgcaaggagaaattacagatggcctttatcaagtataaatacccagtgcatctcagtcctcaaagtctcaccctcaattttctatctttgtgtcaagtacatctactaccaatcatgcttctctatcttcctcaaaagacatttggcatagaaaataaggacatccttccaatattaacataaatcaagtcttgacaatgtcaaattaaaaacttccagttaatgaaaaacaacatttttgtgatgcatgtcagtatggaaaatctcatgctcttcctttctccaattcaacctctcgagctaaacgttttttggaactcttccacacaaatttgtggggaccagcccccatcccttcatacatcagtttcaaatagtatattcattttttggatgattttggtcagtacacttggctatatccactcaaaataaatctgatgcacattttaaaaacagggcaaaaaatcaatttaagaaaattaagaggttaagaacaatttaaggagctgagtttcaagcattttctaacttagttcttaacatcgatatactttttgatcactcgtgtccacatacctcagaacaaaatggtcaagctgaaagaaaacatcgatatattgttgaaatagggctcacattattggcacaggttgcaatgcctttaagatattggtatgatgcttttagtacattagtgaatcaatagattaacaactgctgtactgcaaaaccagtctccatatacgtctctttattcaaaaaaacctaattacaggttccttaaaacgtttgttatagcatgcttcccttgtcttaggtcttatcaatcttataagttttaatttcactcaatcaaatgtgtgaatttgggatatagtgagcattataaagggtataagtttctatgtccccatggaagaatatacatcttgagacatgtggtttttaatgagcaaaacaataaaagctggatttcttaataattatgccactggacaacatgtttttatccccatgcctcattcctgaatgcaactacctttctcctcaagtattcttaatctgcagcagaaccacaatcctaggcatctccttccacaaatcatggttttttgcaaagcctgaaattggctctcaaatgtctattgctcctcacaatttgtccattgcaggtagccctatctcacaagaaaattcaaggacccatgctttagcaggttcaaattctacttcagagtctcatgcttccattgcagactctcttggttccccccctccggctcctcctcacaatcctgctaatgctactcaccctacgatcacttgaataaggctggtatttccaagcctcgagcatttcttggtgatcaagcttaatttttcttggtcaccgtgaaccccattgtaaagcccgcttagttaatttggaaattagcagttgttta

SEQ ID NO: 296525 - DNA, 6743 bp, Cannabis indica
atttcgactctggctccgcccctgcttataaccaaagctaatggagtagttgctatataaaaattgttgctttgtcgtgatttgataaattttctttttaactttcactatttacctccagtacaaacttctttgcatggcggactagtggctctactaattcttcaaatagatattattaattcacttcacttaaagaatatcatgtcaaatcggccttaatcttatagtaaataaattttcgccgtattaaattatctaatatagctacactaagttctattggtgccgattttgtccaaaagtttatttttccttactaccatttctctgtatgagatgttgtgaatacaacagtgacagtttgtcaagcgaggtgtagtgttgctgtgttggtgggcgaaaggaagagacagtctgaagaactatggatagggtcgggggaagctcaacggagccggctttatcggtctccattaacttggggaatacggagccggagcctacgggggttaataaagtggtcaatacggagagcgagattgaggctttgagacagaagttcctggaggattcttcactggaacttgagacggatgaagctctgacggaggaagtggttcagaaaggggttttggctaaatgttttggtaggaatccgatgcagaagagcaaagtttggcagatactctcgggggtttggagactaaggagtaagtggtggattaaaaccctcgaagagggactgtggggaattttctttgatagtaaggaagacttggaggaggtgctgaatggtcgaccatggttgttgggaggacaaatcctaaacctaatagaatggcctgaggatgggggctggcaaaaagtgcagatggatattgcgagggtgtgggttcaagtgcatggactgcctaccccgtacttggcttggcaaaatgctccggtggttggtgcaaaaatagggaagtatgttaagttcgataaggcggagccgagagttatcgcaaggaggggattcctcaagttgatggtggagataccgttattgcaacgtatcccagcaggcttttttctgagcattaccagagacaggaaggaatggatccaattcaagtattgtaagttgcctgcaatttgctttaactatgggtatttgtttcacgacgtgaaagattgaacgcggcccaaaatgtttgtgtatcctccggtggggtgtgcagttcctttgtatgggtcctggcttaaagcaaatttgcctatacgaaattgttttgataccagacccccggcgatggcgataaggagggatgcaggacctaaaatggtgatggagaggctacaaaagatgaacttggggtcgttggagaacgaagagcagtcggaggaggcggcgaagttgattgacaacagaggatccaaggacagtacgaccagtacgagtagtggaggtgcggatcgtggtagtgggagtgtgcaacgtcctggtgacaggaggatgattggtacgatagggacaggtggcttgcctaatagtgatccacgtagtggggaccatccaatagccaaaattggaaggaatcctaaggataaggatgttatcctatctctgatgcccaatgtgggccttttgcggcccaaatgattgaattaccacatcataaagtctgtaagtctaggactccgcatgtgtatccagagcccattagtgtggaatgggctgaaggcacctcactagaggaagtcaccagggatgtgttagtccaatcggatgtggtggaggcccagatcagtatatctttggaaaatgaaggattagaggcccaggtgtgtacgggatcgaattttaagaaaaggaaggctgcttattgtgtaattcctgtggatcaaaaagggaggccgttaaatgagtgtgggaagaaggatgatgagtgcggccaaacaccgatccgtgaggggggagttttctctgtggggaagactgataatgttgggagaggatctgggaagagtagaagtaataagaagaactcaagagggaagaagaagaatgttgaagcagaaggccagaagaaggattgtgagaaaaatgggcatgaaaagaatacttctaatggtcttcaaggagaaatgtttgtggcaattcaaatctaaaaggatttttcgatgggtgaggaggcgacccttatcaagcccccccgccccaatgattgtcctatcgtggaattgtcgaggtcttgcgagacctgcagctatccaagccttaaaggtttggaggagaaggtacaaggtggattgcttattcttgatagaaactaaagtgggtagggatcagatggataaggtgagatttgagttgggttttgagtttggcgtttttattccggccttgggattggcgggtggcttttgtttgttgtggaataaagaggctaatttgaaggttgctcgagttagagaaacatcctttgagtgttgggttagtgacccttctggggggaaggactggactttattcgcaatatatggaactccgtataaggaacagaaagatgacttttgggaggaagttgctagttatgtaaagagatgtcaatcgccttgggcggttgtgggggatttgaatgttattctggagaaggatgataaatatggagggaggatggtttcgtacagggactgtgaaattctttcttcctttcttgaagagacgggagggatcgatttggggtttcatgggtgtaaatttacgtggaggaataaaagggataatgggaagttgataagagaaagaattgatagagttttggtggataccgattggttgaccctttatccgaaagcgggagttcgtaatttgcccattgtggcctcagatcctggccccattcttttcgactcgttgatgtgtaagaggagagggtctggaatttttagattttatgaagcgtagtttcgggaggagtcttgtttggatgttatcaaagaggcttggtttatgggaggtgatcaagctagattggtgggaagcctcaagaaaactaagaatgctctacagatttggagcaaacacgtgtttggcgatactcagaagaatcttcaaaagttggaggaaagacttagtctgctgcaatctcataagaactaggaagagattgctgtggaagaggctcaaattcatttaaggcttaaggaggaatgggcgagaaacgagctatgttggaagcaaagatcgagggaattaaggttggcgcaaggagatagaaatagcaaattcttccacgcctcaactacggttcgaagaaagagaaaccatatttgggccttgcaggatgttgacggcaattggaaggaaagggagaaggaaaaaggggctatactgaatagatttttcttggatctatttagtacttctaactcgtgcccgccggtggatttagagggactgattaatccttctatctctgctgagaacaatgcaaggctgtgcgctatcccttcagccgaggagatatacgagcaagtgtttcagatgtacccgctaaaggccccggacccggacgggatgtttagggtgttctttccaaaatgttgggacacagttggaatgacagttatccaattagtgcaagagttttttgtgagtaaatccctcgatcctgaactaaatttcaattttatttgtttgattcctaaaactccgaatgcttcgaaggttgaggcctttcggcccataagcttgtgtaattttgtctataaggtgatttctcggattttggctcagcggttgaaagttttgctggattcaattgtttcaccgttacagtctgccttcattccatgcagaggaattaccgatgcctccattctagctcaagagattatgagtacgattaaaaagaatagaagcaaagggggtctaatggcggtcaagattgatatgcacaaggcgtatgatagggtcgagtggaagtttttggagatggtgcttcgggctcatggtttctcggaacattttattgagccagtgatggtttgtgtttccagttcttcctatgcgatcctgctgaatgggaaagctcttaaaaggtgtagtccctcgcgcgggttacgtcaaggggaccctatatccccgtttctgtttattctgtgcaacgatattttggctagattgattcaaagagcttaggatgcagtgcaaattaatggcattcggattgcgagaggtgtgtctcctatatcgcaccttatgttcgcggatgatacagtgatttttgcgcgagcaagtgtaagggcggcgatttgtttgggcaaatgtttggccaaatatgaagaatggtctgggcaggcgtgtaataaaaataaatcggggatacatttttcgaaaggatgtgctaggggaggagaagggaaattgaacaggccttttcaattaatgaaaaaggaaatttgggcaattatcttggcaacctctttgtttttgccagaagtaaatcacatgaattccaatttttggtggaaaagttaaaagggagacttgaaggatggaaaatgagaacgctctcatatgcggggcggatgacggcgatcagttcggttgctatgtctatgcctatttatactatgtctaccttctctatcccaaccaatgttagtaagaggatggatgctctggttaggaagttttggtggacaggtggggtggagaaagccattttcttgcaaacaaatgttgggatgctctgtgccagccaaaacagagtgggggattgggctttaggcggtttggagatatgaataaggcgttagtggcaaagttggcttgggaagtggcgtgcaatgagaataaattgtgggtgaaggccttaagagagaagtactgctcttggctttccttttggagtgtgcagctgagagagtcggattcaactatttggaaagatattcttgtggcgagacaagttattagagaaggagcttgcatgattttggctaacgatcaagaggtggatatctagtaccaaccgtggattccgtggatggactatgatgagtttaggaatgttatggaaggtgtccgtgttcgggcaccaaatctcaggacggtagcagatctaattcagggctcatctttggaatggcgtaaagaatatgttctgtacctgtttggtcgagaggagggagagagaatcctttctgtctctctgtctaatcgcctggggagggatactttaatttggaaggaggctcgggatgggaagtttagtgtgaaaggggcttattggtttgagcagggtttaataacaaccatgaggtatggagactgatatgggatgggaagatgcattcgaggcagagtcttttgttgtggagactgtgtgcgggtgtcatgccgactaaagataaatatgcaggtgggagtagtcaggagtgtgttctgtatggctatacttctgagtcggctgaccacttatttatgcagtgtcctctgtcaagagcgttatggcttggcgcccctttgccagtgaagtcggacgaggtctctggggatagtatgcttattaaggtgttatcttaagtgaagggactgtccaagaaccaatgttttcaggccctggtaagctttgcggcagtgtgcgatatagtgtggaatcataggaatgcagtcattcatggggtgaagtgtgtggatatacccggtctgctaagggaagtgtggaggaaatttgttgattatggaggggacagggtaggagaggtgttagatccctgtggaaagtttttggccagggcctgggtgccgcatcaatacaacaaactgcttttggttgatggggcgtataaagaaagttggtgcgggatggcttgtgtaatgattgacaaaatggatttgttctgggaatatgggtacttcagtaaggaagggttttcaagcctagagacagagataagagctattggaatggtggttaatgtagttgctcagaagaattgggtgggtgccgtgattatctcggattgccaagtagctgtcaatgcctttgctaaaaggaggtgtccggattggaagttaatgaatttatttctttatactctggagcagatgtcaaagtgtaaggattgtaatttggtgtttgttaagagagataatttaacctttgttaatagcttgattgtccaagctaggactgaaaggatatataagaccttttgtaatggggaaggattgcctcctgtcaatcctagttttctggtttaatcattgaactgaggttctctttcaaaaaattatctaatatttgagtttctttatttttttcaattttttttggtacagtatatatacttcaacaataattaataattttgcaacaatgtcttcaagaaaaaacaaattttgttaaaacatgtctttttcgtagtgttaattaacttataaaatgttttttctatcaactttatactttcatatattattatttgaaaatgaatgtgtataaattagtcagagaaatgttgacaaattgcagtacgtatacgtttgacaagtaatggactcttgtagtatttattttgacttttatatttcaactaatcaaatatatatgtatatagagattatctatagtaggggatacaatttttaccctatgctatggggaaagaaatttggccaatgaaaaattaagaacaagggattgtacaaaaaatttatttgagcatctgtaggggattatttcata

SEQ ID NO: 296526 - DNA, 7653 bp, Cannabis indica
gagaaaaaataaaaataaaaattgataacttccatacacatctaaagaccatactacatatttggtcatttcttaagatttttttttctcacaacattaattcatcaataaatctccaatttaggtaaattttcttccaatattggataataaaactcaaaaagagtaaaagaaaagaaaaaataaataaaaaaattgtattacaacaactcattgattagtttacatcatttcaccaatcagtaaacttacaaaaaacaagagttggctcggtagcatcggccgccggccgcagcatcagcttcggtttcggtttttatggttagttggtattatagctgctgccttcccaaactccattatcattacatttagttacccgaaccgaaacacgctctttttcgatgatggtatgtatgaatcattacacgaaatgaaaaaccgaaacccccccggctaaacaagcttctacaacagttttggaaaccatactcgaacaattcgaatgtaccttaaggctgaagttacttggaaagctgagtgtgaatcgaatatgggatcgttggtatcgggaaaaaaaatgttgtaagaagaaaaatctgaagcttttgcttgttttcgacggttttggatctccacatagccattgccctatgtacagtgcatatgtttggacaatatgagatgaaaaaaaagggaatctgaagggcttttagggaacagggggagcatttttcgggtatctagcagagggtacacgttgtaagcctcgtgggaaatcttgtgtcgtcttcaaacgcttattcgggaatccttgcagtaaccttattattatcaaaacaaaacaccaaaataagttttgtgggcaatcagttaggctaagattaagtgcaagagatgataaaagtcaaacctaggtgaatcttggcgtttcgggccaccgtgcattgatcttatagttccgagtgctctttcagcagcctaaggggaaaagaaaatatgaagtttggaagtcaatagtgatacttgaggcgacaagaaacttaaaggagtttttacacaacatacctgcaactttgcatcatcccatgtcatcccgattcctttcccggcaacttggccgtctatttctacctaaatataacaacaaattgagctaattatgacatattccatacatgacaagaaatccatttgaacattatcgaaattcacaaaccgaatgatgcttctcgatacatacctgtgcatggacttcatcttttcggatcaaaccactagcaggtaaaggcagaggatgaaaagataaactaagaccctccatcatacactgaagaagttaaatccaacatattaagtttacgaaagaaaaaaaaacccgaaaaaggacaatttagatcttacatattctttaagtgcagatactgaattcgtagatttcttagtgcccataaacctaggtggttctgatacatttgaaaatgacaaagattcgtctttggccaacgaaaagctcccggatgaattcacattactgacgaaaccattctcactagtttcaggaagcggagaatcaggcttaattcttgacatgtacacatctgcagaaatcgccccagctcaaatcaatttaagcgctttgctaagtcaaagcattcctaacatcatgttgagaaatcattcttaccagccaagttcttaagagaagactcggcagcaaaaagctgagcttctcgtcttgttctaccagttccgccaccaattttttctccggcaaaccaaacctgtaacaagaatgaacttataacttaataatgcatttatcggtgagaaatgtgaaaaaaaaagccatatcagaaagaattcagaaatttctgagaaagaaaaatgtagctaagttagagttcagactcccatttttacttaaaccagcaagtgggtttgtaatctgcagaaaatgttaatttgggcagaccgagtctaactaacaaaacgacatgtcgactcttatcatcaggtttcggctattttagatgactatgaactatttcaaaacatagcaatagtgcatatagatcagattaaaagcccaatagacctgcacattaggccaaaaaaaatgcataaggttcgcgtgtagaaagtttaaagaaagctacctcgatagaaaactgcaaatccgtggatgaaaccaaagatggtctaaactccacctatatggcagaaagaacaagtaatgaaaaattagatgtgataatggggtaatgtatacttgtgctctgtgcgaaatttcgtaagaaacactcccacaataccttggctccacatttcattccaatttcttgtagaacactaattggagaatctgcatttgagactggtggcccagaatcaaagtcagcttctctaatgcttgaagacgatcgactcaaggaaatatcctctcctgcaatcatgcaggtacaaaatcaatcataacacagcgaaatagctaggaaccaacccaacaaattcgagcttttacaccatcaaacaacctcaaatcaaaaattaataaaaaccaaatgaacatattgttcgtaaatgctaaaacataaaaaatccagttattcatatcatcactcaccaggcacaacattataaggaggcaaggaatggtttgttctcatctgatcctctctatgtaaggtctgcaaaagtaaagtatcaaacaacaatgagtttcatcagtcaacaaaaaacccgaaaaactcagcaaactacgtgccaaatacctcttttggtaatctttgattttcgtgaagaatcctatcagaaggcattgaactctcaaccttggggaaaaaagatgcatgatgaggccgctgctgcttctctatatgcattggatctacatctaaaggaaattctttgggtgttacccggtttatctgtcgtggagggctcatctcttcctctaccggaaaccaacctccacgagatggtggcctcggaacagagacttgcatagcaggtctaacaggaaactgaggttcaggtggcggttgctctctattatcttgcccgtgttgcagaatgagaagccttctcctcgtatcgggatccaactctgattctggtacctcaccttcttctcttgcgggagagctttgtaagcttgattccaatgagccagcatatgatttaattatcggggctacctggggttggggatactgtacactggggaaaggtgtcattgaaacttgagatgttggtagtgaaacacttccggtagatggtaaggtatattgaagtgcagtagcaagtctagaatcagggttaatggctgacgaaacagccgataatgcttcctaaaaacaagaaacgactagattagagtgttgaactgtcggactttttatttcagaatctcaaaaattcatatattaatgtaaaaccatacaaaaacgcatatatttagatcttaagaacaaccttcaatctcctttcaacctcagcatctgccatgccatcaaaaacaggtagatccctatttccatttgcagcagcagcagcagccgaaccagaagcagaaccatcatcctgaacgatacaaataattaatctccacccaatacacaatatgaaaatcaaatgtataaattcccggactaacctcagaaactagataactgctcacatcgggaggactgggaacatctttaatatcatcttcatatgaaacttcaacaatcttttgtagaagacagtcatcaaattctctgttggcaaaatccaaggttataaacatattgaccaatatttaattctcatcttgataagcattgtatcttacttgaaaaaaccacctctgacattacaagcaacatttctagcaacacacaagacaggaacagtattgttcacctgcaaacattaaatccataataatttgtcatttaagcaatatggatacccaacaaatgagggtgcatgaataattcaaatagtgagaataatacttcagcttgaggagcatagtatggagcaaaagcaggcacaacatgcaccctaggttgatctttctcatcccacacttttaaccgatcatcgatcaccaatgacatttttggatggcagagaccattttgaaagacattaaataatgatttcctcaaacctttaaatatgatcaatgttagagaaaccataagacagcaatacgaggcgcaaggatttgcaaaaatgaagtgtaaacagaatcgaaatgaaataattccacttaccagatttaacacacacgatacgatccagtaattcttttgagtttatcaaattagactctggatcaagaagcctccacatttctaaagcataatccctttcagccatcgtacaaacatagacctcaaagcgcttacgccctcttgcagtcaaataatttctaagatcctcccacgcaggtctcaacctcacaagaacactggtatcacgaatctacagtggtaagaaagttccatgttggtcaaaagaactcacactatcaaatatattatcttgtaacaaaattccgaagagttataagttgttaaaagcatacagaaaacccgatgtaatacatgtcaatatcaaataagcaactcgtcaattttataactgcttcaaaattaatgtctacaaacctgcggattaatgcgtgtcagaatgatgtttttctcatttaacctaatgagcgggcggacaatagtttgatgattcccagaaacaggaggaacaacctcagattggactttgataacccttccattgtcaacaacctgatcattttcagcatattgcttcaatatagccttgtcatcctgatagcgtctgacttctgcaaccataccagaaaggcgttgcgggtctaactcactgcttatttttcgttgcagagactcaattctatcctcaaacgagcgcattgtgtttgcaactatgagagtttcatcgagatcaaatacaataccaagacatctaaggttcagcatgttaagacaagagttgtaaagtcctaatgcaacgttgaaaccccaaaaacacgggtattgtttatcatttttcctggaatacattgctaccaaatgaagttcctcccctgctaggggcatcactgcagtctgtacacataaaaaatgagaatgatcaactagatttccatgcagccttgccatataaatccttaccagatttcccagaattactaagaatcatttttaacactaatcaagtcagtcattattagtttaagtggtaatggcaagtattctatttcttcagaaatctttacaaagaacaaaaaccaaattgtacaaaattccaataaactcttaagtgtcaaagtttcagttcaggtaacaaagttcagtcatatcaagctcaatctcattaccataataataataacaaaaaacccaataaaatacttattattcaaaaaaatcttgccattcattttcagacattctcatgtataaatctcaaactgggtcccctgcaaatactgtccaaagtcagaactagttcattatttgaaactggatttcattgctttcggattcttcttaattcttcttcatcatcatcatcttcatttcttcttattattattattatcattattattattattatttattattattagaatgaattgttctttgtggtttattattatataccttgttctccatgacacaggaagagtgcaaaagaaagagcggcgaatcctgtgattgcgaggtctttgactccattttgaagcaaacaccacaagaagtaatggtatgaagcactgcaagtggtggacatctctcactcggttgagaaaaatggtttattctgatatccttcaattcatcgataatcttcttcttcttctcgttgttgttgtaattctcttcatctgggtatatctcaacttcaccaactaactcaatccctttatacaccaaagacttaaacattattttcttcttcaagttctcaaaaatctcatcaagttgttcaactcagttcaaggaaaaagggggaaaatttcataactttataaagtttcgtccaattctttttttgtgcttttaaatcactgatcaatcaaaaacccaacaaaaaaaacgaaaaaagagaaaagctttaggtttaggtttaggtttttcttcttctgctacaaacttttagatcccaaattgatgattgaaatctcaaaatcaaaaaatcaaaaatcaaaatctctcgtaataaacaaattgggtattggattttgctgttcctagtatctattacgtgatttttgatactactagggtttgattttgatgatgatgatgatcgaatcgtcaaagaagagaaaccctagatccagatagcgaaaggtcaaaaataacactgccccaaaaatataaagaaattaatttaattaaataaataaaaagagtttctttttcttatatatataaataaaatataagctgtagtgccaaaaccgtaattttggaaaagtttgagggacaaaatggacatttcgttacttcaaccaacgagcatcgagattctacttggtttacgtgacgtggcacgttgtttttcaaaattaaggttttatttaattaatttaaaaaagataatgaaagtgcgagaagtttacacgtgttgggatttgattgggtgaccatatctatggttgtggtttttttactaactctttaataaatattcttgtgtattactttgctttagtgtgacttttactatgtttttcattatttactagaaaaagtaacattttttactttgattatgtaatatttttcaattatttattttttcataattgtaaatattttttaaatttatatatttaaagtagagttttaactatagccttttagttaatttttatatttgaatcacatgttgtaatattttttttttaaaatttttttattgaagtattcgttatagttaaatttttaaaaatttctaaatagtttacagtataaaaaataaagtttttgatattctaattcaccacacgtacttaaaaaacttcaaatatatatttcggcactagaaactattcaaaaatctacaggagtgatgttgtaactataacgaatatcatcatgaataaaatttcgaaaagaaaaaaaaaagtattctgacatgtatttttgggcataaagtttgactaagaggttgtaataggaagttgacggtagcacttctcatatttaaaatttattaattatttatgcacatgtcattacttttatgtctataatgtggttaatttggcttaatcgagaacctaaatggtataattaagatctcctccataccgataaacattgtttttgtttggaatgctttatttaaaaagtatatattttatcttttcattttaagaacttgaaatatttttcttaatttgggatgtaggatgaagtgtatactgagaggatggagtagggatgtaaacggggcggggaattggcagggagtactctccctgtccccatccccgttaaggattttagtccttatccccgcttattcttcattggggatgggacggggaatcccctaatgggggcggggacggggcagggaatcccctaatagaaaaataaa

SEQ ID NO: 296527 - DNA, 4359 bp, Cannabis indica
gggattacaactaaaatagccaaagctctgtcaatattgttgtaagtcttctcctttttcaagagaaactaaggacacaaagttagggtttcctacaaaacattgtaaacacatcaaatacgcccttagaagctaatagactgactcgcggactaaggttaattaatacctgaaccacgtaaaaatctccatctctttattttttgcattttattatttctttagttctcaaatatttagtttctaaaaatttcagtaaacacatataaatacgaatatctaagtttagttttttacagtaataatactttagcaattgtaatcactctcaagacctcgatcaagtaaacacaaaactaatcaaaacttaaattaattgctaaaacaatttgtaatcaaattgtgatgaaaacaattggaattcaaaactaaaacataacgaaatttcaagaagaaaaataccatcaaagagacctttattgatgaatgcgatcaatacaatagaggattgatactcttaaattacatagaaagctcacaacgagagatcaacatcaaactcacttaatccgtgttacaaccagttacactaagaattatatatatctctctctctctctctctcactcacttatttcctaatctcaatcataaaaatgaattaaattatacaaggtctattatacgatgggaacaattagaaatacaaactaactaacctgataagtaaaactattattgacacatcagcatggcaaactgaaattgttgaactaacactacagatccaccttagtttagttattattcccatatttcgagtagcattatagtcacgacacgtgtaaaaagtctggaagacaaaccaactcgaaaattgaataacttaccttggagaatactgattgtagacacattgaagtatctttttaatcaattaaggacgagtcctaaataacaattactatttggcaaaaccaatgagatgaaaaactaatagaaaaaaaattccatcttggggagcacagagtgaataataaacaaaataaggatagaatatgtaggggcaagtcattggaaagggtagatgacgagttgtttaagagcttgtaactcattgacccacatactcgtgagtatgtttaatgactaagggatatgagcaaaaggcaattcatctcaaaataatcaatatggcgtgagtggataacatctcgcaagacacgcctagacatttcaaatataactaaagaatgcaaggtgtattttggataagatatttcgataaagaaattatctttaagataaatagaaaaagtggttgtaattttttaaccccaaaaattagcgctgctaattttttaggttagttaactaattttggagcgattaatggaagtgcattcacggagcttacctactcgacatgtatttcataaaactatcatcgatactcgcagtgcctgggatgcacccatgtggttcaatgactgatctcgtggtgattcaacaatgaaaggaagtgcgtaagaaggagaagtcgtgcatacatgtatgagtgtgtgcattcgggtgtatgcatgcaggtgtgtgcttgcatgagtatgtgcggttataagggtgtgagacagagggctcgcatgcgagcatgtacgtgagtgtgtgcggctgcaatggtgcgagccgtggtggtgagtgaggtgtgtgtgcaagtgtgtatgtgtggttagtcttggggcctcgcatgcgagccttgatggtgagtcgtctaagcgtgcatgtgctgtgagccttgggggctcgcatgcaagccatggtgttgagtgcatgcgtgtgtgcgagtgtgtgtgtgtgttgtgagcctcaagggctcgcatgtgagcccatgtgggcgtctcgcatgcaagtcgttgtatacacatgcatgagctgtgttgcaacgagtgagtagcgtaacgtgcgtatgtcatgaatgtaagatataattcattcgtatgcatgctgacgaggacgtcgttgaacagggaataaaaggataaggcatgcaagagacaagcatacaaccacgccacttgtaagctttgagaataaggggtacgagtagtggagggagcgcattagcaaggtctgaggacccgaccaaaggtacactacaatcacacacctacaatcaaggatcacacttttgcaaccaaagataaacttcctacaaccggggaccacttaacaccagacaaaggtacaaggtgctaggccacctcctgcacctgtgacgtgcagcatgaaagcgacacattttctccccgggacaaccatgtacctcagaccattagagtctatatatacccctttctaagatgtgagagggggttggaaaatcattcttgtaacttgatcttgacaacaatagaaactttatcattttctctctattttgggatagcaatttgaatccatatttcatcgttcttttcatcttatatctaaacttgaaatatcgtttgatttcctggccaacaatttagttgacaagttctcactgtcaacaatttggcaccttctgtgggaatgacaagcttaggccaagtcattttttacacacaatcattacaaaattaccagaggctctctttttcgttaatatgtgaagactcacctcgacaaaattcagttggtcacgtcagagcaaggcctatcaccatccgctgtcaggagaggaggtgtaaacatcagctggactcaagtagatagaggacactgacaaaaagtgtttggaaaagtccccgaagtggtagaatacattaggatgattgtaggaggcccttgctttggaagctatactcgtagagggagagacaagtacactcaagaggtaaagcaagaacctcactcctagaatttagagcaaagaactctgaagaattgtaagggagaaaataacccagtcacctttccacaggaagatgcaagaggagtgcatgcatttcccacacaatgattcgttggtgcttacggttcagttggctaacaccagggtgcaccgaagttggttgataaagggattttagtagatatccaatacatcatagccctaaagtagatggggcttggtcttgaggatctaaaaccctgcacatccctaatatatgggttcactggagactcgattcaaccacaggggtcgatagaattagcattaattttagggtggagacctctacattccatggtgatgaccaccttctttgtagtggactctctagtggcctacaataccgtgctagggagaccatcgctcaaccagttaaaagcagtcacttatgtataccatttggcaatgaaatttttgactcccaggggcatcgccaccttgaagggataatagaaggaagctaaagaatgctacaacatgtcactcaaaattgcctctaaacctcgagaaccaacgatgatgacggtccatgggggacccaaccaaggcgatgaagcttcatcgaaactagaccctcaagtttgtgaggaagtgcgagtggaattagtagaagaattggaagaaatagtaattttgaagaactcactcaaggtcctaaaagttggaaaatggatccttgaagcccttaagagggagttaaagaactttctaaaaaagaatttagtcatgtctgcttgggggatgaggacatggaaggaatagacctaactgtaatgtgctaccatctcaatgttgatcgaaatgcaaggccagtaagacaaaagtagagggctctaaattccataaagtatgcagccttgagggtggaagttgaccgaattgacacgatcaacttcatctgagaagcattctacctggagtgggtattgaaccctgtgttggttcccaaacccaatgggaaatggagagtgtgcattgccttcaatcatttgaataactctttcccaaaggatagcttcctgctattgcgtatagatcagtttgtggatgcaatagcggggtatgaattgttttcctttatagatgcatagtcaagatataaccaaatacccatgattcctgaaaataaggagcacacctcattcattatggatcgaggcctttattgctaccgggtcatgcctttcgggctgaaaattgttggggcaacataccaactacttgtcaacaggatgtttgccaaccaaattggtcacaacatggaggtatatgtcaatgacatgttggtaaacaccaagaaagcaagtgatttaatgaaggatttggacaaaatgttcaccaccctctgcaaatatcggatgaagttaaatccgctgaagtgttgtgacagtcagtagtcccgtgatccgtaaggggaaacaccgggt

SEQ ID NO: 296528 - DNA, 2681 bp, Cannabis indica
gtttctttttctagttttattattgcattgtttgtaggtaacttatcatctttttgtaaaacctttattaacctttttccaatcaataaatataatatacttagctacatttctctttaaatacaaatattaatataatatacatatatacatatatcattaaccttacattaatcctaagacaatacaaacttacatttataaaaacaacatataggacttgtagcatacactatacagaagattgtcagaaatgtcacttaagatagtacacaaaatgaagtcaaatttctaaatcattaatccccaaagccagttcaaaaaaaatccacaagcatctttactaaaccaacataccttaagtttcacagagccaagaaatccagccttaaccttcacaggcaatttcaatgcattaagtgcctccggtttcaactgcatatttgttagttccacatctcctgtattacaaatttagcagtaagtcatttacatttaactctcaattctaagttacctacaaacaatgcaataataaaactagaaaaagaaactgataagtgtagacttcgaagtattaagacaaaactaaaaacaaaatcaatcaacttatcaaattctccaaaatgccaatatcaataaactcattcacagaaaattcctcagacatttccaaatgattaaagaaaaaaaaaactcgaattgacctcaatacacaaccaaaacgaaaaacatttcatttctaagtctacaaacccaggaaatgaataagaaaacgaaccttgccaaacactgatcttaagggcctccttgttgagtcccctgacgtagttgccaaggtacctctgcaagaggtaagccacctgatcctccaacatccttacttcttcacaggatcaacaactcattactcctccattcactacccaaattcccaatttcaatttgagataagaaaaagaagaagaaagaaaaaaaacgatattctattccagaagacgctactagtcccacttctttttctttcttcttcttcttttttttagcggcagaaagggtgggaatgcgagaccaccgtttaattatcgtggggacaatttctggaccaattaaatatcgccacatgtggatctaaatcacactaaattaaaaagtcaatgaaaagtaaagactgtagagtttagacagactgtttggtttgtcttataagtaatccccgtggagtattacgtagtagatatttttacgttagacgatgacgtggcgtattgagtattagatccctgtctgagtaatgtgtgaaattacgaaattgccattgtaatcttaacactatggcggtggtttggtttgggtggacttaactgaacttgaattgaaccacatcatagagtgaataaatttatttcattgtaaattgtaataagcttttcttttaaacaaaattaatcccaatttttaaatcctcacaagacaaaataataattttaatttctgaaatattctttaattaaaaagtagataatgattaaagaattaataataaattcgatgaaaattagacaaccttaaaccatgtaacgacaaaaaatatatatttatttcatttgaaagtattttggacattaatatttgaattggactaaaaaaaatttctgtatttggcaaaaaaatttaaagtatttaagataaataaatataaccccgattaattttaaatctagttttgtagcccttgcctcgaacttttttcattctaatttttgtttggtttagttgaaaaatgaaaggggtgatcataatatataagagatctcattaagatgaagtgaaataattatttgagaaaaatatctatgcctctatgaagagatattttggagagttgtccaattcctttatcattcttaattatttagatatagagatcatgcatttcttttttccttttttttccttttttctttttaaaattatgactaaatgcatttcaagggacccattttggataattgatgtatacgatctttttagaggaaaaaaaatcaatattatattatttttatgattttaaataatgaatattgcaacagtaaaatttgaactaatatttatctatagaaacttggtacactaaatttaaatatatcaaaattaattagatagacaattttttcattaaacctgaaaatattcatctcataaatcactcctcctttctcttttcttctattctctcagtctctctcgctctctttttttcacacacacaaagaccctaacaacctactgttgtcaaccaccgcgcctccaatcgaagaccattaatccactgacacctaccaacccaaggcagtattgggtctgatactgtctatttttttcaagttttctatgtttggtctaataagactaatgtagggctcgatatagggtcaaatagtttgtccaatttttcaagtttgtgggttaagcccaataagaactatgtagggctcaatagtcggtctaattttttaagtttatgtgttaggccctataggatcgatatagagtctgatcatagtctgtgcaattttttaagtttgtgtgttaggcctgataggaccgatgtagggtctaatatagtatctgtgttggaatttattttaccagtatcttaaatctactcacaagtatgt

SEQ ID NO: 296529 - DNA, 1444 bp, Cannabis indica
tttcttcatattctctagctagactagcgccttgaaatacactgttcacacctttggccattgcataacaaaaaaaaataaagaaaagaatcatgcaggtgtaatagaaaagtaagctctcttttttcttcttttgtttttttttttttcttttttcgtcgggtgagttaccactaatataaatatatgtatatttatgttggcttattttcacaacttctaacaactacattccaaatatgtacaggttacatcttttttttctccttattccccaacagcaccaaaagttgtttttattgttttcttttgggtcttaaaaatcataattaatttgaaaaattgtggtcatattatgacccctctcaatcctattataacatttatatatacatttatgcgtctgtatattgggattttttatataatattgcataataaatataaattatcttgttgtactgagcataatcttactacatataccttttatgcaatctcaaaatgaacaatttttactataatctctctcttcttttcttaagagaatactactgtatagtctctcttactacatatactcgaaaacaaactaattatttaattaataagtcgtcacctatatactagagagatcgcataatgagcttgaaactagccaatacaagaataacccactgtcaatgtcagacacctatctaaataaacccaaattttcttcaaataaaacacctagaaatgtattgatcgacgccccctcaaaatctctagcaaaatgaacttcattaattagctaaagaaagcgtcatacaataatatttattagccaaggtaattacaagcacatattaatagaagatctcagctataaatatgcacacacaatttatgataagctaatatttattatagactagtggatgaaaatggaaaacatatattataaataaacaaacaaagcctaaattcaagatacaaatgttagggcgtctacgtctgaagatggtgcattgaagagcacagagatcgttccatgtcagcatacaatccatttggtcaatgtgaccgtgtctgattagtcaataagcttaagtagctgcggatgaatttcgttgggactaaaacagcccaaatgacatgaccaaccgacgcgtgttcacaagatttggttaggatctcaatgcttttgtcttcatgtttcccatagaccactctacgtactatttcacatattttctgaccaatcacagattgtcacgtcatcaaagttcacccagcctctgaccatgaaggcaataaggccccactttgcagttgggccaccaccatattgtgttgttcttgtgtgtacgaggagagagaaacagaaaagggtaacacccagagggaaaaagcggctccaagataagggtccgaagagagagagagagagagagagtagaag

SEQ ID NO: 296530 - DNA, 5457 bp, Cannabis indica
ttccatgacaaaagagagtgcccaaaaaaacacagtagcctgatatagatctcctcgaatttggacaagccccccaatctgcatcagcaaagacatgaagttggaggggatttggtgttgcagcatggtagaataatccttgccctggagagtttttgaggtagttgacaactccaaatggttcttgtaaatgtggtgtcaaggtgcctgaaggtattggcttaatttgttggcagcatagctaatgtcaagatgagtaattgtaatatatataagtttgcctataagacttctgtattgcttcggatctggaatgagttctcctgatttgttgcttaacttgagatttggctccattggtgtggaagcaggttttgagccaaggtggcctgtgtcttgaagcagatgcatagtgaatggtctttgagagactgagatgcccttgttgcagcgagcaacttcaaggcctaaaaaaatgcagactgccaaggtctttgagtttgaatgttgaatcagtagcaataaattgattgaggataatgttgttagtagctacaatagtgtcatcaacatatataagtaaggcaaggaaagcatgtgatgtgttctttataaacaaggaatggttatttttggactgttgaaatccttgtgtaatgagagtggagcttagtttagcataccactgtctagatgcttgttttaaaccacacaagcttttgttcaatttacaaacaacagtgtgtggtatcacccctttgggagtgcattcttgaagtagtttcatataaatatcctcttttaaatcaccatggagaaatgcattatctatgtccatgtgatgaagattccaattttttatgaaaacaagggctaaaagtaatttgagtgtgttgaacttagctacaggagcataagtgtcaaaaaagtctatacctagtttttctgtatatcctttaggtactagtcgagctttgagcctattaattgaatcatctgggttgtatttgatcttgtagacccatttgttcccaatgacatgttgattggatggtagtgttgtgacaatccaggtatgatttctttctaaagcctctgtttcatcatccatggctttcaaccaggcagcatattttgaggcttcagtgtaggattttggttcagttaaggtatgagttgcaagtatggcagccctgaatatgttagaaaaacgatgataagagacatagttagaaatgggataattggttgacgttgcaaccttgtcacatatataatcttgtaggtatgaaggcttagtaatgtttctaccaaacttggtagaagttattgggaaaattgcagttctgcttttggtgttatttgtagtgtccaaatggtgaatagggtttgctggtatatgagatgtatgtatattagttgttggtgtgtggggcatctggtgtgtattatctgctagtgtagtggatgcaggaaaaaaattatcaatgttgatgttgggatcagtggtaagggggaatgtggattcataataaaataccatctcgagaatgaaatgtaaagaccgcttagttttatggagctttatttgaacttagagtgtattatttatgtcatatatgaaattttgtatttttgcttattttgtactcggcaacattagaacgcgacgtttggccaatagaatcacatcttagtattttagaagtagcggggcaacctagttagatattgggaatgtcaggtatacccgaggttttaaaaatgaccattttacccctagaccattttattagttaaacttgtaggaagggtatttttgtcattttgccttgggtgagatggctggtttttagtgtggcagctggccactatttgattaaataatttaggtttattttccatctagtgaattattggaaatagaagaaattaaggaaaatcaagataatcatcgctcttcactccctctctctcgaatcctttggagaaccagtagcaagttggtgtttctttagttgattcttagtagtttagcaagcttcttattgttcaacacaaggtaaaaatccctagcctcttcctttatgttttcttaagcttaagttaaggtgtttgcatgattttttagaattagggttatgtgattgtttcaattgtttgaattggtgttttgaagttaaaataatgttatttgagttgaattagagtttttttgtggcttggttttgttgttggacaaggtttgagttttagaactcaaactttgctctttaatggtgatttgagtttcagggattgtttctaatttttgttgcatgaattctcttcattgtgatgttattagcaggtgtggaaggtttggtaacattaggggttcaattgaattgtttggagtcaagcatcccctgaagttggatcttcaattctttaagttttgtcagatccattctataaggtgctttagagactggctcaactccaggtgctaaatcgataacaaaattttatttctcgctacagtggtaaacctggaagttcattgggaaacacatctaaaaattcttgaactactttaatgtcttctggccgaactgatttaggtcgtgtggtatccaataccactgccagaaaccatagacatccatcttgtaacaaatctctggttcttaatactgagattactggaatttggatcactgaactgatcccacaaacacaaatggcttcgccctcaggttggaagatcacccatcttttgcttacagtcgatactagtggaatacttggacaagaaatccattccaagtatgatatcaaaatctgctaagcccaattccactaaatcatcactcaactctctatcctcaattctgattggcatagacgtaacccaccttttagagataactaattctccgccaggcaatagggttccaaaccctttatcatatttatcacaaggcctccccaatttctcaataattttggctgtcacatatgagtgagtggccccaaagtcaaacaatacaaagaaataagagttattaaatgagagctgacatgtaacaactgaggggttagcttctgcatcagcccgagtaagagcaaacacccttgttggagcgggctttgcttctatcttttgctcttatttcttaagttacgggcagtctcttttataaggtctaggcataccacactgaaaatatcctcgccctttacactcacctagatagtgcttcttacagttgggacactctaaataagtgtattaggtttcagaactaccctgttggttaccacaaccttggttccctcgaaacctcttcttctgacttgagccaccaggtgtagatggtgcctttcttttttgatcagaggtcgagtcactaccacccctaccataactagaggtaggaggagtagtggatccaccaacaacctgtatcccccgagactcttgaatgcacccaattgcaccctccgctcgcagtgattttcccaccatgttagcataggtggtactatcatctgttgtgatcagttggtcgtgtttgattttgggattcaacccatccagatacttttctttcttgctaaaatctgttggtacaattctcgaggtcgacctagccaacctataaatttgggttgcatactctgtaacagtcatattctctttctaagttagctgagtaaattcttttctctttgcactaaggactacctcattataatactttgcattaaacaactcctgaaaatcttcccaggtaataatagtgacatcctgagtaagggccaccatatcccaccagatcagggatcttcctagaattagaatgttgcacaagacaccctgtcattgccgataactcccataaaatttagattttatgtaataacagtcagccactgttcaactctcatcacatctggacctctcagaaagactcaacgtgcctgcttgcagaacctttcgtacagtggttccatctggttcacaacagcaaccaatcatgcctacacaataggggcaggagccacctgcaccacatgagcaggcattgcaggagcaccctactatctcagacctctgatctcttcatcttgttcatcaattctagcttgtatggctgcaaacctattctcccaatcctaggcagcctgcggtgagttaacatctcccaaccgcgtgacctacctcttgggtctctacctctgccacgaatatttaggggaaattgaactccctgaccaccactggatccgaccaaatttccctcgcttctcgtgttttgcctgacgtccattctaattgaacagcctgcgaaaccaagaactatcctagtcaaatcacgatcaagaataattttctaattaccgcttacttcaaaaattaaaatatgtgtctattcagatgtcaagctactaacatacttcctattaagcttttcttgtaacatactaataaaataaactacacaaataataaaggcttactgaattgtaagtcaagcttgtctctgatgatgattacatatgtcgtgacgatctttagatcacaacctagcggctctgataccaaattgtaacactctactagtttaggcgtgttatcttgattttatattaattctgcaattcgttgctaatcaacgggtttgttgaaaatcgtgaataattaaaattttacttagttactcttaaaattgaaagtaaataacttttatacaatgggaacccgtatttaaaatatttacaactgtgatacaaaatattcgatacaaaatttgtcgcctaacgactatacaaaatacaacttactgtcccaaagatcgtacacttcaggtctaaccaccccaacctgtacagtcttcatcctctcgcactcactgctgttcagccttagctttgcccttacctacacatacaaacaatatttgtgagtcgacaaactcagcaagaaaagcataatcataacataaatataaaccagattacaattaggcacccatacacctaatcataacctatccccgcgtcctacgcgatactgagtctagaacgtttgtatgacaatactattgaccataatatcaacctatacttataatctagtcgtactaatgtgatagcatcaatcaatacttatgccaaatatacattcatcgatatccaatatacttttacgtatactgatactgttatttcaatataatctaataagcaatcataaacatgcatactaaacatgtaatcacatatgcatataattatactaatcttacatcgattccaaatttaggtgtgccagtcaacttgagtggaactgctgctcgacgatttacaggcccctaagtcacaacatttgtaaatctaatgagtgatactttaaatcactttttggggacttaaaataaaactaaaagtttccctatcgatggataacat

SEQ ID NO: 296531 - DNA, 3725 bp, Cannabis indica
acaaaacccaacagcgcgcgtgttgggcacgtgcctcgagagatgttgaaatggtggcgagttgattgaacgaacccttcatttaataatcatttttcacgagacatgccataatggatgttaaatgtttaggctgatgcaatcttctcgactccccatccgttagatcttcagatgccattttggtgaatgatttggatcattcacttcgcgtggaaggaactacatttagtgcacattaagtactgaaagtgttctcatcgccttttaagtttcaaaatttttacttttcgtaccaaaggtttaacatcttgattcaacccacttctctccaggtgaagctcaattagttaagccagtctcaaaacacaaccaagcacgacgcgactgagccgtctcacactacactcttgtccatcattcaataagtgctattgttgcttttgctagttgcatacaaattcatgcttaacgtaaaaataccgaggttggattggtgagtattgtatacgagtccctatactctgaaaatgtcggtctcatttaaatgatctgttgtaaaaagagaagcatgatagtttgataagatgacggtgtatcgaggggtcattcatccgggtggagaggttggcccgccccttcatacattgtcgaaggccgaccatcatgtgctagacatattcttttttagacattgctattttgagctgacccacttaattctgcactaactgctcttgcaggtgcttcttggtttatcatgctaggcccaagaaaggacactagttcttcaaaagctgatggcggcagcagtcctcgcgggaagaggaagaggcatgacactgccttttacactatatcttcatctcctctatattctcctggggatcacccccagcgacatggtcaacattccttgcaaggccaaccccgcccccgccattcatcttcccttcaaaaaattccctctgtgggattcacatttctcacgaaaactgtacttctcaaccccgccgctatgtagagagagggggagattaaaagagctttggaggaacgtctcgaggatgaaaagggatttttacgcaagccggccaacatactttcggtcgtgaggcgggctgaagtctcggagggcctccatgcctcaatcccggtcagaacaatagttgatgtagaggccgtggagaaatgcttggcacttaaagtggggagtgaggttgcaccctttgcagcagaacttttggaccaagtagctagcaacgcgtctaagttgcccctagagacttaggcaacctgtagcagtgttgatgccttttccttggctcacgccgccaaatagcaagcgattggggtgaggttctgatcctttcactttggtttttgccaccgtacttggccttctaatccttttttcttttttattacaacaagtagctctgttagtagagagggtaataggataagttggcacactggtcatggagcttgaacaggccaaggttgataactgcgagttgcgcactgccaaccagactctcattatcgaactcgcggaggccaaggctcaacttgaaggcttgaaaagaaaaaataaactgttggaagacaaccatgcctagctaacctgtctcatgtgggatatgaggataattggtgacctccacaaggaaaccacagagagggtgcaaagagcgcactcctgtcaattatccaatagtacccagatatctgaaaattaagtagttggctgaggtgggaatcttctccatgcccacgaccctgcaattttttcctaccttgtctttctttctttattttgcgagcacaattatgcccttactgcggggctgtttgtaatgactttatatctttgcatttattttttttacgaaatttgggtcaaaacacatttcatatcgatgtttacgctaattttttaatttcaagaagaaattcaagcgtattttttccttaagaaatttggttgaatctcgtttcttgtttaatatgcatggcacactaagaggcctgacaaagtaaacgaatacaatgcactgttgatttttggggtatacacagctaggcatgcaaccccccaaatgagctgagaagtttggacgtctccaaaatcttggtcatttttctaaaacataacttgtggcaacaatgcatcacccaggtcacttagggggagattcgggcttgtgtcaaagttctagttgggctcctttttcgggatatagggccagattcgtgctgacaccttaatcacaccctctccacctagagtcatctgtgacagcctttcctcaaacgagagtaagaaagcatcaaaaaatgcaaaaatcttctaggaatgcttctttctccactccctatgggaaatttttaaatcacagcaaatggacgtaagcgaatgcaacaatcgttcaaacaatgttctcttttttaaggataaagttgaaaatgtattgcctgcacttttcatgagggtctagttgaattatacagtaaacttttggcttccataaaggaaggctgaagtcatactaaaattcaagcaagggcttcactctcgaaactgaaggtgaaaaccaagttgggcgtacaataggcttcaagtagttcctccttctggaagggagggttgaagacctgttaaatcccaagtggtattttcaaccaaatgcttgagaaatgtctaccagcgagatgaaaattgcacggcgggagcacacgcacttgtgagaaccatgttgaattatgcggcgaactttgacttataactaaagctcattattagaaagagttgtattttcatttgatacttatgttaatttatttattttaacatatatttatttaattaaaattactaatttagataaactgtaaatataaatttaatttaatatttataaaattaggatgatctaaaaaataaaattatttttcatctttagtattatatttccaataaatattatgaaaattactaatttaagttggtccaaaattaataaaattaattttcaactcaaatttcattttttattaaacatatatatataatagaattcgaaatccaatgtagtataaagtaatacaattttttcgaaatttcatcataaaataaaataaaataaaactgaaaaaattattctaatttatgttggtctaaaattaaataaattaattttcaacataaatataattttcttatttaattaaatttttaagaaaaatatcaaatatttaagtgtctttaataaaatcaacttaaatattaattttcttatttataataatgtattgaaaattaaatattattaatttaaaatattgatattcaggtttaaatatttaaattaatattttattaagatactagggtttgaaaattaaaaaaattcgaaatttgtggaaagatgcacctgctgcccagaaaagttgctggcagccattccgcgcgcgcacgagaggactgcagcctccttgaccgaagaatctctggtcagctgtagggtgatgggcgagcttcctgggcatgcatcgtgtttgaaggttgggcgagacgcgactttagatagggatttttttcccattccgcgtgcataaagggagttttgtttgagtccctggtgcgattgagcaccatctcgacaccatgttcactcaatttttaaacattcatatctttttcaatttttatcgtaatcgag

SEQ ID NO: 296532 - DNA, 3034 bp, Cannabis indica
aattattttagataaattagaaaaaaaaaatataagaaaatagataaatatttatgaagctgataaaaaattagaaagtaaaaaaatttaagagagaataaataaaattagttagaaaaattttaaagtgtgaagtagatatatatatatatatattgattttacattaaaatattaattttttgaaataaaaaattaaaataccaaaatatatatactaaagacatagttgtaaaaactaattaataagtgaattaacaattaataatatgatgtagcagagagagtagatggaggctaatcaaagtggcaaccgaagcatgtcagcactaagcccttcactcaatttcaaccatgtctcactcatcataatacacttcctcttctcttcattatccttaattgacttacattttaactcttccgactccttaatcattctattccttttaaactcagaaatcataattctattttcaatccaaaccttcaattcccttccactactggccttcatcattcgtgtcgcggcatcagccatcatccacaccatggtgctgtagctcactctcatcatccttgactcatcctccatgttaccaaggttgggattgttccagtacagattctccatttgaaacgggggttcgatgctcgaaaccatggtcgaaaagagggagcacgacgaattcatcgactcgaatttgtcgaaagagtgtgtgaactcgtgagtggtcgagtaatcctcgattgagttgctgtggttacgggagtggtacctccttgtaaccataaatttgatggtgactagtgatgaattttgatcattttgatcagatgatgagtagtgattaacgtcttctgtgtaaacgaaaacttgtgagtatggatttgccattgtaattaatatgagatcgattaattgatgatatgagttcatatctatttatataggtcatgtaggcataatgttaattctaatgtgattagtaataggtatatctttttaacgggttgtatgtataattattttttttacggtaatttgtggtgaaattcttatatttttatttttatgtttgttacggtcataaattactccattaagagaagaaacacttatggagagattggtccccttgccttaaccctttctctcctttaaatttaccttgcacaccattcataacaatagaataaattaaacaaatttgatactatttcattaaatgagttatattttaatattttaacctgtaatattattactgagagggccaaaagttagatactattattttttaattgactattttcattatatttataatattattattttaaattttaaataataatcataataaataatttatagtattaaaaaaaatttattatgaggataacaaataccactgtactaacaaaaaaagataacaaataacataaaaaaaaaacataaaagagattccaacatatcttttttaaagtagtataaattaagaagtcacaggatttttgataattgagttaatagtaattgaaattgaaatttaattttttcaacaaaaaaaataacctaaagcctcccaattagtcctcacatcgactgtttcgctgctccttttgtaactcgtttgagctgactcaccgagtcacggattccacattgtcgttcaaagctgatgacctgacctgatcaaaaagcaaaaaagtctttccctttggaattggaatccacaccatctccctttcttcccttcaattccactcaattcccaataattgttctgaattttcagtaagggttttcgattgattctaattgattttgaaataataaagaaattaagataataagataagggaagatgtgggctgcttcgtgcctggcctcatgttgcgctgcttgcgcctgtgacgcttgccgtacggtggtctcagggatcagccgccgctctgccaggattgcttattgtggtcttttcgccctctctctcatcgtctcatggatgcttcgcgaggtcgctgctcctctaatggagaaaatcccatgtcagtttgtctttctttctctatgattgctttatggttttggcgtcgtattacatgcgacccttttttctgggtatttttcaggcaatttcaaattccaatactttctaaagtttaatttattcataatcatattatatgctttgaattaattggaaaaaaatggatttaagcatcgattattgattggttgtggcggagttaatctgcatagaaagtttagaattttcttatatttagattgaattgcttagatgacaatggttttaacttttaagcttcaattggcttgacattacgtgtgctcaccaatttttccaagtgctactatatgggtttgtaacattgtttgtattctatgttgtattttgtgatgcagggattaatacctttcatcacactccaagcagggagtggtttgaaacagatgcagtgttgcgtgttagtttgggaaattttctcttcttcaccatcttcgctgttatgatggttggtgtgaaaactcagagagatccccgtgatggtttgcaccatggtggatggatgatgaaaattatatgctggtgccttttggtcatctttatgtttttcttaccaaatgagattattaacttttatggtaagtcctatgtttgtgtgtttgttttcttcaggggtttgttgtatcccacaaaatcttaaaaccttaactggctgtgttaagattgacaggatcctggtcacttgatatttatcttccttttatgcaaaatgctttggtaaattgcactttattatcatacttagagaataagatgcatgctaataacagttaatttttcttattttatgacattattttatactatcaaatatttcttggcggcggattaaatagtcaacctgtttagttatcaagatccgtaataaaacaactttctggctgcctttactgtttttttttttttgagactctttactgtgcagcatggatgaacga

SEQ ID NO: 296533 - DNA, 8200 bp, Cannabis indica
ttcggctgctgaactagaggtatttttataaagttctttcttgctatgttcttcataggtgtcgtggtatactccatactgttgaataatcttttgtgtttattctctgttctccattattatgtaaataagttaaggatagtatgtttttctcatgctttttttgctctttttatgtctcgttgctaattaattttacttattcttatttttctgtcaaactaatctttcttattccttctttcggtaatgtccaccttatgaacattttttggttagctttctactaatgtcaccatagcctttatcttaactttataaatgttggcttagtagctctacggcatccattatgagttttgatttattattcatttccttggtatgttaggctcttggcttggaaagattaaagactgaactccaaactcgtggattaaaatgtggaggcactctccaggagcgagcagctaggcttttcctgctaaagtctacccctttagagaagcttcccaaaaagttgcttgccaaaaaatgagtgtttgttgttgtctttgtggccaaccaattttccttcgaaatgtgactggaaatttgaagtgtatatgtagaactggcctagttctgactctagatcacctctatattataatgcagatggattaatattttaatacttcagtcagatgtaattttcaacagtgttatgtaactgatctaagcatgttataattacactatcctcttctattttctgtatcaattttttttagacaaatatatacatatgcgtgtaatgtaacgcttatagtaagttcccatttctttagagtgcaatcatagtatttttgtctcttgaaaggtatgttacacatgcttgttggtagcaatatatcgatgtgatttttctcttaaaaaaaaatctttaaaatacaaatgtacagtaaagaaaaaaaaagacctatgtgtgatcggagatggcacaaaaattactactttatcagaaagtttctgagttggcacgatctgaatccgagttaacatgagcaggggatggagatggggtgtttctgcagactggacaagttccgttcaaccggagccattcgtctatacactcagcatgaaagcagtgtttgcactcaggtatacatctcagagtctctttgctgcaatactcagataagcatataggacaagtggtatcatttcgacccggtacccgcctgctctcaccaagaacaaccttttcatatgattctatggtggagtcatccaggcccaccatgacaatgctgtgttcaagaccatctggtgccgccgctactgctgttggtctccgccgtgcatgacctcgatgtgacctatctacaaggcaagcgaaacaggctatcccaattgcgcatgtcatggctggcacggcaatggccaagcaaatgattctgaatatttggagaccatcgtttgatcgacctgaaagttgaaaaagccattaatgtgatgtttcaaagatataatggtgggatgaacccatcaaccatgacctttgcgcatcctccattgttttcctaatgggtttattcagaattagtttacttagaacacaagtgtcattgttttacttcacttttaagctgagcattcccttcttttccatcaacctcttaccaattttcttacccatcttaccaaaccttgtccgctcaccagttagatttaatccaattgactgtttttgcagtcactgaccaaatacgcttggtggacctgtgaccggtaactacattttaactactaaattaatttgataggttgaacacgaggacctaatgaatcctcatttcctattaggtggaaatagatggcagtgttaaacaaacagctaaaaatcaatttagcaacaggagtagatcatctacatatatatatttttttgactaattcgcctatacaaattaatacacatgctgggcacgttacagcttacagtggtactttatataataacaccttatcacagtttcattgagttgacattttggttttttacaggtcaacgaactattaatcttatacaggttaaaattcatatagtatataccgtaatattcaagattcttatgtcattattcattaaattatacttctaacatgtgacccagtcagaaacttaccgcaccttcggactggttctggggatgtcaattaccaaagtatgcaataaaaaaccaaaatagaaagaaaggaataagtttttcttaccattttcacgattgaagaagcagccgatttctttgctggtgttactcttgaaaccacagatgcctccttgtaattcacaaatactacaatcgggttcataccatgtcaaatggagatcattattaaggctgttggaaaatccttcattgaactgaacaggccttttaaccggaactgttatagttttcataagcttacacgactcggccaatatttggttagcaagagtcattgaagaggtagctaaaacagaatgagttgagttgctaagacaatctatgggagcaaaacgagacttggtgtaggaagatgggcaactgaggaaggtgtagttctgataaaaagcagatatgaaaggagaccctgcaagattgaagctcaaaagcctacgaggaagacacttaagaggatcatagagaagtacttcttgagttatgtagttgatctctcgaacaaaaaattccccagaaaaagggagtttcaaaactgttgtgttctgcttattgcaactcaggtcgaaacctgggtagccacagtttcttctaggctgatgagattttagccgaaaagggaatcgaatagggatgtatttattgccacacatggagatttggcaatgcttttgtgcgtttaaagtgggaaataggaagaagagaagaaacaagaggattttaggggaacccattttttgtaaaaatcctgaatctaaagtttggggagagttaatgtataatagtgatggcatatatttaatctcgttaaatataatatatgagttataaagtcaaaatgtataaaatagtggtgcaaccagtgtagaggaaatataatatgatttaagagtggtcaatgcttttatagcattattaacttgtacgccagatgcccttagagaagaccaacagaaaataagatttgcaaataaaataagatttaatagtggaatatccaaatgggtcattacaccaaactaattttaatatgaaatcatgcaactaactttacctccctgatcagccacaaagcttaatgggcttaatcatctacattataacttgtaaagcacattaattaattagtcgtcactgcatggattttaacgagattatctcagctcactatgattttagagttgaatgtccgtacgtctgcttggtattaatattcttttaggaacaaatttggttactgcatggactttttcgtgacataacgagaatatctcaactcagtatgttttttagatctgaatatccgtacatttacttacactttgctataatattcttttaggtacaaatttggttatgtaaatacatcaaagaatgatatgccacgttcatacaacaagaacaggacaaagataataaccaaaccaaactcactagtgtctctagagactctattctgtaatctaaatttgattgaatggtgcacgaaagcgaaactattttttttcgtggtgtgagtatatctctaaatcagatagccgattttcccctttgtttttattcttcctttattttctgtttccagaacaaaacttggaaaagtcacaggagctgttgggagattctaattgaaacaacttcgccatcaggtccagctctcatggcgtggtacttgacatgaattcctgacattaagaagaagcaaatgtaaaacaaagtgaaaagagaaagagttaacataaatggaactcaggactctagtaatcacctaaaaggctgaaacaaatcttaaatgaagtttagtgaagaagcccggtttggcggtagtccaaaggctaaatttccatagcttaaacacgtaaaggatattaaaagcacgagaagtaataatacaccttcatttttttgtaaattggtgttgacagcaacagcatggagagtaatcacagctctgggttgccagtccattggtttaccgacccatgatttgagattaaacaccgctgccattttatttggaaataagaccaaataatttgttaagcttcaaagaaggaaataactgacaaggaaacaaagcaatagggtctttccttatcaaattttattttattttgatcaaaactaacatcacagtcttagtctcttagacctcttcattgaccacattcagaaaatacgttttcaagaaaacattaagcattttttatttgaagctctatctttttcatgcattaatgctacaaaggtaattctctcctctactagacattgtccatcaggtatacgaattctgaatgagtatgacagcaacccaatagtaaaatgtccatattaaagaaattagttagcgcagagaccgtcaaatcttaccagatgttgaacagtctcggaggtgctcaacatcaaaaattgcccccgaagctccatctgcatgcatttggttatcatgagatcctaccagttcgtatttccagctcccattgcggtattccttgttcaaaaatagctctatgtgccttgcatctaaagtctgcattgttcctgttaaaataagcaaaatatcctagacagttacggtttgaggagaaggaaaactaagcaagtcaagaggacaagtcctttgtactaccacccaaccatattctgtagctcaggagtaggacttgtttatgtcctataaggcaatttctaactgaattcacaatgtaattaattctattctatgaccatttgcataaattgctaatgtcatctcccaaattgattgactcacacaaatttaatgggtcttttcatttatgttttatagtaaaaaaaatccttaccatcgcatgtattgaggtcacagactgggcatcgaacaagctgaagatctgtaaaaatcagcccaatatcaataaaccagattaaaataaaatcaattaatcaagacagccagcaaattttgaaaattcacataacaagaggattgttaagcgagttaatgctacctgctatccatattcccttcttaacattgtttataacacaacagccagtggactgcaaaaaattatgtgcctcatcttcgtcggggattctagctggaaattggagtctttctgtcagaaatgctgcagaagaaaaaagcaccaatcgcatccagtctactttttcccatcaaattcaaagtgcagataggaaaatattagttgccaatacagtataagtacatatttctccagaaaatacccaataagaaagtagatattcaacagcattggtttagcatttattatgttcatacagttctgtttgagttggtgttagttgtacattttcaaaacaagctatatgacttaccagtgaaagttaattttggtgaggctacttcgcaaattctcattttgattagagtacgtaacgtgtgttataaagtataataaatcaaacaattacagtatggtgtcgaaattggtcaaaggatacagaagaaactaaaattgaaccaatatgtttctcctgctgatggaaattgtaagaatgactcccatctgcaagatcattcgtcgataaggatccattagacgacgacaattacacattaaaagtcagttttcaggcaatcatattccatactctggtccataccaaaagctgcagcatagaggtcgatccatttgaaggacacgtggcatggagtagaaacctgaagatcacgcatgcaaacatacttccatatacaatcttccatcagtgtacgattgaaccaccgactagtgactgcaagcatcaccagtgacctcccgtcaagaaacttcgcgacctctgtccacaggtccttttcaaacctattcacgcaatagaacaggagaaaaaaaattcatattattataaaattacagaaacacaaatctcttgttttctttttccctcaaagcttatctaaatagtcactctgcttagttacaatgatgcttgcgcgcaaaagttaaacagagtatttctcacgtttctgcaagtgcgaacgaggttaatcaactaaatctttctaaaaggaaaaattaacaaattaagatcgttcgatcttcatttctcttaaccttcgggtaaaaataaaacaagattctaatcggatgaaattaagttcacagtaagctagtcaaattgtgcactaggaatttttatgaagcttaaacatgtagatgaaatgcatccatggataagaagttcaagacgatctatgctcacagattttgatcgatgtctgatgatacagctataaccgaatcgtcaaactcgtttgcacgaacagtttctaaacaaagagattgtataatttagatccatacattatgtataatttctttaggttgttactaaattagtcacgaattctcactcaaagcaattcgaattttcacgcaacatcctatctagctctaatccgcaaatgtaatcgtaatagatctacagaatttaaacggagaacttctttcgtcatgtagcaaaacacatagacgcacaaacgatttaagtttcatttaatatcggccacagaacagaacgcatgaatatgagtttcggatgtaattaatggagaaattgaatcaaactcaaattcaaagaaacagagagaaggaataagaaaacaaccaggagaagttggaatgtgcgttgaggaaagtagaggaggaaggagagctacaggaacagatggtcttggctcttcgcattggtctacgcattttcggaggctcagtattgagacttctctttctccgagcgaagttgtcttcttgctctgtagctttagtttcgcttctcgaacgccttcccatggtggttgcttctgcgtgttctcaaagctctcaagactctagctacttatatataatgcgcgccaactctttccttttagaaaaactacaaaatttaaaaaatattaaaataataataatcgttcgttcttactaaaatgtaataatagtcgagagattaattagcacttagatcaaattgatttaataattactgaaattacaacacggtaaacatgtacaccaattatgttataaaataaagtaaaagtatatatttattgaatttatcacatattatatataaaatatttcttttagctagataaactcattttgaaaacgaaaagttattatgtcttaaaaaatggatcagtagtaaaatgactaactgactaagttcaatatttcaacacagtttttataaaaaagaaaattaatttcattgatttttctttaaaatacatcaaacacttacagtaaaaaataaaaataaataaacattaggtgattcaattaaatataggatatatgatatcaactttcttcattgttgtagaaaaattatttaagtttctttcttcattgttctcaattttttggattcattcatatttcaaatgaataagaaaaaaaatgataatggaaaataaaaaccaatggtatattttaatagagaaactattgaaaatgatctattttatttttagatttaaagatttaaatatatttttaagggattttttaaaactatattcctttataggaaataattatacctagacatttccatcccatgttaagtaaaatatctactgttaaggcaataattcaccttcacttatgagtgaagatatacttgagaattgagtatatgaccagtttttagtctcactctgaaaatcctatcttcaccttactttcacattcttttttattctcagtttccttaatataatccaatatgtgtttacaacttcttgttataaataaagtaaaacataaaataacaacgaggaattataataactaacggaacagccaaacagctcgtgaatttacattaattttatttggagttgttacaattgaatggggctgataagaaattaaatatgataaaaaaaattacaagttgactcgttaaacaaaacaaaaacaaaaaaaaaaaaaacaaaaaacgac

SEQ ID NO: 296534 - DNA, 3093 bp, Cannabis indica
gaaagagaagaaagagaatcttgatttcattgaatgaatacactgatgcaaatatcagtgtttatatacagcaaaggaaactaaacaaaacagttacagatttgttaaagaacagtaaagccaaacaaaaaactaaactaactgaataacagaataataactaacttgtaagtgtaactaaaggcttatcagtaacagcccccctcaaactaagtgtggatagagaaaccacactgagtttgtccctcaaaaatggaaacttgctgcttgaaattgccttggtgagagaatcagccaactgatcctgtgctggaacatgacaaacacgaagctggttttgcagaaccttgtcccgaacgaagtaaagatcgatttcaatatgtttcgtacgagcatgaagaacaggatttacagctaacattacagtgctcaagttatcacaccatacagttggcgttgtgatggaaacaatctgtaactcagagagaagagactgcagccatgtgatcacggttcaacagcagcaaggctacgaaactcagcttctgtagaagatctcgagattgtctgctgtttcttagatttccaggcaacaagattcgaaccaaacaacacacagtaacaacttgtagacctcctatcattagggtccgatgcccaatcagcatcacaaaatgattaaacatcaaaatgtgaggttttgtgcaagttgagaccatagtcaagagtccctgaaagatatcgtaaaatgcgctaaactccaacccaatgagactctaatggagattgcataaactgagataccttgttaacacaatatgcaatttcgggtctacttattgtagcatacggtaatgctccaacaacagaccgatacagtgtagggtcaagaacagagtcacttgcaaactgggagagtttaagtccacttgtcattggtgtgctgcttgatttggcaccttgcatttgtgtcctggacagtagatcttgcaggtactttgtctgagacagatgcagccctgtagaagtatgtgtaatctgaattcccagaaaatagcttaagtcaccaaggtcttttaaggcaaaacgagtgtgtagttgggaaattagattggagacctcaatgtcattgctcccaatgacaattatgtcatctacatatacaagaatatatgtagtgtggtgagtagtgattctgagaaagagagatgtatcagatttggtatggtgaaacccaagactgatgagagctgtagacaacttggcaaaccatgccctaggggcttgtttcaacccatataatgcttttaaagtttgcacatgaaatcaggttgttgaggatccacaaaacctggaggttgacacatgtaaacctcttcctctaagtctccatttagaaaaacattattaaagtccaattgtctcaatttccaacctttagaaatagcaatggtgagtaaaactcttatgatttctagttttacaacagggctgaaggtctcattgaaatcaaatccactttgttgatggaagccttttgcaacaagtctagcatgtactgagttgtacttctatcagcactttctttaactcttaaaacccacttgcagcctatacattttctcccaggtggcaacttgagttaaatccatgtatgatttttctttaaggcatagtactcagtgtccatggcattgtgccatttgggatcagccaaagctgatttaacagtagcaggaacaaaggtggcagtaagcattttaggctttcgaattcctactttggctcgggtttgcatagggtgttggtttataacagctgggttgacactggtttgagttggagttgggtttgcaggggaattaggagaggctaaagggatgacaggtgatgtggtgatagctggaggatgagtagaggaagatgatgtagtggtggtaagtggaatgttgtgttgaggtggagagataagaggaatggcagtggaggatggtaaagaatggtcaacatgaggaatgacagaactgagattgtgaaatgggaagacatttatattgaataaaacatcacgagacatgtaaatgcgaccatctttggctaaacacttatatcctttctgagttagactatagctaatgaatgtacatggggtggatctatagtccattttgtgcctattataaggtcttagattgggaaaacatagacacccgaatgtcttaagagcagaataatcgggtttcgaatgaaacaaagtttcatgaggtataaaatcattgagtacttttgttggcattctgttcattagataaacagaggttcgatatgcctcatcccagtatttaagaggcatggatgcatgagctaagagagtgaggcctaaatcaacgacatgtctatgttttcgctctactagaccattttgttcatggaaatgtggacaagacactctatgaactattccacaagactcaactaaggaagtgaatgctctaaactccccttcccaataagattctaaggatttgatgggaagatttagttgaagttctatctgtgttttgaacttaataaaggtgggtaaagcctcatctttagttcgaagtaagtacagccaagtgtatctagaataagcatctacaaagcttatatagtacctatatcaattagaagagaccataggggtaggaccccatagatctgtgtgtatcatttgcaaaggtgctatgtaaatagtatgagagttcgggtaaggcaacttgtgatgtttaccaagatagcaagcattacacaattcaaaagcatttttattaatggaagagatattacatttggtcattatagattgaacaatatttttggaaggatgtcctaatctcttatgccaaatattaaaatgggaaataggtacattagaagaagactgttgacattgaaaagcagatttagatgaggaaacaccagtagaaactgtggtgttgagactaggggaggagttggattgaagaggctggtcaaatttgtaaagccctttgtcaaccctcccaaccaataaagtcttcatagtagcctgatctttcacaaaacaaaaat

SEQ ID NO: 296535 - DNA, 3073 bp, Cannabis indica
ggcataaaacccaacaggtttctgttgtagatgaatttcctcataacacacaagttgctatagatgaaagagctgcatctgctactacagatgcaccaactgctccagctgcacaagttgaacaagtagcacacttggatccagctattgctgcttcagatttctctataataggctttcccaagccacttcctccagaagctatggtagatacatcctctaatgctactgatccagtgatttagccaaattctaatgctactcctcaaattcctagaactcactctatgatcactagatctgagagaggtatttacaatcctaaggcttatctggtctctaaacacaaatttcatgaatcactgttgcctcatgaaccaaaatctgtaaaggatgctctcaaagatcccgtctagaatggttctatgtcaaaaaagttgtatgcttttaaagcacaaggcacttggaccttagttctttatgaggcctacgtgattttaattaacaataaataattttttagagtcaagttaaatgctaatagaatgcaagtgaaaatcctgattggttgctaaagggtatcttcaacaaccaagtatagactttgaggacacctagtccaattgttaaaccagttacataaagattatttcttactttagctgtgtctttcaactgagaagtaaggaaattagatgtctttaatgtcttctcaatggtgaccttcatgagactgtttatatgactcaaccaaaggatttgaagattctcaacaccctaaatatgtttataaattgaacaaatatgtctatagtttaaagcaagtacctcgagcttggaatgacaagcttaaaacaacacttttcaattggggattcaaagcttctaaagctgagacctctctttttgtatatggatcaagttctatttaaattattctctttgtgttatgtagatgatactttagttaaggacctaatcctacttttatacagaagcttattgttgatctcaatgcaacccattttactcaaagacatggagttagtttactattttcttggaatatatggaaattcatagagattccaaaggtatgtatttgttacaaagtaaatacatcacaaatttgcttgtcaaagtttctttggaatgtgctaaagtttgctcaagtcacattaacagttctcataagctagctcttactgaaggtatacattttgatgataaaacattatattgaatcactcttggagacctccaatacttgactctaactagacctgatgtagtctttattattaataagctctctcagtttatcgatgctccaaccaatgtctattgggaagcttgtaaacgattgtttcgatactcaaaagccactctatctgatggtttaatcatctctctagcttcctgattgtccattgaagcttattctaatgctgattgggcaagttgccctgatgatcgcaggtctactggtggacatgatgtatttcttggtccatttcttatctcttggtcagtcaagaagcaacaagtggttgctcaatcttcaacacagtttgaatttcgtgtcttagcaaatacaattgttgagcttaaatggttacattctcttttcactaaattataggttattttttctaatgttcccttcatttgggctgacaattaaggagctactgttttagcagccaatctaatatttcacgctctatgcaagcatattaaaatcgatcaacagttgttatcatatataaagatagatacatggaaatgtggaataatatatatcacaaattttggtgtaccgatcgtaagcatttgttttcccttgcttgataattcttggaataaaatgtgatgatatatcatcaattgcaataaaaattatagcgtaatgtaatatatatatttatatacacattgtgaaattctgattgcagaaaattattgtgtacactaagtacgtactagtaggtagtcacaattgtgcatttgtgctataataaagcgaggcatccacttatttagtgtcgcccaaaagtgagatatttatagatgtatataattctttttttttttacgttacatatatttgtatctgattatatatatacacacacattacacaataccaaatcaaatcttagcatgttagcttttcctcggtagtcttttttagtaacataaagcaagacgacgtcattcttacctatatatgcagtacagagctagctatattaatatatatgtagtactacatagttgaggggaaaaccagcagcggtagtcttcgaacatgttatatatatagatccaaatttgtacgtgtaatttataagagtagaatgtctagttaaactactgttgtaatcatatgaaaattaaaccttattctaattttttttttatatatataggaaggaacaaattgtaattataatagatattctactaaattttgtaaaattaccaaatagtttttttttagggaaaaaaggttagaaatatttagtatcaatatctgtgtcattaaaaaaaaaaactgaattataattttatatgaatatgttgtatcaattaaatgcacaaaatgaatatattttatttatttcgaagatatataattttgtacattagatacaataatagtttataatatttatattattaattaaacaaatacaagtttttgattcatcaaaaaaaaataaaaataaagaaatacaggtttgtacaagtaaaaatgtacaatgtttaggtagtacatcacttaatgcatatgtacaatgttaattaatgcactcaccactttgttatatatacgtacgtacgtgtttgcttagtgatacatgaaattattatataggtacgaaaatagtgctttaatttgttcaggtactctaataattattctgagtatatatgcttatctacagagatatgtgattttgacatatattcaaaaattaattagtaatggtgtggcacatatatgctaattagtaatttttctttttgacatgtagtaaattgtgctccctgaacttttttggccgtt

SEQ ID NO: 296536 - DNA, 2132 bp, Cannabis indica
atatttatttatatatatatatatatatatatatattcctttgtgttgagattcactaattaatatgcacactgttttagtggttatttatgtcagccattttggacacaattcatgttcatctcatctctatacatctccatatttaaattttaataaaaattaatacataaataatatatatttatagatgatctctgatcagttaaatattattcatatttgtgatagatagctagcattttaattagaatttaaaattgactatatatctacataaagtgaaacctttatttatttatttatttattttttaatggaagattgacaattttattaatttaaagaatcagccaatacaatacttaacaactccgaagggcagttgttcgaattaaaaacacaatctgtcattaaacaagcactacgcgtaaggaaatgcaaatttattaattgatacatatgtgattatcttctaaagtttttttccattgaacagttggaaaataattggtatatttgcaaattttctatattttccgaaaaaataataatgcctttaagttgagtcaattcactcactatccactcttatctctttcttaaattttaagagaagagaggaccccttttataggtacagttcaattatatggtgatcaccagctgtgcaactcactcacatcccttaatttaaatttagtatttgtcaaatgtccatgcaattagtaataatcaatataattaattttaaattaattgttggctctatatataatatagtcacccttttctttatctttttttttttaattaatattgtatattaatgatgaatcaatatcatttcaaaataaaaatctctaaatatgttatctttctaataattacatacatcactcattttcgatatctccttatataagattcagccggcattattgttgaaaaagttcacatgtaattaaaattaattagaagataaaaacaaaacgctggcttgttgattgtgtagttttgtaaattgattgatttaaagtgtacaaaaagataaaaaagggcaatgcaaaatgtaaatacttttatactcatctaattctcaattctaatgagccattaaactccaaattcacgtgggggtactaaaagatttctcttttagcaaaacctgatctagcttgtgattatttatggcatattcgtggaaccaaataatatttgtttattgtataatatgtattatataaatggccaattaactagatgattgtctacctacatatatttagagaaggcacttttttggattaatatctaaagacatagaatttgaaattactaacaacaaatgcataggacaaagtatgtcttctctcttgatatatgtaagcccttataagcgtagtcggtcaagtgttgtttcaatcaaactcaatcgattgaactatatacatacatacatatatatagagagagatatgtgttttcgtgattttaggcttaaaggcagttcaatcatttgtcgaaatgattcagtgcatgcatagattttcttggcatgaagtactcgacactattttgagacacaataccatctcttaattttaagggtgggaaaaaaaaaagccaaaatcattatatataattaatcaacaaaaaagccctataatttttgattcaactacctacgaacttaatttttacacacatatatatagctagttaattagtagtacagctaaatagtaaatatatgcaagttgattttaattcactatactaataatattggacgtgaaagattgatgttaacatgaatgaactgattaattattgatgatcaagccatacatcacattcacatatgtaatcgaaaataatatattgaaatcttcgaagagatcatgattgattctgatatatgcttccaaacaaaagattgatcgagttcaatcattaactataattgaaagaaaaagataaaacggtgatacaaattattagctacataccaacgcaaacgaatgattaattatatatattattatttgaagagtggaattaatataataattcattcttacgcatatatacagattctagataagctattactactatatatatatata

SEQ ID NO: 296537 - DNA, 5189 bp, Cannabis indica
tatttttcgcctgaacttgaactagaatggttttagtggaccatttgtatgccatggcaaggaaaagccagatgttctgatttagggacaattgatcaatccataaggttgcatttacagggtggcagggtgggggtgtatgatatgattgaattggatttgacaatttttgtcatatgcttttggtatgaaattagagaacgtattggtaaaattaaccttactagcaaattaaagagagataataagctgtcgaggaatttaggatattttaatattacacaatcttcctcttcttatctttagtttggcaaatttgtaacttagtatgataaccaactcactatttccttgtttttatattatttttcataatccaatccaatgcactatcatatcccacacacacacacaccaaacaagacctagaagttgatggtgctgctcacatttgatccaaattccatgaaagcatagagtactctaatgagtcgattggacttatttccaggcacttagaaattttttctttctgctgtattgagttttgtgcttatttcaagttatatgccacccatttcaatcgttatgtcatctttttccattgatttattttgcctgctaacttggatacgttatcaggtgccaaatcctctatttgaccttgctggcatcatgtgtggacaatttggaattccattctggacattttttcttgcaacattgttggggaaggcagttatcaagactcacatacaggtttgtcagttccccttgtcagcttgaacattattatgatcgttttccctaaacagaagcaattcattgatttgcttatatgaaattttattattctgtggacttggctttgatttgaaactcttttgaaattgtcctcctttggcttgtactttcctgcagacggttttcataatcggagtttgtaataatcaacttcttaattggatagagaatgaattgatttggcttcttagtttcatccctggtttagcatcggtgctccccaacgtaatttctaaactcaacgcagtgaaagagaagtatctcacagccacagccacacccgtgtcctcaaatatcaaggtttggccacctttcggggaaaaacatccattttattacgtcttctttcacctaatgcatattcttatttatttttcatataaaatcttgttaggtgaaaaagtgggatttctcattcacttcgatctggaacacggtggtgtggctcatgctcgtgaacttttttgtgaagattgtgaacgcaactgcgcagaggtatttgaagaaacaacaggagaaggagatggagatgttggtgctaacaaataaatcataggcatcaaaatggaattggccatggctgaccatgttctttgcttgcttgatagcgaggaactttgattcttactcttaaatataattaatacattctattatttctatgttaccatttttagtgatagaaattgttagtagtagatgatgattatgatgatgtagcaagcagttacttgatcacttgagcaggaagaaggcataattggtctacagtacaccccaacttttctgcatgcataaaagtgtcattgtgagaagcttgtataggaagatgatgaagaagaagaaaagccattctctgttttattttttgggggatgtgttattttgggtggtttttttaaccctttctcaacaaattgttgaattgaatcctggaaactgaaatatttgatattttttttacaaagcacgataatatctttcatatattttattgtgttcagaacataggcaaacacccaagctctattcttgatttttaacaggatattttttttcccttttcctgtctttatttatatttattagagttcttcatcctattttatttacactattttgaactaagtgccgatttcatattttaaatctaatttattttgcatgataattcaaatttaatataattcaatttggaaaagtgtggactagattagttattttgtattgttatttattaatattgaattatttaatgtttattaagttttttttttcatacttagtaacaaaataaaataaattattattattttatgtctgcaacaacagataaaacaaaaataataagttggaaagggaagaaaaaaagaaatatatgtataaagaaatatgtatttttatttacattatattttttttataaataagaatataatatatgtttgctttattaagttttgaaatatatatttatattataagtattagatttttaaattactatcttttacatcaaaatattaattgtatatataaacgtgtgaattggatcaaattagttagttctatatatattaattagcatccaatttgtacaagtgcgagattttctaattcaatctaattcgcactatagagattagattagattgagattttatgaactccaaatatttatgttaacaaaaaaatcatatatacatataaataacgttagtaagagatatttgttcaaaaaaaaaattagtaagaaatatttcgttgaaaaaaagttttatttattattttcaaaaaaaataaaattaaaaaagatacaatattggtgctataacatgacaccgaacttgatagcataatacgaactcgatatgaaatattgcgacttaggctcaaacaaattagacacaagtcgaaattaagttgaactcgaataacacaataattatttggcttgggttaaggttaactcgtgtgacacgtagtcagcatgaatttactcgcttacatccaatatattattaagagtattgatttatagttaaattattatatttataggaatacacaacagtatatttttatttattgtattgatatttaggatacactatttaattaatcattattattatttataattttatatatttttattaagtatatcatttaaatgagtcaacgatataatcaaatatgagatactaatcatgttgattaccatctaacgtaaataagtataattgataaatcaacacgtgaacatgacaggtcgagttagggttgatcaataaaatatatcaacctgcataacacgaacacaaatttgatatggaaacacgaattgccatctctaatctttacaaaataaattaaccatgtgataatcttgaaagtaatagtaggctcacaaagtaatttggtagatgaaaaaatattatttggaaatttacggataatagatttcttttttgaaattagtttttatgtattttgttcacaccatttgaatcaggaatatctttggggcgtatattaattgaaaataaaaatactgaaaagaaaagataagactaaaacctcttgactacttatagtcctagcataggtgtttaacattctaggacctcaggacctttgttccatctagtcgtttcaattgatacatttctagacatacttcattttggatcccgtaaaatcctctaaagttaagtcttagcaccctgactttcgaatcttgggttgcaggaaaaactcttctcaaaacgaggacttttgacttttgagttgaaacgttaggcgaattttcctttatacatttttagttaaacttgtgatgcttcttggagctcttcgacgaggtctagagactcctggagtaaagcatggttcatgattgcatcgtatgtatctcgccagtgagataagactgtggtgtccactagaatgacaaccttacaccataaatcgttgaagacgatgtatcttttgcttaagtcctctctttggttcagtatgccaagagtacacgggacaattttactggccattgcattgagatttttcttcaacatttcttttaatattttgttcacacccttcaactgtctattagcttgtggtcttgcaactacaaagaagctcttgacaattttgtgtctttcataaaattaggtgaagtggatactaccaaattgcttcccgttgttagaaaatattttttgtgagaggttgtaaccacatacgataatttcaatgacaaagtctaaagccttctcagaggtgatggtgttaattggccccacctctacccacttggcgtagttgacaactgcaatgacgtattttagcccacccttcctgagcggaagggttcctacaaaatcgtttccttagatagaaggctaggaactagtcattgttgtccaagaaaaccctcgttgtttaatctctataaaattcctcgtgcattttatgaatttttgcacttatttcggtcctggctatgcatcagaggtatggcacgaacaacccatgtgatacaattttttgtccatcacaacgtgccaaggcacctgatactacatcttcttgttgcaaccctttttgtggacaattccgcaatacctacgtacttgacgattggtcacatctagaggtgaagtaatcaaagacacttgttgtttcaggggctttgatatttggcacgggtagaaagtcaatccaaatgatgtcagaaatttttgcttctgtatctgtggtcagctttgccaaactgtccgcgaataaattttgatcctatggtacttgatggatgatgtatctcttgaaggagcggagaaattctcagcttcgtgccatgtagtcagccatattatctctcttcatttgatattctctcaaggttgccaatcttaggtccaatctcaccagcatagacacaaggtcccactcctgtgccagtaatttcagttgtttgctggacaatgggtccagcaggaacttactctcttggctggaccttcgtggtggaagtttcggacagctgaccaaacgtggtggtcggctagccaagtttggattggccacggtaggtggcacttagacattagggtccacgaccatagggtctcgtggttcagtcgaattttcacgtcttgtgaaatccattaagaatatgagagcttcttgaatgaaaattctggactctcaatgaaagtaccaaaatatttattgtggatttagccaattgatgttgagtctgactaggatcgaatctcgcttatgactgtcacgtgcatgataaggatagatgtaaaagacacagatttatagaggttcaaccgtttttgtttaggtaatgacctactccgatccctttt

SEQ ID NO: 296538 - DNA, 2872 bp, Cannabis indica
atttagttactaatatagtgattagttactatattttatatatttatttaattagttaatattcatttttagaaattttgttaattgaattatattactatgcaataactaattagctttcaaaataacaaaaacgtatataaaataattaatatataaaattagtcgcttgttatattacatgataactcattagtttcgaaaataatttttaaggtttcctaagtgtattttaaattataatctacaatacaataacttaaaaataactaattaattactaagatgtatacaaataagttttaaaggtaaccaaaatgtatctcaaattatatgatataataattatataaaggtaactaattaatttcttatcaacactattaataaccaaaaagttacttttaaaaatgtagaaaaaaaactgaaaaatgtcaaataatgttagatttgactaacgtggcacgtcagtaatagaagtaatattattattgtaaattaaatgcagaaaaatgtatattattaaaaaattcccaattaaatagtagtttataattgcactcaagttctatctattttattaataagtatcaattcttttgttttatgatagtaataccaaatttttgctaatttttaacaataaactgttatccgtgtttccagacaacgagagacatgtagcatgtagagataattgtcgtttaaacttaggcctaagcctttccatgtgaggaaacctagccccgacttaggatgggcctgagcccatcgaatattcaaaggcttcgcctccaaagataccgtccttccatacccagaagcccttccaaccttttcgagaaatggaacagacgaagccctctgggtgaatattgggacacatccgaaggggaacaacaagggacactcccagatgtcagccacaggaggaccctcgaaagcctactacaagacgaatgtcaaatgcctataaaaagatgacgtggtcacctttctcatagaatcaaatattggccccagtgtcaagacatggtagtgcgcacaccaccaaaagtatacatcgttttatccaatagcgcctctaacattcttgtctgcaggattggcctccgtgtgacatgtgtcctgaattaaacggtcccctatctacatggatcctttgccccacgtgctgaatacctgctagtgggcctcaaactcatgtattatgtgtatttaccccattagtgggcctatctttacatagaaacctgaatggatcacgggtgtgcctggattatagctttgaaagacattagcagacatatacaaaattttatagtcgcgagctttgaaagacaacgcacttagtgtttctacgaccttcaacttttatgtagttagttttgcgcgagctagccttgctgtgagtaaggaagatgttataaagatcattaataaatgaatacaagcataagaataagcatcctactaggacaacagttaaactctattctaatccctggcatattggccgcataaaatcatttcaatttccaatcgcccatataaaaaatcacgccttcaacaccatttatctttgctttagcccacttgataaagcagtaaaaatgttgttgttaccaatgttcttgatatcttagaagaaactaaaatcctcaactgtaggatcagcgtatctgtattctttatacatcgcaaaaaatttcgagatgattctatagttgtttggagttagttggaaatgcgcgacgtcgtaataatttaagatggatttgatgaaggggtggaaaggaattttgactttagtatgaaggatgggaatcgagacaaccacgacgtttgtcttgataatcttggggttggtgaaaggaaggtgaggttgttacctttgtactgcctcatgtaaccagttaaaataagttttagtttctcaaaggaagcttagtctgattgcctcatcctagaaacaaggtcctcacaggagaacaactcatccaaaggtgcgtcttcatcatcagaaaatcctacttctacatcttcctcctccacatcgtcttctccccgagcaggtaattcgatatcttgctcaacttcttcaacctcatcgtcaaataaggtcatcacattgataaagctacctcgggtagagatagtcgactcactcccttgtatttcaaccaccatgggttcttgcaactccctgaccatgttagatatatcattcatggacatcgaggcttgaccttcatcggcatggtaatcaaagagcaattttgggaggaagttattgttgttttagagctcgtcgtcgaagtcacctccatgagattgaaactcttggctgtctgagagatctctcatttgaaagatagaagatctttttagcgtgccatgtgtgcaatttaaaaagagtgttctcaatcgtgtgttattagtaagttaacctctaatattattaaggcttttttctagttagaaattactacaggtaaaaaaggcgattattcatggactgttaaaagtgaaatcctacatacatgtgtgatcatttaaagcattctactgcctattgtgaacattcaaactgttctaacaaaaaacatgcgatcattcataaatttcatgaagaagatgggaatattttatgtaaagctaaaattcttccagaaaaattacccatttcatttcatctaaagccaaactcccattacctaaaatacaacctttattttatgtaatttatccgataaacctagaatgcatacaattatcagaaagttcttacaaaaaattgagaaataaagaaaacaagcctttagaatttgaaagactattttcgtttcctgaagaaagatataaatactag

SEQ ID NO: 296539 - DNA, 2346 bp, Cannabis indica
tttaaatcaaaatctattgaaagcctttccttaggtcaaaataatttcatggccagattccaagctcactttttcaactagagaaactgaaaattctatatctctcaaccaatcaattgtatggtgttttggagttgaacaagttctcaatgttgaaaaatcttgaaattcttgatctttcttataacaatttctcattgagttcaaataaaaatgttgatggtaataatctctttcctcaacttttgtatttgagtttggcttcgtgcaattttcatgcctttccaaattttttgaaaaacatgaaaaaattgaagagattagaactttccaacaatcaaattcatgggagaattcctgaatggttatggtctcaaggcccaacttcattgtcacatttaaatatttcctacaactttttaacacatgtagagaaaattccatttccaaacttatcatttttagatcttcgctctaatatgatacaaggaaatcttccaaatgttccactttcattacaagtttttttcatatccaacaatcatttatatggagaaataccttcttcatattgcaacttgagtaagatttacatccttgatctctcaaataatagtattcaaggaaaaattccttcatgtcttggaaataaatcttacctttctgtattggatttggatatgaatgagttgagtggtgaaattcctaatgacatgtttgaaaattcaattggcttgaggagtttgcaccttaatgggaatcaactagaaggagccctaccacaatcattgtacaattgcaaaaatttggaggttttagatgtgggaagaaacatgataaatgataccttccctcaatggttggaagatctttcaatgcttcaagttcttgtgttgaattccaatagatttcatggttctatagggtcacctaaagttaaatctccttttcaaaagttgaaaatcatggatctatctaacaatggattcattggtgtgttaccagcaaagtattttgaaagtttgacggctatgatgaatgaacatgtcgtcaataaagtgacacgattaggagatacgaattacctaaattctgtgattgtggtaatgaaaggtattgaacgttcactcgaaaaaatcataaatattttcacaacaattgatttctcaagaaatgatttcgagggagaaattcctgcgtccattggaaagctaaaagcattgaaagggctcaacttttcccaaaacaaactaaagggatccattccaacctcgttgacacatttgagtaatctcgaatggttagatctgtcttcaaatgatttaataggaaaaattcctagtgatttgtcaaatttgacacaactttcattcttaaacctttcgcataacaaattagtgggcccaatacctagtggaaaccaatttgatacattcgaaaatgattcatatagtggaaacttgggattatgtgggtttcctctatctaattcatgcaagaaggtgacacaaaaaggtgatcatgatagtgataaacatgatgaggatcatgtaaacctatttgattggaagattgtgacgatgggctatggatgtggaatgatgatcggaatatattttggatacataatgcttttcagtacaaggtttgaatattcttggcttaggagaaaaattgaaagaggatgggtggaacaaataagtcaaagacaaaattgtaaaacaaatgcaagcttgagaaggagctagaataccatgatcaaagaaagaggtgacatatatatggtaagcatcgaaaactaactaattttattttatttgctatgaaattaggtttaggtttatttagttttggtgtgttaatttagtttattaactttgttgtttggattaatttaataattatatggtcataagttagaatcatatataatttaggaattttgtttgctaaataaataatttgagtaaagtatattttataaacataataatttagatatactttcactaccataataatttagttaggcacttataaaatgtactcgtttggcacattttttagaaaaactaaaagttattttttataaaagttgtaataaaaaagtattggtaaacagttaaaaaataacttattaaaaaatttataaaaatgctatatctaaaaattaaaactggtacaatcaaacttttagaaaaaactatttaaaagactctataataaataatttttaaaaaaaattaaaatttatttagtttttttttttttgtaaaataagtgggtaaatacaattttggaccctgtgttttacaaaagttgccgattggaccttctgttttgtta

SEQ ID NO: 296540 - DNA, 3377 bp, Cannabis indica
aacaacaccacaacacaactaagaaaatcaatgtaagaccaattaagtagagggatcaaatcacctgttgaagaaaatcaatgtaatgtagggctccatgtatgaactgggtgccaccaccaggaaaggtcaagaattctcctgtcaccttcacccaattttggtgccctttcacttctgccagcaacgtgtgtggtacgttatggtaccatatctgcatgcatgcatgctcacattatataactcaacacaaattcaaatatgtatataaaggtttcaaatttagtagtaattgaagaataatcgtttcctcttttatacttgtgttatattattattgttgtatgtttaaaacatgaaagtgtggtagagaaagcagagaataggttgtcagcaatgagatgagtagttcatgtatcttatacatatatggtaagatgatatgagtattaccttgtctctgcttgttggccattcgatgggtctcttgtaaccctccgggacaggaacgagacacatcggaccttcctcagggcaatgcctctcacggtgctcgaaatgcctggtcgaacgcagtttcttaaccgctttctcgttatccaaacaaggtatataatcagctcctgcagttacgttacaaagttgccacgtgtaaccatacatctcatcaggaccgtccgattcatccttcctcctctccttctcattctccgactgagccgcctgagtagaccacgacttcttcgactccttagattccttaggaatccctgaactgtccccacccggaaaagactccacagttccagaattcgacccaccattatcatcatgcttctgagtttgttgttgttgttgttgttgttgttgttgttgttgttgtactactacatcttggttggtcacgtcactaaattcttgctctgttgatggatcgtcgtttttctcagtatttgtcgttttggggtcgttttgtgttgttgtagtagcagtattattattctcaatctgaggctctgtttcaatgttctctacattgctctgttgctcttgttgttgttgggtttgttgtcgtttttcttcttcaacattattgttattgtcgttggactcgtcctcttgtcgttgctctctattcttttcttgatctaattcttctactttcgaattagtaacattgttgttgggttcagtcaaagtcaaatgtgttatttctgcagataccttagttgtcgtttgctgatctggtttaggtagatcgtcgtttttaatagcctcataaggaagatcaccaggattatcttcaaacgacgtcgtagtagcagtagtagtaatagtttctggcttgttcactgattgaacttcttctgtattaagattcgattcgggtttagattgaacttcttcggaatcagagttggaattcgattcggaatcagtggtggcggtgcgagtggtggcttgtggtggaataacagaattagaagtgagaatccaaacgcctagaaaacagagtcctacgaagaccaccattgttatggtggaggcgtaagaggacgatgatgatgacctcttgttactacgtgatttgctctgtaatggcattgttgttattagtaatttcaatgcatgtaatgaaaaaaacagagttttggtgatgatgattgtgattatgtgaaattgattggaaaatataaagagaagattatgggaaatgtttgtggatgaagatgaatggggacaaattcaaggtggaatgttacatgatccaatggagtcggattagggaatttgttccaaaattattatacacacacgagacgagaccatatttctctttcttttcttttggtttaaaaattgacagatatttacgtatgtaatataaaacgataagattatatacctaattaacaactaaaattattaaatttataattgtttttttacgtaagttataataatgtattgttgattacagttagggttattaattagttagtttttttttttttttttggatccgtgcattatttacataatcttgagttttagggaaattttatggtgcacctgtaaaaataagtgtactgatacactattttttaatatttttttttgaaaaatttataataatttaacaaacaagaaccaggtttacaccgtttgttatacaatgtgtctttttatataattatacgcatatgaaatagattgtttaaaccatattttttctattgtaaataatattataccgattttttaaaatctactttgaaaataattataatatatgctatcatataaacaaaaaattaaaattataactcttcaaatataaaaaatatacatttatttttgagtacattgaacaccttttattatatgagcattgctattagacacgttaaggtgtttaatattaattatactaatgtggtacgttgtaattagttaattgttttctataatcaaaatatataggacttaataattgtactaataacagtataacacctcttgttaggttgtactttaacatctctcttttatcatttataatatatcatgaacttccttgaacatttgctttgtttatacgtaaatccactagtaataatattattatatacattagtaatcaaactgttgaaatacaaagaaggttgaaaatgttgttaatttgtcataataaagaaataaatggtcaaaaacgattgagcccgatgtcgtttttgtacgttcttgtcgtttactattgaagtcgtctttaagtttagtgtcgttctaagaaagttatttatttattagtagagagagagagagagaaaggagaagattgataggtttgagtaattaagtaggagggtaggaaaaacatatatgcttttggtattgattgaaatttgatgtgatgacaaaaacaaaacacaacacaaaagaacaaagaagagtaaataggttgtgttgaaggatcataataaaaatatatacaggagggcccattgagatttttgtaggccgaacttaatggaccataaaaatactgggaccgatcgaccttagcatggtgccaaaatgttgggtttggtccagacatacctcacactactctgacacattcaaatgtctcctcactactggacctatctctaactcgaatcccattttataataacaatacataaatttatatggtatactaacttttgtcatttcttttacaaaaataactgtcagacggtatttttttttactttttacttgtgtttttttataagtttcatattgcagtatactttgttaagttttctactggtgttctactgatgtttttttagtttctactgttgttttgaattgttctgttttgtgtt

SEQ ID NO: 296541 - DNA, 4072 bp, Cannabis indica
aaatgtttaatgggccgacccatgtatttttgtttttccctttttgtaattttctgttatgtgtatatcttttttcataattttacttatttcatttaatattgtaaaattatactctttatttatgttctttattatttttatgaatgtctgtttttgtttctattaattagctatttaaagagttttattttactagtttttgcattattttttgatggttttgatgtcttttatacgacttttgtactttttatggtttttgtgtcattttttagagcttgttcctatttgtttagggtagttttgtggtatggtcaatggacaagagaagtgatccattttatgatcttgatttctactttcacaattttttttacttttaacaaataagtatttctaatctttttaagtctttatatctagtatgaattgatttaccatcattttttcacgttatttgttttcattatattgtaatagaggtttatttttattaatttgtaaattattttgtggaggatctataattacaaaaatttaccaataagttaaattttaaatgtaatatcttttatattaattttcagcagttttaaattaggtgctagttatacttagaaatgtttgttggttttttagtattttagtattgttgagctagtgatacctttcgctagttatccttaaaaattttgttggttttttagttttatttgtaatgttaagttagtgatttgggttgtgtgttaaattctaagtttgaattttaatttttattttaaagaattatttaaactttcaggagcagttttgtcccatgtgacttgcattatgaattctacagcttatggtttagcaaaacatctttttcggttagacgatgagctattttggttcgaagaggttctaccgctaattgtagtttgctatattattaattatgtgcgactctgtgaaccacgcaaaaaaaaaaaataaaaaatactctccatcttgccaccttttcgttcggtcatctccatatatccactatttcttttctccctcctccctaccatagtataatgtgtgaatattgtgctttttaagtatatgtatttatagtgacatattactagctcatcattctttcacttttttgaggcaatttatatattaactttgatgatgaggaccataactatacaatccgtgcgcgtcggtgtggatacatatatgcattatacccttctgtttttcttttcttttttttttttctgtgctgatatctcatttttattcatatatatataattatttatgtatatgttcgtcttcaaaagtggtcagcagactgcaggcagatcgaagatttattattaatttataataaacttttggctttgcttattagggcttggatatctaaagatcaaaaagtcttctacggccaagtagtactgctctctatttttaccatacacgctttattatcattccctgcaactataaattaattatatatgtatatgtatatatatacatatatatatatataaattactctatagttataaaacttgtatctagaagtgcatgtcttgtgtggatataatcatataaatatatattacatgaacatgagagtgaggcctatatatttatcgtatatatattcatgtatatacatataaacaaacttgtacctttactaagtacatatattattatcatataataccttttgcgatttttctgtaatgtatttttcatgcaaaatataaaattaatataatggcactgttacagttgacacagtttgattttgatgaaacaaggatataattattctcaataattgaatcaacacaaacataaattcggctgttccttgaaatctgttataggttctactagctatatatgttataagtgattatttacataatattatacacttaatttataattaaaaattggaagtattcccctaaatatatatttatagatagttaataatctgcttgtttccgaaaaaaaatatattatgcatatttatattattatattattacaatggcgtactatagtttggagtagtagtgggtatatatgatcaaaatatattataatgatgattaattataggatcggagatttatattaattatacaatggtttactattatattatatatataaatatatatggtcacacaaatatatacaagaaaaagacattgcttgaaaatttcaaggagagaatctaactaaaggtttgcttttgtttatctcgaaatcttttttcattttatgggaaaagcttaataaatcagcctaagacaaccagagaactttttcaaaaataagattctttctaaactagctataaccaatcttattcgttattattttcctttctatatatacatatatatataccccaatgaaagggatcataggattggtttgatgattggggtgtgatatatacaaccaaacaaacggatcatacaaacaaataaaaaaggaacaataatgaacaaattataagacataaatatatacctaaaaaaaattaagtttagatccccaaagttgatcgtttggtgaaatcggtgccaactttttatatatatataatatatttatatatttatttatttataaatatatttcatataagatatatttgctttgtacaaagcaaagcaaaaggaaggggtagagaggaggggtagggagatttgctttgtgacaacaaattgtctatttcatgtaaggaaaagagatttctttggaaacctttagaccagattacaggatctattgtaacatcaatttctgcactcaactttttatttttatataccaatcaatttccatgcatggtctctggtattaatgtctcatcccacatttctactttgcttttttttttttttctaaatatttaaatttttaggaagaagaagaataaatgaatgattgttatttaaaaaaaaaaaaaaactgattcggtttagttaaaaataaataaatatcaaacacttatcaatgagtaatatttttaaataaatttaactataaatattaattttaaaaataataaattattaaatattaattcagtaaataataaaataaaaattcaaatttttatgtttaattcaactacttaatagaaagacatcaaaagatattttcttttatactattttacaaatatatttatataaaaaatatttaatttaaattcaatttgtttaacaaatagaataatcttaactcatatatagtaaaaaataaaataaaaatataattaaataaaagtttaaacataaaaatttaaattttattaatattatttatttataagtaatatttattaaaagtgcatatatataaatatatatttatatatataagatatcgtacttaattttgggatttggaatgtggactaagttgtgatcaatgttatagtatcatggtccatggtcatgttgttatttatttgttatttatttatttaattttttttttttaaatcggtcatgttgttatcttttccttttattatactttacatgtggctttcatatatatataataagacaatataacaatattcaatatgatcccttggggttttggctcttagcttgcttgatctaataacccttatcacaaatgagcatacttattgttaattttgatggagccatgggaattgggtgaataaaaagtagggaatcttgtcattgcatatctcggtgtgttgtatttgagtgttttataaaactagcaaataaaccgcgcttcgcgtgccgttgtattttgcggttgttttttgtttagagttcattaagtcataataataaattaaatttcaaattttagtatttttaatataatttcttttaagaatatgaataataattctacaatattttttacgtagaaaaacaaattgatattgtagaaaaattattatacaatttcttatcttaaaatgaaagttaaaaagaggtattttcaaaagttataattaaaaaaaattaaaaattgaagaatcttcatataaaat

SEQ ID NO: 296542 - DNA, 1483 bp, Cannabis indica
taaaaacacaaataattttacatgcatcatttaatttttttttctttatatatgtgtaggcacaatataccacaaactaatatcaatccaattaagatggggtggtcaccatggtttatgatcatgtttctaattaaccttgtattacttgattcctctactcctttagtaccttctgatcagttgtgtcatctatttgagaaatctgctttgcttcaattcaacaactccctttccttagatctagaatactcagatatagccgatttgaagactgcctcttggaagaatgacactgattgttgttcatcatgggacggagtgttgtgtgattctatttcgggtcatgtaattggccttaacttgagttttaactaccttcaaggctctcttcattccaatagcacccttttctcacttcgccatctccaatctttaatcctcgacgacattaatttcaacggctctcccatccctcctcattttggtggttttgccaacttggaaacgcttagccttgataataccaatttctccggtaatgtaccaacacaactctctcacctctctaaactcactcatttcatattttcttctagaaatagtatttttttggaggcgtatgtcttgcaaagaatgcttcgaaatttcaccaatcttgagaaactcgatttgtatcttgttaacatgtctaatgttccactagatcataacttttttgctaatgcatctttgtctttgatgtttcttggtcttactcattgtgaattgcgaggaaaatttcccgaaaatgtctttcgcttaccaaatcttcagtacctcgatttatggaacaacaatgatttgagtggttctttgcctacatttaattggagcaccccactcaggcacttagttctttcacacacaaaaatctctgttgatttctcattcttgtgtacaagtgctaagtcattgcaagttttatctctaagaaattgtagttttataggaaccccatatcctgcaatgttgactaatctcactcaattagtacaactcacttctttatctttgcatttcaacaattttggaggtcaaatcccattgttttatcttaatcttcaacaactcatcgaattagatctttcgggtaacaattttgttggtgaaattcctcaaatcttagaaacaaaaaattccaccctaccaaacaatttagaaattcttaacttttctgaaaacttactcagtggatcaataccttcttggatttattctcttccatttttacggcagttaatattaaattctaataatattactgccccaattggagaatttaaatcaaaatctattgaaatcatttccttaggtcaaaataaatttcatggccagattccaagctcaatttttcaactagagaaactgaaaattctatatctcttattgtggacaatgtcccacattgaataaatggtagagaattgagccatatataaga

SEQ ID NO: 296543 - DNA, 3858 bp, Cannabis indica
taataagtttaaaaggcagctcagaaatttcaacatagttgttgagtataacttcactatatcaatgaagtaatccaaaaggatcgagtataattttataaccaacaagatctggaaagaagcatgagattgatttgtttcacgtgttttggtttatgcagtaagagattatactagaaaagattaatccacttggtattgaacatatagtcccctagtaccttttcttaaatttattgaataatctatccatatttctcagaatttattgttggcaaacaatcaatttgttatttttatttgttttttcataatccaatcaaatactatcctaccctaacccatcctattctatctcaaggtaccatagttaccatgccagaaagcattagcaaagcagattgcagtaagctcccatcaagaggtcctcagtcaaggaaaaatgcccttgggtagtaattagggaaatatcacatagaatctgactacttgtataactagcatgcaatctagctttatttaaatattccgaaaattcatgtttttattacagcatttaaatggctgttgtcacctaagtagatacaagaatctacatactagattgaagtgaaggactacttcgtagttatttcaaacatattgaaaacaagcataaatagtttatggacaaggttaattacacatttaaacatcacttacgaataaccaattgcctgtttgatgatagtgaatagtcttatcctcactgagtcatatgcacttaaaaaaccactgtgaacctgaaattacttattcactatcagtacatacaaagatatttactgttggaatttatgaaattgtaactcaaatttcaataaattcttacttgaacttcttgcttgaagtctccacctattctttcagggttaagcctataaaatacacagaaattataattttggtatcaaaataataaaaacatattaacaattaaaaggacatctcaaacttaaatgtattaatgtgatgaaatgataatgaaaaactaacaagaaatggtggagcacttgaatacttatgcttatatttctaggtggagcacttgaatactcatatggtgtgttctacacaagtatgaaatgaagagaactatatgggaaattaaatactgtactactacacattcagccactacattatttatgagtaagctggaagctattagtatagcacataaagcatctccattgaaggaatatctaccaactggcaaagaccaactctcagaaatgcaaggcagaaaaagaaaagacaaaacttttgaaaaagagtaccataaaattataactaacagatattaccctgtaggtgctaccattaaatctgttttcaagtccttccattttgcctgcaaaatcaaataaattagaatacttgaaccgaaagcaatatatacaaactccatacaagcagcaacattggacttacctgctctgttcctctaaaagcaacaaccaatcttctcctcgaaggatctcgccaaattgccacctgcggcttaccataatttagtgatccatcgaatataatctctgtgatcaattacttggtttttcttacagatgaattaaacaatcaaggctaacatattccttcatattctagaaagtaataatcaagaataaaaactccttacaaaaagaaacattacctctgtgtctgttgtttcattgtctaagaaacatatcttctcaaattcagacttaataaagcttggttgacctaaagaagtagcaagcattgcccaagcctctatggcactctctgcagttgaaaatagctctctcatctcctcagcctttttttcatccaggacaggcccatctcgtgaagcaagcttctcattagatccagaaaaatcatcttctacatttgaagcatcttcttgttttgattcactcttttctgaaagatgtccttccttatttgcttcagaaattgctgcagtcaaaaccattaacgtccctaatacagattctgtttgctttaagagatcatttgttgccttttttatagctggaagagaagaacgaatggcgttcatatcaagcgagccattcgttgaatcaaggtcttcatctatgccttctggagttgcaagcccagattcaatgtaacttgcctctgctatcttttttgactgtaagccaatactgtttaacatgtcaaatccatcccactttaatttctctggggcttgaagaccaagtttctgaacaacactttgattgataacattagcaaagctcttccagaaatctttatctgattcctttgtctcaccaacttgatttactaattctggagcatatccattgtccgctccatcatcatttgtgttgagatcctctaaattgctactatcatggtccgcattatttgagggtccattggcacttttttcgatctgtggtgccatgtctgatacaagagcgtcttcgctagacatctcaatcacactttcctcattttcattgtctggaagtttatccttggtaagatatgcatcgttgaaggatttcatctgcccaaaagcataattaacaaactggcgggcttgaactgtttcagagccaacgattttcttcatagcagaatcaaaaccatttttacgaaaaaactctgaaagaaaagaaattctccaccatccttttcctcatcaatttcgtcaaagtctttatacttgacctgaaacctcacattgagcaaccacatagattgaatatcagtaaaactaaaacattggtggaacacaaaattgccaatttatgagcaccaaagacaaaggaatcagtctaattataaaaataaaaatccaaatgagagaaagaaagaaaattactaggaataattttcacttaaaaaacatagctaacacatgcaaaaccaaaagggccctgaacaacagtaattaatatatcttggaatcagtgaaagtaaaactttgcaatatgcatcacacttgaattatctgcttttcttctaatcttaggatctgaaggaaactttaaagggacattctacaattaacatgatgtgtagggatagcaaaggaattcattctaagatacctttttggattaaaaaaatgaaatatatcttacctctagttgtaactttccaccaccacccatcccctccagttccaccagtacttcatgcaactctcctaccagaacacatatttgtatattatcattttaattttagcaagaattaccgctagtgttaatctttcaacataaaatagcttgcttcctatacatgttcccacaattataaccttttaccagaacaaaacaaagtgtctgctattataacactactggaagacaccacatttgcatataaattttaacaaaaacaatcttgacaaatttgaagcataataataacttcaatttcttatggatgcataagaagattatacaacttgtaagtgatccactagaacttaccatcacataagcaatctaaattaatgcctgcattgcccatccgtttatgtggtgttacaagatttgcatcccaagctgcaacctaaaattcaaattcacacagcttaaaccaaagtaacataatagcttcaaactaaggatcttattcaaaaaattaatatataaatacattcatgcaactaacaatcaggtttcacaaagtcttctttctgaaggattttattcaaaaattaatataaatatatttttgaaagtacactcattatcagctgtaactttataattttcaagataacaactgaaaggaaatgtgtgtgtgtgtgtgtgtgtgtgtgtgtagagagagagagagaga

SEQ ID NO: 296544 - DNA, 3320 bp, Cannabis indica
ctttgtacatagaatagaataatagtacgagtagttgtttcttatgacctaattgtctatattctcgttcttcctcgtcctccccctcctactctctctctctctctctctctctctctctctctctctcctaattccacactaatgtaatgtatttttttgagttccaacaaatttcaacttgtgtatcggaagtattatcttttaatttgtaaaaaagaccccctttggaattctgatttagagaattcaatctaaatgtgatctttctcttgttaaaagaagtgttttgtgaatcagcaggtggggcagctaacgagaaactgccaacgtcaaatcccgaaattggtgctacatctcatgaaggaaagaagcgaagacgattagcattcgagggggacgaagaaaccagtttacagaatcagttgattgatgtgttggagaggaatggtaaggcagtggcttcccaccttgatgctcagaacactcatttccaactcgaccgagaacagaggaaaaaccattctgatagcttagtagctgttcttaacaagcttgcagatgcattggttagaatctctgagaagttgtagttgcagcagtcagaatctctgagaagttgtagtgtacataacacaagctcaccatttctctccgaggtgagtgaattctagtaagggcattcacatttcttctagtcttcttcttttacaatatatttttttatttatattacatgtcaccttctgtggcatattatcaccatgatagtgtccatacacagatactgatttttgcaagttataaaagggtttaccaatgaccacatttcttccgttaatatgtcaccacagtcgatagagaagtttcctttgtatgcctatgcgattgcacaggctattgacaatatattttgataaggcgactgatacagtttctggccaaattcattgctttcttaaaaagacttaataattcatttttgtcatcttctctcttccccgacttatgtatgcatactaatcgtgtgtgtgtgtaagagggagagagagagaggtaaccgtagcgtggggcctcttttctttcaaactgtttaagtatttcataatcaccaaagatctttaagcgttgaagttataatgtcataaagattttatgggccagttatgtctggtgtggtggtgagacaatctaaatgggcatatttaaattgtgaatgcatgtatattctataacgactaaaattggaaggtaaggtaatgtagggcttctccttttctcgcccaatttactcaaggattgagcttattcaacaaacctttttagtctttattcttttcttcaaagcaactggagtaaaggaagttttttttttgtaataaatattagaagacaaaatcgtggtcaagaatagtagcaacagaacgaccgatccattattgtcaccatatttaacaagaaacatatttcaacgattgtatatatttcaacaaacttgttgggtcaacaagcagaggtattcttatacataaccgtttaatgatccaataagtaaagctcgttgacattgttttatataacatgaaaaaaagttgctgagcaacaaaatgtaacatgcttcattcacccaacccagcaagcagtgtttttcttatcaagtatcagtcatctgaccttgacatttttcgatacctccgacctgcgttttggattgcaatgccttcatctgcagcctttatttcagtctcatcatcatcatcatcatcatcctcgactccactatttacactttggacttctgctattgcaatgccaactgggaattcaatttgtttgtcacctttcttgtgcttcacttcattgttgtcaatttctatgtctctactatcaccactagtcttttttttctttggaataaaagtcacagaatttggaagatcagctacaccaccagaactctccatatctgaccctgattctctattcaaactttcaacctcattatcattaacttcactagttgaagcaaagctataacatctgtacttagaggggtttactaaatagtcaggtactccaccacaagacttgttgttgttgttgttgttgttgtctgctgcatttttcggaaatgactcttctttgcattcattttcgaacccaacgtcgaacctaacccgtttaggtgacttcaaagcttcctcatgctcttttcttttcaaaatagagttaggcatagcttcaattttggtacactttgcatttgggtctgagactgagaccttgatatctacagaagaagccagactagaactaggggttttggattcagtttcagcttcatcttctttcagcctaagcttggcagctaggtgattggctcgtgggtcctttttgataccaagcacattgtcggaattcaaataagacccagtttcagtaacatctctcatatacaagcgatccccaacaccttctcttcctgaagctacttgtcaaactcatcttcctcttcctgaacccattttcaacagttcaaatataatttaaatcagaacccatatatgataatgacgttgaaactaatctaatgcaactgcttccttgcataaatccgttacaaataaataaacatattgtgatatttctttaattcataattcatatgatcatctaaaaataatggaaattttaattcaaaatctaaagaaaaactcacctcgtagtcgagggttcggtccatgccaatagaggatctgatattccattcttgttgaccaacatctgatttttcgtcgccttcttcatcagcgtcatcgattccctcccgatcgtcctcaaagtttcttcggcgcgaagctccccgatctttcttcaaaaacgcgtcgaaagacgaagaacaaggcatttcgtccttgccagaggtatcagcacagcgcctccactctttacgctcgacctcatcgccggtgatggaccagggagacgactgaagagatgaagaagaggaccgcactgaggcgagcgatccgaacaccttgtccactcgggctcggaagctttcatccatggagtttggaggattgtactgtataccttgttaggggaagcagtagcacaatctagcatatctcaccgcctcgccatctctttcttagtatctggatattgggccacacatattgggctcgttatttggacattttgtccattatgaaaagtgggcctattattgggcctaaagagaatgtgatggcttctttggattccccctaaaataaagggcattttacaaaaatactggatttggggtaatactt

SEQ ID NO: 296545 - DNA, 4896 bp, Cannabis indica
tacgaattacaaatcatactttttgttctttttaatcatttaattatttgtatgagaatattagtttgttaatgtgtttttcattttttttttaagttttcagatgtatggtgtttagattctgataagatataatgttgtacttaattaagttgtaataattaaaattgaattgctgaaaatttcatattatacacaactttttttaaacttgaatggagtgtttatttatttatttattttttttttttgaagaattgtaacattcattgataaaaatgaagtactatgggtggaagagaaccattccacactagtcccttatcaagccttaaagtttttttttatattcaatacaatgaggatcaacattattatttctaggaacaaagttaaccgagactttagggaattttgacaaggtattacaaatatttttcactaaatcagcaagagaagatagatcttgtttacaattccttattttattcacaagaatttttgagatgacattggcaataactttataaatagtggagcacaaaataataggacgaaaatctttgatatgggatgcattagaccttttgggaataaggacaacaagggtgttgttaatagaagctatgtccgcatcattattcaggatactaagaacagcattacaaaaatctacccctacaatattctaattcttttggtaaaaactagtattgaggccatcaaggccatgagccttatctctagagatattgaaaagagcagatttgaccttcttcgaagtaaaaagctcaaacaaaaataaaaattgactatcactaaccctcctatccactaccgaaagaatattatgaacattgtctattttaacagtttgggtacagaataagtaagcataatagcacttaatctcagactgcaaatctgaacaggaagatatcactttaccatcactaagagtgagtgatctgatatggttattccttttcctcgtagaggctttgctatgaaagaacctagtattcttgtccccagcttgaagccagtgaattttagatctatgtttctaaaaaagtttctgcttatacatcaagctatctaattgggattgcaaattcctagcattagtgaggtcctcattagaaagggaaagattagagtagagagaggtgaggatatcatcaatatgtttacttctaaaattaaagttatctaccgaatgcctttaggtcttaatagagctgatacaataagtttatttggaaataagcttatctaaggggttaacaacattgctccccggggcattagactaagagttagtaacagtatgaaaaaaagaaggctcggtaagccagtgattctcaaaaacaaatctccttttatgcttattattcatacaatcatcattaagaataagattcaacactctatggtcaaaaccataaaaactctgatgctgaagggtagcattaggaaagagattaaaccagtttttgaaagaaatggcccaatcaagagactcgaaagatgagacatgcttccaagtaaaacgattaccaacaaaatgaatcggctgaagatcaaatttagaaacaaaattttgaaatagagtaatagcataattggggggattcaaactgctcattctatcatccattgaaaggtaatcattaaaattaccaataataagccaaggaagtaaaggcgcattatcaaaaagcctattagttaaagtccaagtatgacacttttcatacaagtaaggggaaccgtaaaagtaagaaacacgacaagtaacattcatattaaactttataatgtagtctatatggttaagagagaaatttaaaatattaacattgatatcctctttccaaaataacaaaagacccctcaccctccccccccccccccaaaatctttcctaagaatctcaaaggcatgatcaaaaaacaacttagttctcagcctttcacaactaccagacttaagttttgattcataacaaacaaaaataaaggcttatttttatttacaataagggagaggcttcagaatgctcggggattccccaatccacgagcattctagcttaagagactcatttttttaggcggggttgctcaactacacccgcctgttcactagaagtagtaacatcagaagagctcacaacagcaacagaattagcacaggctcttttaagcattttcctcacaaaatcacccaccaacatagaatgagagctaaacgcaaacctcttttcccctaggatagcctttcctttagcattcaaggaaaaggtcgtggactgaaccctagcatgaggaacaaacatgttcatagcttgactagaatcgacaacatccaaggaaagaacaagaggaagtgaggagactgcattcactgacagattggaagagaaaccataaccaacctccataagagataaggtaacatcctctctcaaactattagacatattgagcttagaggtttcatatctcacgctattagttccttgcatagtgttaacagtgttaggaatgaattctccagcatcagaagcaatcaaaatgggggtaactgagtgaccagcatccgtgtccttagtggtaaggaattgactaaccgcttcaaccaaagatagatcacgattagtttaagtggaaggaatctcctcaaggggcaccgagtttgttaagtcaaatgggttgcgtttaaacaaagacttggcaagagctttcaaaagtatattgtagggaagatgaggtgggtaagcatggtcatcacacttcttcaagtaatagacacacttagcgatagtgtgatcaaataaaccacagtgatagcaaatatttggaagattttcatacttgaaattgagccatttctcacgggaaatgctcttaaaatccacagtgatacccctcctaatgggcttggagatatctattagcactctgactcgaaggaaaaggttagaaacattaagaatagttttcgggtcaacctcaaggaaatttccaacctcatcaccaataagcttatcaagcttgtaagatttttccgaaaaggaatagagtgggcttggatccaaaaaggggagtaccgaagttggtcagggaaaagggcatcaaggccctcaagattagcacatgttataagacagtgatcaaaatgccatggttaaccctcaagaacacgtttcatatctccctcacaaccaaactaaaccataaacattcctgagccataattcaagaaagtaagaggagctctaacaatctaagcattcctcatagcatccttaaaccattccagtttgataactctaggagtgaacacacaaaagataagacaaaattttttattgctatggttaacaacaaggttgtcttctataaactcatgggtggtcgactcacactcagtaaggttgaggttttgagagaaggattgagtaatggaatccataagacagagagaacttaaaaccacacaaaacaacagttcagaggaagaaacaagataaaaggaagtaaacagaagtaatgatatgtacaacacccaacactttaaatagattaaaggaagaacatacctcttatgaagagcctttgtgggaaagctaatagggttacaatccatccatctcttcacaccattaatgaaatctctgtagcttgtaggcataatcatcaccttcacccagaaatgagccggcaacaccattaggaaagtccagtactaggctcccaaatatgtaatcatggatggaaagctataccggagagagttatcgattccatatcttaggtgcatagccggaaccgagataagtgttgtcatgcacgaaattcacgaaagattttgtagagatcacacatccagacccaatctttccaagaagatcatttgttaaggctatttttggcctaccatgaagaatgattgctttgagtacgtctacaaatgtgagaaatggcaacgctattcaaaagtttaaagggctctaccaatagagataaccctcatgaactgtccttggccctttgcagtatggggaataaacctagtgggatcacttacaatcggcaaaggaggagtcaaatttgtcaaatttctcctcgagggtctttcttggaaaattggctcgggcccctcagtacatatcactgattcttggttgccaggatataccaacttcaaaccactccatgtcaacaatgttgatcataatttgcgtgtttttgatcttatttcatcagaccgcacctggaacattacatcccttaaacgacacttcctcaacattgacattgaccgtattttgcagctacctttatgctaatatccacctaaagacaagcttatttggcatcacacttcgtcaggtatatatacggttaagagtgggtatcacttagccacttcactcagggaaactagatcaccttcacactcccagttgccaaccacttggtggaattgtttttggaagcttaagttgcctcgcaaagtcaaaattttcccttggcgtgtaatccataatgctctacttcttgctgccaatctccatcacagacacatcattgaagacccttcctgctctcgatgtactcaccacaccgaaaccttcaaccacacattctttctatgcagagcagtgaagaacatctagtaccagcttccctttcatatggattttacagtattaccacaatcaagcaacagtgatttcctccatcttattttctctcgccttgacgatgatcaacttgagactgtacttaatctcatgtggtttgttaattccatttttggcatatttatttgacaaaaatattttattattctttgtatatttcggctggcatatattgatatggt

SEQ ID NO: 296546 - DNA, 3562 bp, Cannabis indica
cttgaattttttgtggggctaaataataggtgatagacatgataaaaactcatgccacaacatcgacttgtcttcttgtcaatcgtgcatacaggccatccttgtgaagaagctccttgtgattgcccatctgtatgtgaagccacaacagaattaagccaattttttgaaaatgaaaaaacttattttcaaaataataataataataaagaaggatagagaaacaaacctcgactactttaccgctatccattactattatccgatccgcagcttgtatagttgaaagcctgtagatttgggtgtggagttgagaggaaatgtaagcaaaaattaggacacaaaatagattattaaaaacatacctgtgagctataattatgacagtcctctttgatgccatgtcacttctcatggagcgaagaacaccctaaaatacatttgcaggtaggaattagtagtgaaaagaaaatgtggaaggtcacatactaaatatgactggtctcttttgccaagttagtattgtaccttgacattgtgctcactttctgcatcgagtgcactggtagcttcatcaaggattaatatggatgggtccctaagaactgctcgcgctatggctattcgctgcttttgccccccacttagtaaatcatcatcaactaatgttttgtaaccatttggtagtgctgaaataaaatcatgtgcatatgcctgcttcgcagccaattcaatgtcctcctgtgttacatttcttgtacatccatatcgaatgtttgaactgatatccatacggaatagtttgggttcctgttaaggtcttgctgtaagataacagcgagatgccaaataataaaattccattaatgctggaagcaaaatacaaacctgtcccacatatccaattctttccctccaccacttgacatccaactttcgcagggaaataccatcaattaaaatctgcggttaaaatagcataaatactaataattatctacacaagctgaattaaaatgcataaaaatatagatagtggttgatgatcatccttctcatactctacattgaggtctcgcattaggccatagttgcaaaattttatctcattaaattaaaggaaggaaacttgagaattatatattgtaataactagcagagctcttgactcctcttttttttatttaaatactccatatatatatataggtatatcacgatctgcactgcacagaatctttatgcggaccaatattaatttatttgtttgaaaatcatacaaatttgctcatgtaccagggaccagattcatatgccagaaataacttcatacattctttttgatattataggcgtacagggcccgaacaaaaattacctcaccacttgttggctcataaagacggagcaaaagattcaccagagtgcttttcccacttccactaagaccaacctaataaattgtggacaagcagtcagtgcttatagtcagcaaagaagcacgtgacattgacaatgtacccagagaatatgcattttcttaccaatgcaatcacttcattaggtttgactgatatgttgacatgttgtagtacaggaacctattcaaacaacagtttgttagttctttcaccataagaatcattaaggttgtgtttggaagttggattttagtgggaaaaaaaagttagaaaaatgtagggaaagaaaagtgtggatgtggaatataaaaaaaaaaaaaatcaatatttaatgtttagtatggaaaattgattttattttgatttttattctccacacttcttttctcctacatttttcctacctttctcttttcccaccaaaatccaacttccaaacatagcctagaaaaaaattcacaatcatacatcaaagatggaatcagcttgccagtaacactatcatgttcaaacaaaccatgctattacttgcaaaggtatgatcttatcaaattatgttctaagcccgccccagtaaactagctctaaagtgataaaaatataataatcattgcaacagaaagaatatgcttagggaggaaaagagcaaagtcgttactaattgctcccaataaaatattccaatcacttcaatagaatgttgatggaccagaggtttagaaagaaacagtcaagactcaactccagcttaataattgcaatctaccagcattcacgcacttcattttggtggtaaaacatttgcaacgacatcaaaagtatgtgacaaatcaaaattaagatagtgtaattttcttctagtactaaggcaggaaaattaccgttggccttgaagcgtaatgaaaagatacatttgtaaaatcaatacacccgattagcttttccagcgttacacctgtattgttttgtttattaaaccaaataaatcatagaatattttcaatgaaagaaaatatatgcacacacacacacaaaatgtctctgtcttggccaagtagatgttcatatatcaagaaagaatggaaaacaggtaattcaaagtaacatgtctaacaggtaagaggtgaaatatccacaaaggtagaatcacattctggacaaaagttaacgaaaagaagaacaaagataaaaagagaaatcaaagaaaacaatgaagttataagttcaagatgaaattatataactgcaagagaatttgcgatgagtttacaaattggttaccttcagatataaattggtcactaggtgatagatccatcaactggaagactttttcacttgcaccaacagattgcatcaaagaagatagattatcacccacccaccatgttgaataaatcaaccattcgctgtataatataaactttgtaagttgctctgctgtaatatgaccagctagaatagacatgcctcctaccagcacagcaataacctataaaattaagtttattcagttaaaatttaaaagatgagtcaactgctataaatttcagatttcaaaccaattttcagcaaagaacaacgggttcccatgataccgcattttggtcctaagacatcacagtgtcacactgtttcatcagaactgtcctcttgtgagtgtatttttacaaagcttgtttctattgaaggtgctcttcctccatcttatgagtctatttggaaataaagtgctcctataaagattaaattctttagttggccgctggttttggacaagctgaacatcaaaaggttctacaaggtgtaaaccatcgtttacaatgtctccaacttagtgttttctatatactaattttggcctcacaattgttgagtgtcaacatttctcaggaaggtttggggtttaatggcactgacggaataaagaagaagctgtggaatgttactgctttgattgtttattggttattatgactaggagaagcccggatacagaaacactctagaatatgattaaataccagctcaccctttggatccttgcaattctagttcaatttctgaataatgtagcgattggattacgcggatgaagctaagatgataccttgccatcatctgtagtctttttacatcat

SEQ ID NO: 296547 - DNA, 3244 bp, Cannabis indica
cttctgcacaattcgcattttttgattttttgatttttgttatttttgtatatttttaaataatctctattttgatttaataaatattatagaatatatcataaaacaaatatgagaaacaaacctcgtacccacttgttcaaacataaaacaaagattattatgagaaacaaattcctcgtacccactttttgtaaacaaaaacaaaaaaacaaactcttttatacatataaaaatatacaaaaagaagaagaagaaatctgatttttatttgtatgaaatataaaattgaaaaagaaaaaaaaaatagaaagagaaagtaataattagaagattcataccatgttcttagtactaaatgttggcatgaacactttgaaaaactcatgacaatcttcatcatcattatcatcaactacttcaactcttttaagctttgaaaacctccccatttcttatcactaagaaaatattttcttttctttttgtttggtttctaagaaaatattttaccagctagtaaaagaggagaaaatgtaaaagtatgtatagtacaaaagagaagagagagagagagaaagagttgaaaatgagtagtaataatgaaatcaaatatttgaaaacaactttttctgaataaaatcagaatctttctattaaggttgtaataatttttttttttacttttttgagtttttactatattaggaagtgtacatatattatggtctccaagcttgatttatttctatcaacccatgtgaccactcttgacttttaaattataattaaataaaaatcgtaccataaagaggcaaaacggttcaaataagataacacgatttgaaatctgcacgagagttaacaaatttgagtttgttttaaataagttcaggttgtgtttagattgacaggactaacacgaaactgactcgttaataatccatttaaaattattttggttttttaaaagggacataggccataaacgtaatatgtcaactagttgacatatttaaacaaaatatatttataaatgggttacacagatccgtttataaattttctgacatgcaattacttaatggactgtgttcgaatcgagtatatatgatatacttattatacatgagtctcgatacaacacaaatacggcccacaaacatgaaatgtgacccctaatttcacattgtagttagtcattaatcatgggtgattattaataatgtagctatcttgtatctatttgtttggttggtttggagagaaaatattaattatgagtgagaaaacaaatatacaaatagaagagtaaatagtaataataatgaaacaaaacagcttttttctttaaaaagaaaaaaaaaatctttgggtatctttttgtttattttcttctgaaaaaatcttcccattttaattactagggtttatttgttttttaaatgcaaaaaatgaaatagtttttatatttgtggaaaatttgaggtgaaaagatgcagaactttagcaaattaagttcttctactggtctttggtaattattaagtttcactaatctctaataatattaaattaattaattagtttttgaggtttaaacatagaataaataatgtgtttttaaatttaatttaattttccatttagatgactaattttctttctttaacaatatattattattattattaaatttatttagattttttttctctgaactttaacatgtaatgaattatgtctcttgaacttttcagatcattaaaaattcctcctgaactattgaaattgttagatttaaaattttttgaacaattttactaaaataagtcattgtctaacgttgataaaaatttagggacacaatttgatacatgttgaagttcaggggcataatttaatcaaaatagtgttttagatgcagcattaattgctctctttacataaattagtgataaattgttcaattttaacatgatttctcattaatattattactaagctcttcaattaatcaatatggtctcttctctttactaggtctagttgtagtggtccttctatcaaaaagtagcttttgtttctgaataaaatctttccattttttaacaaataaaattatcaaagatagtttttactatattaaggatttctacacatgtgaccataatgtcattctttgtttacctttgactttggtcaaccttgcattaattacataattttgtttttttcatcttttttattcaagcacatgaaatcatgatcttcatgtagggttgtaaagaaaatcagtaaaaaagactaaagtctcattttcattcacaaaagatttcccccaaatttattcatagttgcaactaagaatttcacatacacttctaagttaatccttttcattctaaaaccacttgttagttgtttgaagatcgtaattagttagaattcacattttttgctcgtgatcatgggggtcgccttgtggaagacagaacaagcttcctgaggggagttgtcgaacttgacctaacagaagtgatggggatccaaaaagctcttaattgaatcaaagcaaactgtggttgagtgttgtgcttgaaacagattgtcttgcgggaatctaagctattcagagtgagtttactttgaattctcgatttagtttaatagttgatgattgtcaaaaacttgttactgaattaagcattattgtttatcattctgctaatagagttgttcacagttttgccaaaacattttgttctcttttaggtcattttttcaagatatgttcctactgaatttatgtgtatcattatagactattattcttattaataaaatgaagttatatttccactaaaaaaacacttttccacttctttcctactatatcaaacatataatatagtcttgtcaaacatccattaaaagaagcaatcttccctagaagttggaaagcaaataattatgttcaaccccatacaaacatcatcaaagtaagacaatattgatcctaaaattcttataatcaaattcaagctgacaccattctaaaaccagacacattatatccaacaaacaccatattcatcatataggtaatattcttctcaaaccaaaacatatatcattagaatcaaatttacatcacttgttctaatacaactctaatatatagatatatatttacattttatatacaataatttgtagtataaatacctaagtttaactttca

SEQ ID NO: 296548 - DNA, 2892 bp, Cannabis indica
tttttttgcggtgtggagcggtgcgggcggtttgagcggtttgatgtacacccctactttcaagcagtgagataatactgtatttagtttgacttttatcactatattcatccactcttgcttttaagtaaatgaaaatttaactggtagtaaaaagccttgcaaccaataatatatttttaatcctgttattacaacatcattgagaaagatagtaatattaacgtatgctaataaattgaatgagtttaaatggtagaatttacatttgagatgtgaatgagctcttttgcggtataatctaaaaactttctacattttcaccgaagaatattgctattagtgagcatgtatggtctgttagttgagcttgaaagaagtatctaaaaaagtatattcaaatacaaatcaaaaaaatttaggtaacaaattatgataataagatttctactaaattgaattaatataaaccttgaaattgtctcagtaggtgatttgttgcactcatagcatttaaggaatgcaagtgatgttttattgtcaaaatgtacttgttgatagtattttgtgcaagccatgtaccagaagggttatcttaaatttttatcgaagattgatggccattcaaagagaatggttgctctcataaagaacaaaacctggctcttagttccgcttctagaaggcaggcaaccaataggatgtagatgggtttacaggatcaaagaaaatcctgatggcagtcttgtaatcaaaccagtaactatcagagtagtgctaactcttgctttgtcaagaaaagggactataatgcaacttgatgtaaacaatgctttcctaaatggagacttgaatggggaagtttatatgatccaaccttcaggttttgaagatcccactgccaaacatttgtatgcaagctcaacaaaactctttatgggctcaaacaagctccaagagcttggtttgataaaagcaatgcttactcacatttttcactacctcaaaagcagacacttcattattcattcaacactctgctcaaggtataattctcatccttgtctatgtcgatgacattctaatcacaggcagcaatcccaatctcgtagacaccctggttaatgcacttaatcaaaaattttccctaaaagatcttgacaaacttagctatttccttggaatagaagtcaactacacaacaaatgttttccatctctcccaaactaagtatgctcaagatcttctggccaaaactaaaatgcaaggagctaaacactccaacgcccccatgaccagtgacctgcagctgttaacatatggtagtgaccttgttgaggatattcaactataaaaatcatttgttagagctctccagtacttaacaattaccaggcctgaaatctccttctgtgtgaacaaagtctgccagttcatgcaaaatctcctacaagctcactggatagctgtaaaaagaatcttaagatacattagtggtactcttcactttggaatgcatctcaaatcccctgccacacttgacttaactgcattttgtgatacagattgggcttcggatcccaataacagaagatctacttcaggccatgctacccatcattgttactcctatagttgattaagtccaagattatgaatatcaataacctcatgagtgacatcttctcctgtagatattgttataagtaaaccttttctcaaacgattatatgttggaagcttttcaagtgcaaaccattgaagatcatcttcatcttcttatcttcttgagaaagaagtgttatgtattcttcaaagtatatagtgtttgtgccacaaaaggtctctataatttttgacctcaaagggaaggttgagagactagagaatgatcttgtctttgaatgtattaatctaagcggcggtgatagaacaaatctatggctcaagaggaagacttcttgtggtggtgatttatgccgtcttttcttataagttctcctctttttttttttttttttgattttatttccttctttttcttattagttattatgcggtttcttttctaactttattattatttttgttattggcaagtatatatcctatttctttgttttatatattgatgagttatttggatatattttcctacgtaccatacgtagtaaatgattcgtcattctgtgcatatttttgatctcatgttgcagaggtactgttatatatttgttatttaacaaatataatgaagattaaaatgtggcatattatatattaatatgagattaatatatattatgtgttggaggttatattatatcattatagtataataatacacataaattgtaacaaatgaggagttacaaatctgaaatagattgtaacctaaggatcaaaaattgataaatatgtaattatgtgagttgttacatatgggagttatggaattaatgggataagtttctaattaatgggataagtttctagctgttagaaactgttacaatactcaattatatcatttaaatgggtattgggacgttggaaaatgatttaaatcggagaggagttacattttgagttctcaggaaacagttgtttaatagttgtttgtatgttgttttatagttgttttcgaacatctggaaccagatttttgaaaacgttcataaacgcatacaaattaattgagcatgtttccagctctcttgtccaacgtttttatcccatcaaacacaaattaatgtgttggtaacaaccatgtgatgaaggaatttgattttcaaatgtgatcctcaaaatactataaatagagggctttggttcacttgtagacaacaataattttctatcttctaaacactaagctagaaaatattgaga

SEQ ID NO: 296549 - DNA, 3244 bp, Cannabis indica
ttgtgcatttgtgaaattaaccaaaaaaaatgcaaaataatttaattttgcctagaatactcaataaaatatattatttttgcttgtaatactcaataaaatattgattccaagaatatcctactcattaccaacgtgtccacagtccactttcatttaaaatattattgttttacttttttttcaacgtatatgtgaacaaacaaattggcagtttcttttgactagaatattttcagtgggccaaggcccaccaatgccacctcacattccagccttgtcggcccattagtaaaaagagcccatagaaccataataataccatcaccgccaaacccctaaacctcatacaatacaacaattctactccttctcctcctcaacaaccgcctcagaaatcgcctccgccacctccgatgtcgaaacaccacgcgccaccgcctaagccactgatcaagcacaaatcgtggtctccggacgcccaccgcgatgaggcctggcttcgccggaaagacagttataaagccggtcgagaagttaatcgcagtaagagcgtgtctgacgaggacatggaggatttgaaggcttgttttgagcttggattcgggttcgattcgcctcagtcggatcctaagctaacggatacactccctgcgttagggttatattacgctgttcacaagcagtacagtaagagcttatctagatcttcgtcgtcttcttcgatatgctccgatactgaatttgataactctagcaccataatcgatccaggtttgaattaatccctaattttgataaaatgcgattcttgatccaaaattatgtcgactgatacattttatttatttttaaaaatgaacaggtgatgattcagagatggtgaagatgagattgaggcaatgggctcagattgttgcttgcggtgtacggcaatccccttccggatgatttcaagaagaaaattatattaacaaaaaatcaacaatgtataggtatgtagaggagaaagatgagaaagatgtgtatgcttcgattatttaattgtttattttatcattttaaattcattcatttcaatatatttatataaatatattcatttaatttagaaaatttcatttttatgaggcaattcttttcttacttgagaaaaagaaaaagaatattatgcgaagaagaaagcagtatgatcaaaatttgtgtatgagcacaatagacatttcttgctcatatgaaagtgaaaaaaagagaggaaaagtatactattaggtagatttttctgtggagatgaagtatgagaaaataaagggtaggtctaatatttgatccataccacactaagcagagtttacaactaagatgagattttgctatgtaatatggctatggatatactgttattataagctggtgcaatttaagttttcattcctattctttctgtccatccaaacaaagatcaaggtgatgaaatttgtattggaagtgttggtgtagttagccccatttctggtgtaagaacgactttggttctttgttacactatgaaaatagtgtaaaggcttagtagtaatttgtaaagggtgtgaaagccttgaatatgaattgagaaaatagaattttggttcaattggaagattgatattgtttcgaaaaatgcatttcggagatttgtcctgtctagaagagtacccgttacctatcattcttattagggaggttttctaagaaacaaaacaaaagaattaggtgattgagcagttcaaaatggattcttaataactgcatctgtctcttgttgactataggagaatggtatattggctctattcacacctgtttctttggtggtgttcagtagcgcatatatatgtatatataaaacatgtttttgtgtcaagagggaaattagacaaggacaaaacttatcctttcttttggtagaagttaaatttgtttccctaatttgttggtcagaagcattcaaagaaaggaaaataaaaaactgcagttgaaatcttttaggacgcctttggaaagccaagattaaattgaaagtaattagacaattttgtgtgtttgtcttatcaagaaactctaattcactctctataagtgacaaatgttaatgtttaaaataaatatgatttttgttttcgaactattgcttattttgaatttttcatgttgtttaaaactccttagaacaattactactgtcacattactgaaaagtttttaacataactattttatatttttgaagtatcatcgttgcatagaaaaaatttgggaacaagggttataatttatgtttaagttgagttacaatgatatatgttctttgtaaaacaccagataaaagagaataataaattaataatgcttctaaattaattgtttcttttttttttcttcaaagaaactaaattaattggttagaaggatggaaaagatgataaggcactatttatttctttataattattagtaaaagttttaggagttatatttgtaaattgtaatttcgaacaaataagaaaggataaaatgattgaaataagatgattactttcatagtgtaaggttgtaatttgatagaacttttcacatcgactgtcctattgttggcccaatcctttaatatttacactttgtcaaagggaaatttgattttctatgcttaaaaaattctaaaattatatccctaaacctaaatgttatactataggcaatatatgattacttttgctttatccccataatacccctcacatttgaaccaaagcaattgtctctctctctctctttcggccaaaacacctccacagactacgggtcacctcctccaccacctccaacgacgatgacgaggaccacccagctccctctgtcggacccgaagcctcaaccaacccagccccctctctctcttcgtctctctcaaactgaaaaaaaaaccaatgggtccgatggtcacgtccaccacctcagtttgagagagacgaagagagaggggttgggtccgatggtcggtccatgggtccgattggtcggacccatcggacccatggtccgaccatcggacctctgcaattttttttttttttttttctttttctagtttgacagtagacaaagagagagaggggctggtttgcacggtagagaggggggctatgggggccggtgcgccgtgcgaccgtcaccgtcggttgaggcttacgggttctcggggttg

SEQ ID NO: 296550 - DNA, 707 bp, Cannabis indica
acattgtgaacaacaatgcagctaacaaatacacttactcattttctttgttacttttactatataaaatatcaacagcctataatatgcgcacacctttaattataaatttcattattgtaacagtgttgttgcattgagaaattaagaaaattacacaactttgtattgctttaatacaaacaatttttgtgaaaatagggtaggatttgatcagtagtagattcaaaattataattttagaataacaattaaaattattcagtttgaaaatatttgccaggaaaataacttaaattatatatttttgaaacctttaaattgcaattattgaaaatttaaatctaaaaaacagtacattttttcattgggtcatttagatggggccttgaagtttctgggtcattgggtccagtttaatttggtgtgtatggaatgcatctatatgtaatcttctagcaaagagttttacttttgggttgtagagaggttgatattttgtgaggcttggctgtctttttcaaaccagtcctacacaaatctacctgtacacatcaccattcatatcattgaattttgatttgaaaatttatccaaaaaaagtctttattttatttctcaatctggatcattatttatttattcaaaaaaaatctagatactttttatttttaaaaaaaaaaacagtttatggaaaacaactacac

SEQ ID NO: 296551 - DNA, 1694 bp, Cannabis indica
aatatttaacttaagattattgtcccaaaaaataaatgacatcaatctttgatgtcatatggtatttgagtctgtgtagtatttcaataatataatgtttctctttatcatctttctatggtgtgagatttgtaagggaaaatttcaatttggttccatgtttattaaataataatttgaactttatattttgcaaaactgatcaaattgatacaacaaattaaattttagttggttaaattgttttttgatatgagtaatttataagttatgattttggcctatatccaaaattattattgcaatcaatttggacatcatctcttcttatatacaatttattggctcttaattttcatcctcttctattgctgaaagagtatgtgttgaaaaaataccctgaaaacacaattgttactgcagtaatagcattcaataaacacaatcaaactaaagccaatcaaagttgtgtgacgagacgaattttctccttgaatgagatgttggctgcccaactttgagattgtatatctcttttttggttttgttaggtcgtgagtctggcgtttttcgataactattctaccatggacgatactagttctgaacagattactgaaggaaacatggaggaactccatttacagttcatagaagaagcctctctggagcttgaggccaatttcgaaattaacactgaggttgcaaagaccggggtcttggccaagatcctaggctctcgtcctttatccaaaggaagagtcaaacagattcttacgggggtgtggactctgaaaggtaaatggagaatgaaaactctggagaaaggcacatggggtttcttctttgataagctggaagataaggaagaggttctaaaccgccgaccctggattattgccgggcaacttctgaatatcagggagtggcctctggacgggaactggtatggtgttccgatgaacaagtctgtattctgggtggagattcatggcttccctactccctatcttgctttccaaaactctagcgtgataggtgctaaggttggcgagtttctagaatcggatggagttgataactgcactattactagacgtggcttaggtggatattcagatagaccaacgtctcccggcagggttttacctgagtataactagaggaagaaaaaaatggatacagttcaagtatcagaaactgcctaaaatctgttttaactgcggtcatcttgcccatgattcgagtgtctgccctagggaacgtgcttatgctttccctcccataggaaaggcggttcctttgtatggtccatggatcaaggtcaatgttcctattcaaaattgttttgataccgggcctgctcttctccaggacgggaataatcggacggcaaatattcagggaacttcgcaggtccaagcggttggtgaggggcccagtgaattgcatggtacaggagtgaacgttgcggccactaccacgaacgcagcaggcgattgtacgattggtacgaaggatacgggtacaaaaaattcgaaatattcctttggaggagggacagctggaccgacacttggcattcctataataggagaaaatgagcatcctatgaataccttgggcacaaatccagcaaatgagaatgttattgtttgtatgatgacccatactgttgggttttatgtcctaaa

SEQ ID NO: 296552 - DNA, 2333 bp, Cannabis indica
aaattgggttcatatatagattttatatttttcaagctatattttatattttctctttaaattgaggatctaagtagtttttcaaggaaacttgtgtggagatacaaggaaaacttggaatttccattattttgattgtcaaatttaagcctagtaataatgaaaattaggcaggagttagatggtgttattgcaaagttattatagcaattgggtcatgcatgagttgactgtttaataatacttaagtaagtgggtagatgtagaagataaggaaagggtatgtatgtagcgataaaatcgaaaaattgagattatttatattgagtgagcattggagagaacgttttactatgtagtactctgctctgctgctgttgccaacaacattttatccatttcttagtggtggtttcttccttgtcactactttgctatggcattttgcattttcttttgtctaattctcaatctattcttctaacctcagacattggaacaacatccatccacttgttataataatgtaactaatatttggatatttttaaataaattcattttctttaattaagatatttattatagaatgaatttaaggaaaaaataatactaaaaataccaaatttagaagtgtggtttgtctcctaaatgtggagatcattttattttgtttgtttcgattgatttcaattagaacctcgccattaatgtttccagtccttttgaaaagaatatataaattcaaggtgtcttttcttttattttcatttctataatttgtgaccacatatagaaattagatatagacatttattgatatatttgtcaaatgagattaatgacatgtttattgagagaataaattttgattgtatagtattgattttcacaaaattatttactaaattttaaaatggaaaaatcttgtggaactcatacaaattagagaaaaataaaaagaaatattacaactctttctagtagaaaatatatttttctttcttaacttactttatattatttttttattaattaaaaatataaaaaaataaactcgctttttaaaaatttataaattaaaattaattacttgttctaaaaataaataatttaattaaattaaaatgttattattttttataaacattacagtaaaatattatttatgttattattttaaactcatttattttttttcattattctaacataataaaattgacagcaaaagtatcataaatgattacgaattaggatgaaactgtgaaataagccaatagaggctactttacttttttatttttttaagttcagtttagtctgttcaataagatacatttttcaattttattattcattttgatggacttctcacttgtgttgactcttgaccaaaaacaacaccgcagataaggaattcagagagaaaaaaaataaggcagacaaagattatctacaccacaaatcacaatcacgatattcttacgcacccctacgagaatgtttaactgcatgatatgaatcagattctagatgtcaagaggaactaatacttaatcacaaaattctaagaatttacatttttggtaaatgtgaattttatacaagcttatttgtactgaaaacaattacaaagatatttgtacttttgaactcgaaaaactaaaatgtgtttgttatatgagtttgatttggaagtagagttagaaggtgcttagattaaagattaagcaaatataaaacttaaatgtgattcacctggaaacattggttgagtttcagattcctattcctaccatttctaccaagtctaaccctataccaaacgcccaaatcaaccgaccagaacataacagtaccaaagagagaaaacaaaacggactcataaactgattgatttggtgtaagatccaaaagagcagcaaacttagcttcaaagcttatacatacagaacccaacccgattgctaatccacttgacgtagatgagaatcaaatatagtttctgtttcctcaaaatatctgatgaaaagagaactttcaaaactgctaagagaggcttcacaaagtagcattcttcaaatccactcttatcttttttaccatcaaatgagatttatccaacttagaattaatctaagaggtactaaaataaactgataaaaaggccagctttcataacatatttgaaatttgacagacaacaccatagcatttaggagaaaaccttcgaagctaaacagacaaatataaatagaagataacattgtaaggctcactccaaatattaaaaactttctacaaaagtatgaactatgaactatgaagat

SEQ ID NO: 296553 - DNA, 2860 bp, Cannabis indica
tccggataaattagagagaacatcaaagagattataatagattggacaatataggaatgttaatttatgtttctattttgtcctttttacttaaaaggctaagaaagaaatatgaattcatatgatcacttagatttttcttgtagatagagagttaagttttaggagtttactaataaacaaagagaagtgaataataataataaaaaaaaaaaagagagagagaagtgaataataaagggtaatggcattcctacacccatagcggtaggggaataacatgcctttcccttttactcttatttttacgtggatctacagatttttcctgtaataaaagtttagtaagcatttgaatgagaatcatttcctacaaatggatgccatttccatttgtaaacctgttaaaatcagaacactatctcttcgaagtattaggtgtcctgagatttgtagggctaatgggattttgtcaattcctaatgtgaaccgtgttatattaagtttgtattgtaactgcttatgtaatttcatgtgcacttttattttgtactggttttgttgttgcttagttcttattgtgctgtctgttgtttgttgtttcagcattgactccagagttgaagactacactggacaaagttgtcagttctcagaaagtgatcctttttatgaagggaacaaaagactttccacagtgtggattctccaacacagtcgttcaaatattgaggtccttaaatgtacctttcgaaacaataaatatactggagaatgaaatgctgcgtcaaggattgaaggagtactccagttggccgacgttcccacagctttacatcgaaggagagttttttggtggctgcgacatcactgttggtaagttgctatgccaatacttggtctatgaaatgatctttctactattattgtcattatgcacgaacagccagaggtatatattgcgtttactaattgagaacatagttttggactctttaagtggtgaaatattagttagtatatataatttttcatatggcatgaattatcaatcaatagaactcagtgttctcttacctgatatatgaccactacacgtttatgttttatctttacaaatgaccattagttttattaaaaaaataaaaaaagaagaccgttagttacttgttcatctggccatgatttttgggtggttgtattttatttgagtatataagctgaatttgttgttctgatacctttttaaatgaaaatattaaatttccagaggcatacaaaagcggtgaattgcaagaactagtggagaaggctatgtgctcttgaggcttaaagagttcaaaggagtgtatcaagattaattttacgtttatgttgaccaatattgtaaaatactttaatgatatataattcagtgtgcactttgccactaaataaagaaaaattggaaataaaaaataaaaactggaaagaagctgtatagtatttaacagaatctatatttattatcatgtataatctaacaacttaaaggataaatctaaaacgataaataaacgtttaagaaatgttacgataatgaaagtgaaatataatttttccttccatttagtttctaacttttgatcttttctgttgtagagtattataaagacctgaacttagatcttttctcattcgattgtgttcatcatagtcttttacaaaagcctaaatatcaactcgaatagtgtgggttgatactcaaacccgaaaccctaaaccttacgcacgcttgaaatactcgggcttcctcttgtcctcgtgcgtgcattcgcatgtcccctaggtatgtgcatgctggtaactagtaaccaacataactggttaccaaatagttactagctgaaaatcataaaaattttgaaaaattgtataaaattatatttttcaattttgaatctaaatatcagttcaaaattataaagttaaatagtgtgggttgatactcaaattacttttgaataattaagaaagaattttactagtgaatttcgaaatataaaaaagaagagaagagaaaaggttatgtgacaagaggttttccaattctcttctctttttttatgtaggcattcaattagagttaggtttagatgagataggcttaaaataaagatttgagccgaaatctaacgcaagggatgaattaatgatagactttggagttagatttttgtcactttatttcaactaatgaaattaaagtgtcttttctaatttatagtactcttcttatctaattatttaaatagcaatattattgtaataattataaaaaaaatatgatttaaatataattattaattagacccattagacccgcaaagagttttaattaacaaacaaactcttgtttctcttttcttctcaaaattacccaaacttggtgaaaattcttaaataagacagtctatttttgaattctaattgacttaataaatcaattagtcgagtctacaagatgatattgttacagaaaatgtagagaccgtgggcctatgtaaccaagctcgtaataagaaaatcttgaaatttactgagtaaatttccaaacttattaattcctcctaactccattatagatttagaattgcactcatgattacattaaatgttctatacaccaagtatagatacaccatgaatttatctatttatctatcaatcacaatcacaacaatcattcatcctacagacacagtacacagtgtgtaaacacagatttccgtaaacaaaattgaagcctcacggtgatgatttcacacagaaaaaataaaagctatagtaaagtaatatatgaacacaggattttttacgt

SEQ ID NO: 296554 - DNA, 3743 bp, Cannabis indica
caatacgacctaatacggcgttccaaacgagcccttaaggatttattttgtactattttaaaatataaatgatcatttcaaattagtgtatatatacacatgagtttaaacaagtttgcaatatatttaattgcaatatataattgatcgatttcatttttttttttgaatgaaaggtaattattattaggtcaacgccaaaaaataagtcaaaaacctacataaatgcagccaatttagcacgtttatgagcaataatatttacagaacgagtacaaaataaaaatttaagacacattaaggcttctacaaattaaactaatatcactcaaaattgaactataagtttccatacaaaaatccttcttactcaaaaacttcgcaacaacttagtaatatgactcaacctcaatatattgtggtaacccaaccgcgacaatacaattgaagtccagctaaaataatcatcgcttcggccacttgtggagaaagcaacccactgccggcgaagttgccgagccgccacgatatcaccaagtctcgattgagcttcttgatgatagttgcatgcaaagaagaatacccaacccaacacaccttctataataatttgtgattatgaaccaattatttcaaggatggatttgatttttataaataaatatatttctcgtaaaaaaacaatataaaaaatttagtagcacattgtcacgaagggaataagaatgtcaatcgattggcagaaagggcggtttagataaatatggattttcataatcatatatattattgtaattaattatagtacatgacttggcatatatgattattaatttaatcaaattatcatattgtataacaattatataccaaaatattattagggagagacaaagagaagaagtactctagcacattgattttagcctcactttcgcttctagttttttttttttttgtatcaagttatcacgttcgctctctatctctagttgttttggaacttttttagtctaccaagtcaactctatatagtatatcaactactacaaattttagtgtatataatagattatcagctgaaaattaaaaaatatatataatatatataatggaggacaaaacttgatgaagaatatgatgagatgattttttttttttaatttaattatctatgtacatatgtttatagtgacatatattaatatattacatatataactaaaggcttaaataattatagcagaatatgtgcgcacgggccattaaacaaaatataaaagtaaacaatgtattattatagcagaatatttgttgccatcggccaaccataattatttttttatatatatagtttttttttaatgactaaaatagaaattagctcacatttaattttcaacaatgttttgaagcacttaattaataatatattctttgtaaaataataataataataataataataacatataaattttttaaacactctagtccaactgtaatctctcacttatagacgaaaccagaatttcattcatttgaaattttaattaactaatgctaaagagcacttttaatagtgcccaagaaacttatgttttgctcattattgtctaagaagtttagtgcttctttgagtagaaagttctcttgctcattctttaccagagtatgtccaaaaaaatactcagacaaggatatttttggcctacaatgattgagaatttaatagactatgtcaagaaatataaaaagtgctaaagattctccaatatcccaagagctccaccaaataagctcatacagatgcaatctttataatcatttgccatatggggagtagaattatcaggcaactccctagagggaaaggaggaccacaacatgtcatagtcgctatcgactattttacaaaatggactaaaggtgaactgttagctactataacttcaaagaagctcctagattttgttgttaaaaaaatatctatcagtacggtctcctaaacaagattgtattagaaaatggtaaataattagacatcgatatgttcaccgacttctgcaattgggtttaggaacagcttggttagggttgtattttgctactataattctatttttttttttttttttgaaagagaactttattagtaagcagctctaggcacatctgctattaaacaagcagtagcacaagaaggtaaacaatcagtccaagttttagacttttgagtcacactactcctcttagctaagctattagcaactttattataatttctggaatagaataaaaaatgcagcaattgaaaatgggtcttcatttgagtaatattctgcaccaactgcccccaatcggttggaaaagaaacaccattctcaattgctgagatgagaactttgatgtctgaagctacccaagccttcgaaatggaccatctcttagccagccgaagccccaggtgaatggcagcaacctctgccagtttgacagataaacaaccagaaataaacatagtttctgcaactattaaactacctgcattatctcggattactgcacttaaaccacagccctcttggccgtggacaagagatgcatccgtattgattattaccagatcctttggaggaggctgccaggatgttgaggccgaggaactatgtgcagctgtaggttgttgttgcatacccaagtgttgttcaatggtctctatagcccaagggatctaatatttgctattcgagaccttgtgttgaaaggtgtattggtttcgtctttgccaaatcaaccaagaaaacctcacgaatcggaagaactcttcttttgtgagatgttcccactgccaccacagaaagttggaagcgttatggatactttgatccttgaatttggagtagcctagttgtttccaaagtttttgaacttttggacagcaccataatgcatgacaaatatcttcctcctgttgtaaacacccatcacaattggcatctagggacattcctcgcttcctcaattccaccttagttgggatccaatggttaaacactttccaaataaaatttttcattttcggagttagttttgacccccaaatgaacttccaccaagcttttaatttggaattgtttgaacatgccgcccaatccggattactaaatcttaatttataaccactagcaaccgagtaattcccgttgttagttaagtcccaagtaatccaatcctattgatgaatagaagggataatgccgagaacccatggaatgtcatctctgtgaaaccaactgttcacttcattaattttccactctccattagcagtcaacagcgtgctaagagtgacatcttgtgggattgggatcttggttcttagctgaaaaggaagttttcggggaagccatggatcttcattgattcgaatattgcggccatttccaacacaccatctatacccctttgctagaagctcacggtcccaaagaatccctttccaaaccgaagacccaaaatgacccaatttggcctcaaagaaggtttcgttaggaaaataaagggctttcaacacccgagtgagaagacaatcaggattagtgagaatcttccacccctgtttagtaaagagagattgattaaaatcttctaagtcacggaaccccatgcctccttgctcctttaatttgcataacttccgccaattaccccaatgtatcttatgtttattggaagttgat

SEQ ID NO: 296555 - DNA, 6176 bp, Cannabis indica
aaaataaaaaaaatctctatttaaaacaacgcacacaaaatcaggagtaacccaaaaacctcatttgttttaagaaatgaaaggtaatagtgctgcttagtatttttttgtacgtattaatattgttattggtcaaattaaatatagagtgttatataatttaatgtaataatttgtagagattactaagtaattgcaagctaaatgtaaatactcatttgttttgggcagtggtagttggggattgtcaccactctctggagagcgcgcgtagtgctacagttggatggcgccacagaaattatccatttggagaaatggatggaactaaaatggagtaggacaaaggagaaatcccaacctttgctgctccactctactcacatcaaccctgtttccgccattgtcttcctgcctaattcctcctcagttcgcgatttcggaagccatggtcgccgttatcttcattctctctgccctaatttatgtctgctccgctgaaacttacagctttgatcgcctctcacctgaccaaaatctctgttcgctgatcattcgtcctgctggttatgcttgctccgaacacacggtcctctctctttgtatttattaagattctgtttgtttgctaagaaacttgccgattataacaaataaaagaatattagaattaaatttcagaaaattgcttagcgtgtttctattttatatccattttggacatatttgattgccaatcaagttttgtttttgttataaattttcccacacattgaagtagagtttgcctttctttcttaaattgtgttgaatttccgttacataattgttggtttgtttagtagcattgtttgtattagtttatttttgtcatttattaaaatcttaagcaaaagtaaagagcttggagctgagttgtggtttttttatactattttgtttagattttgactgatgatggttacttattggctctacaacgggtgtcatcgtccaaaattgggaatttaagacaaaatccacgtcctccggttttgcttcagcatggactctttatggtgatacttctttcagtttgttttacctttttgctcctttatttgttgaaatatttttttaggaatgatataataaaaatgaaaaattggacaatgtctttaaaacttgtgttatagctgcggcaagaaaggaaatcataaagctttcggattattggtttgtcgaatattcaagctgaaaaagagaaagaatgttgttgaaatactgattgaaaagctatgttctccaaatagaaatttaagtatggtgttacacattgctaattgacagtctttgaagataattaatattattttttaaaggttaaacatgttctagttaaacaatttctgcctgaattagtgtaaaaaatttatggatgtattgttgtttcacaaatggagaatcatttgaaattttgtgtttatattttaattggttataatatttctttctctgaattagcttaagataatatctcgcagtagtcgatgaaaggagaacgagcagtttcattatctttttccattgtctatttgagcagcttctgcacattttgatttattatgttagtgtgtctcttactgccttgtgctttgcttttcttttgacatattaaaatgaggataatgattgagaatgagaatgtaccagatgcaaaataaatttaagatagataatagaaatttactggcaattggaaaatgggcatggcttcttaaatggttttaattatttcattatgaatattttacaaaaaagagatgctggtttttctgtgtttaatctgaaattgagcttttcattacttgtagtctgaaagtattatgagttttgttggcatttattatgattaattatgagactactacaagaaagatcacagttgaatcgtcagattttaagcttggtactagtgttgtgcttttgtggtgtttataggatatttaactatttattacttatgaggagaattcaactacctctacacatttctatatgaggaaaagaattgataacttgcatctctcttatgttttcctattttgcaagtagggaggagatgcgtggtttttaaattctccagaagaatcattgggtttcatccttgcagaccgtggttttgatgtttgggtgggaaatgtgcgtggaacacgttggagccatggtcatgtatctttatcacttaaagataaggtattccttgtgtaaactttcatttccacttttcccatccataaaatggtttctctattttggcaagtggatgttgttttaattgcttctgtgcatatatttgtttgtcttggatgctccttgacattcaattgaagttgtaatcagttgtcacttgagactgtatctagatctgtatgtggaaacactgtttaggattcaagtcacgtaaaaattgtatttatagatttgttttcaagattttaatttgcagtgaactaaaatttggatgaatgaagtattatctgctgcactattcccacctcatattatcccagggattaaaatagaagagagcagagtacacacaatagagattgagaaatagaattgaaaaacatacatcaatacattatatagattataaactagtggtttcatcattgattgaatgaaacaagacataatagatcttgaaagggaaacacagatggacactgtcatagaatgaacgtcgatgaatataagagaacagacaaatgaatgatacagattgagaaatagagttggatacataaatataactaaattgtatatatatcatataaatatatttgatactaggctctctacaatatttggtaactagaaaattatagtaattgttatgtaggtattcaggagggacttacagctcaaacattgtgggagaaaattacatgtctaactatttgagctatccctcttcggtcttttttgtatagattatataaatgaaaagagagaaaacaagaaggcttgaagggggaaacgcacgtagagcacgttaaaggatttattgcatgtgaagatatcatgtgtttgaatgtttctttgcaggatttttgggattggagttggcaggaattggctctacatgattttgcagcaatgcttcgctacattaaagcagtaaccagtacaaaaatatttgtcgttggacattcacaggtatttgaacttgtctttttctcaaagcttaactacgagtttgctacttctgtgtaactatagcttgttttttctttccaggggacaataatgtctttggctgctttcactcagcctaatatagcagaaatggttgaagctgctgctcttctatctccgatatcgtacttggagcatataaactccaagtttgtacttagaatggttaatatgcatctagatcaggtattctttttcctggtatcattgactacatctatgtgtttctgatgatgaagatgataatctctgctcatttcaacagatgattcttgccatgggtattcatcaagtcaacttcagaaggtctattctagctgtcctttcctttttttccctctagtacaatgggtttgcattatattaatactatgttttgcctcgtattttcagtgattggggtgttaatcttgtggattccatatgtgatggccatttggattgcaatgacctgctaacatccattacaggttaatcttctactttctagttctggtcttcaataatgtttttcatttttcatttgcatacactattttatgtcataacgttattttggcaaaaacattacaggcaagaattgctgctttaacaactcgcgtgtggatttctatcttgagtatgaaccacatccatcatcagcaaagaacatacgccatctcttccaaagtacgtaatatagctcttagctctttatgattttattcataggcagttgagagtttcagtggcatagcactcataagtaatattgaatttttccttcccatgtttgtctgactctgttactattattttaatcttattttatttcatttggcttggtagtgattcgaaagggtactttctccaagtatgactatggagtagtaaaaaacctgatgcaatatggtcaattgaaaccccctgtattcaatcttgggaatatacccgagtcattgccgttatggatggcctacggaggagatgatgccttagcagatttgaccgatgtgaagcacacgctcaaggaattgcagtctactccagagttgctttatcttgagaattatggtcatatagacttcattatcagcgtgcatgcaaaggaagatatttataatcatatgattagcttcttcaactctagggaaaaatctagtagtttaaagtgactgtttactattgtaccaaaagagaagaaagaaaaaaatgtgactgtatatgctgtaaatattcatcattttattttcatgtgaatattgtatatggtaaagagtggaagaagggagtaaaagaaagagcagaagcaaatttcagtttgattccagattaacaagaacgtcgacatcggccgatgaggaaattaggcggccatagaggaacaatgaaggttccaaagctgtacaagccaacattgatagtcacctcatcatgcttaggctcagattatattgagtgtttggatgtgaactttaattggagtattgtaaacaaaaaagttgttgcaatattgtcatttgtaatgaataaaagtataccaagtattttggaagttagattttgagtaggaataagaaataaatattagggggcctttttccggggattcaaataaaaatgaaatgatagcatagcgctttttctttatgaaaatgagtgttgtattggaatctctcaattactttcaatagtattgtagtttcattattcataaatgataagtatacatatatataaatataatttgcataaaaaaaattaatacgatgtatagcatacctacaacaaaggttaatgttcaatattacatacgtgtagtttcaatttcaaccttttcacgaaacacaaatttagtgataacttggcagataatatagataaatatatatatatatgtcgtttcatacaaatccttatgtcgttttagtgtccttccccaggactaggcccagattggttagcccatttgagagtttgaataatgattaattcatgcggttgatcctcattaatggcacccaacctagaaacattaacatcgctcatggacaccaccgatgttgttgtactcttcttcaatggacgaccttctattggggaaacaactatgaagctcaacacaattaggagagtaataataaggacaaaaatgacactacaataatggacctgtattattaatcctctagccatgttattatgtatatatagcttacaaaactattgtatttggtgatcatcactagggttttatttatagtagtttttatagtgattgtggttttcagagactttttggaaaaaacgactgaagaggatggccggcagcatgcatgcatttgttagttaggcttgtttgaaaggtactggatgagtagtggtgttaaattaccaaaacgaatgggttgtgattttcatgagttccatgcattcattacataatccctgaaacattaaattattattaattatgacaatataatttcgaagtacgtagtcaaaagaaatattaattattatggggatgttttgtcatgtaatttagaaagtttattattttggagaaatgttaaaatggcacacaaagtgtttagcatctaccatttgtgtaaattgctattggtgtaatttaatatttgattctacatattttattttaataaatattatagagaacttctaactcaattataaaatgttgatccttatagtaacaatgctatttatttatttattttttagtgtattttattatgaatagagtattgttattgagcactagtagtaggggtgtgcatcatccaattcaatccaattgaaccgaaccaatccaatccaattcaattacaaaaaattggatatccaattacaattggattgaattggatgctaaaagttggattctatttggattggatcggttattggatgtcaatctcaaaatccaatta

SEQ ID NO: 296556 - DNA, 6196 bp, Cannabis indica
aacataaagtctaaaatgatatttatctattttgatttggtgtaagagtggatttcatttcactatacaatggaattgtttcatttggttgaatcaaattttgattttgtgtaaagttaggagagccctttgttccaaaatgaaaactttttagcataagaacacttgaattccatataatccatacaatgtggcatgtatttctctaaagtcactctcctaagactggttcaaagtcaactagcatatatgttagataaaaaatttcatgtttaggaaaagttgatagttgatttggtgaacaatatggactttttgctataaatgtacttgtttatggaacaattatacaactaaaagtactaagaagagcctaagcatttttcctcatttcatatatgccttcttcttaattaatcattatacattttaagctctttccttttgattgtagtcattggacccggtttgactaaacttctatttaaaagtttaagatgtttggatatcattaaaaaaaaagatcgtaaattatttaaaatttaaaaacagcttatgaaaagtcctttgggaagagacttttaaatttaaaaaatgcttttttattttagtccaaacactcttaaaaggaatcttttaattctaaaaattaaagaagagcttatagaagttaaaccaaatgagtgattcgccatatagacttattcgaagattaagaatataacttagatccttgtactttaagttagtcttaccttactaaccatgttctaaacactaaccttgtattaattctttcaacaaacatgagtttagcgttgccatatggtgaaaaatccgagctttgtttaagttcaccgatgaaaggactctcgaaaattatactaaattcgatgagtggttggagaatttgataagaactctaaatcattactttaacaaatcttattactagtggtttgttgtgtatatttatatctcttgatcaataaagtttctctttttctgcatctttcaacagcgaaacagaagataccgataatgaagcagacgacaatagaagctgcatctgttctattttatgacattaaactctacaaactccgaaaccaaccacagaaaaagatgacacaaaaggatggttgtcttgacctcaatttttcatgtgaatctagaagacaaatttgatgattgagcttgtttcatatgaatcgagacgagtcaaaatcgacggccaccacctttcgtgtggctatgaaggatttgagggcaggtccacagagagactttgaagtttgtattgtttttgttcttagattggaaaaagaagaaagaaaaaagaaccaaacattcttttatagaatgattatttttaagcaaattataataataatagtaatgtgcatactaccttttctaaagtccttgagaacttgtttatcataccatttctgtaagtacattgtgcttgtaattatttatatatttattttcgaaactaatctccttgcttaagcttacaatatttcgaggaactcgaacctcagaccttgtgagagcaaaacacagctattgccatgtcaatgctgtgaagttcttcttctccttctttgtgtattgttcactttttttgggacaacataacccgaaaagtacaagattcctactgttaagaagaacccagcagagtatccgaatcctactccttcccatcgaaaccattcatcatcactttcgtcgtcttcttcccctactactctcggtggtgacagcttttgatccgaacacagaacatgaatttgcattccacacaatccgctgttgttggcataagaggcggcatcagccatagtatccatttgaccaccgagaggaatcttcccacttaacaagttattactcaaaaccaaagttgaaagctctagaagcttagaaaatgttggtgggattgaaccagtgagtttgttatgtgacaaatccaaactctctacactctccaaattgccaaagcttgatgggatttttcctgttaatctgttgtgtgacatgttgagaagcttcaaaccctttaactcgcctaatgaggatggaatttcgccgaaaagtttgtttcttgacatgtctaagagcgagtagataccgaggctgttgtgtgagatgccttgttttgaactcttccaattcactatcaaatcgttgtactcgattgggatggtgaaaacatcgcgaatcgaagagagtgtcttcggggtgttaatcattccaagaaggttttttgtgttttgattagggattgttccaactagtttgttgtttgaaacatcaagaattctaaggctgctgaggttgttgaacatgtcatgaggaatcaagccatgtatcgagttgtttcgcaagattagaatttcaagagtggagatttgtgagaagaaacttggcaattcacctgtgatgttgttgtcattcaattccaagtgttcaaggagtgtgagttttgtcaagttttttcggtatacttcctgagaagttgttatttcccatggcaaggatccttgtttcttgagaaaaagttgttggaatctcaccagaaaattcatttgaagagatgtcaacataagccagcaatgcatcatcaccaaaagcagggagatttgaacccgaaaacctgtttttcgacaagtccaatagtaaaaggcggtatatgttggtgattgatttcgggacttctcctgagaattggtttgaagctaacataagaatcatgatagctgaggcttcaccaatgttctctggcaactcaccagagaaattgttccttgacaaggccaaaaccgataaatttctagactcaaaaaggcgaggagagagcgaaccaccgagtttgttgtctgataaaatgatccctccaacttccatttcagctaaccaaagtggaaactcaccttcaagcttgttctcactcaaatccaagaaatcaagccctttttgtttcgaaatccaacttgggatttcgccttcaactctacaagaactcaatgacaatttcgaaagctgaaactttggctccaatccttttgcaccattccatgtcaaattattcttccccaaatgcaaattctttaaactctccataccaaacaaccataatggaatctctcctcccaacatgtttttttccaaatcaaaagtttccaactttacaagtttttctattgacaatgggatttcaccactcaacctattaccacccaaaaccaaggtagttaagttagttaactcaccaatcacaaaaggtatctccatagacaaaaggttatgactcaaatccaacttcttaagctctttcaagaatccaattgaggccggaatcccaccatcaaaaatgtttattccaagtgacaattcttctagctttctcaagtttccaatctccataggaatacttccaccaagagaattttgatccaacttcaaagccctcaaatttctcaaaaacccaacttcatgactcaaatttccactcaaaaaattgttactcaaatcaagatacttcaaagacttgagcttgaaaacttgtttaggaatagagccactaaacttgtttcccatcatgttaagataagctaatttggtaagattagccaaaccaaaacccgggatttcgccttgaatcttattcgaagaaatgtcaaggagcttcaaagttttgataccaaaaagtggcatcaaaacacttgttggaacaaccatggaatctgtggaaatcgctactaaaagagtgtcaaggtacaaacctatgacagaactcgaattcggtttagaactacacaacactctttcccattgacaacaatctaatgcattgttgtgatcccatgaatcaataccatttatgaacacatctaaattagctgtgttaagtgtcaagttgattagagaagatttgaacttaagaagggcatttttttgatcaattggacaagttgaacaaagggtcatgaagaagaagaagaagaagattgtgatggtaaggctttgtttggccattgttgagtttgagtttgttgttctaaggttagttttcaatggctataatttataaagatcaaaactttttgaataatggaagagagagagagagagagaactattgttagtcaaagtagagtccacacactacattaaaaaatgttcttattgttttgagtttcaatggtactatatggaagtattagtttactttgactttgactttttgtcttcatttaattctttttttattttccaaccaatgattaagttggaatttcttttattgggaaaagttactatacatataaattattattattatttacttattttagcaaaatatttgtagtctttttttctttacttttacctaccaactaaattaacttcttgtgattaatttaaggagagtttaattcttttaccttttctacaaatttaactgaaaaagatgataggtaatggtgatattttttcactctgtattttatatatccaaattatataattaaattattttcacccgaaaaaaagagtgaatgaataattagttattggaataaaatatttgaatccaaactatatttgtatccaaataatatatatataggagtgcttatatttacctacattttatatgtttatttgctttttttaattactaaagaaacttaaattttgtgagtgaacatttttcattttgaaaaaattatgaacaagcatcaaatatacatcatcatattcttgctcataatttttttttttttttttttttttgaagtattttatgttttgggcatttagataattttttttctatgaaatggtatatattgtagagatagtaggtatttcattaattttcaaaaaatttcaaataattttcatgcaactagctatttgagttttaattttgctaccataaattaatcaaaatttacccgaaaatgttagaattcatgctataattaaaatatacatcatcattaaaaaaaaaaaaaattattttccaagtgccaatgaataaaaaacgattttacaataaggacaaaaatagtactcctacttaaaaagtttcttatataaatatttatatatctacattaaagaacaattatagtaagcatcttacctgtttttaaatttttttttgaatgatttaagaacactaaaaataaagttcaaaatagtttttttcttaaccaaaaaattaaactttaataaatcaaatcagctaccaagatagtttccaaaccaacagggacaacactcccgcgggaaacacagccagaaatagaatcagataaacgagctaaaaagttagccgcctagtttccggaccgcttaacaaaactaattgaaataggaaacaaaagagagaattgcataagagctacacaatacgaaattaaaagcttcaccggagacaacaaacagtgcttctgttcaaaatagttaatttcatatatatataaaagtatattttaaaaaacaaatcataatatttaaaatttgttttcggcacaataaattaaattattttgatttttcttagtatataatttgtggtagggttattttcaatttggtgtatattataggtaagtctttgtcaagaacaaaatatctaagaatggtgtgtgagtagagtctattatatttttccatttccactatttataattagtgcttgtttgttgctcaagcataatgccttgcttactaagtagtcactttcaaatacttttgactttgatttcattactactctattctctattaatgatttttgttttttagtttaaaaaatacttttatttttcttaatttatgtggaagtttctcattttaagtactcttatatcccatcataatattcaaactttaatccaatttaaactgaaaattaaatattattattctcatttttttaacaaattgttataaaatggtatattttgtattaaaaaaatagattaatttcatttgttaaacgttataataatatgtataatagatagtgaagaaagaaaatcccaaattggtcaaacaaaaatatctcacacacaatttattatatatttgattttatttatagaataaaatcaattaatactaaattttaaaactctttttcttttctcttcttaattctctcaatttt

SEQ ID NO: 296557 - DNA, 2028 bp, Cannabis indica
tatacatatatatatttatatgacttctatgtggtgttggttatttgcaggtatcatggtgattggaggggtgagacacagactgtggcttcacttcttgcttttatgcattggttagagacaggaaatcttctattgcatactgaagctgaggaaaaactgggctgtatgttatattttctataattaagtacttttatggtcagttgtgacttgattgcttatgtcttgttgctggtaatcttattatgctacattgctatgtattcagtgaacaattcagagtttggtctagatgttgaagactatcttgtaggtgagttttctgactatctgctctctacaagcttacccaagtgattaattattggaatagtcctgaagtgaatcttttgaatataattgtattagttttaattctctttgtcctggaaatgagtactaactgcatacgcaaatctcatgtatgtatgtatgtgtggatcactatcatagtactgcattcacaacaaagctcattttgttgttgccatgacattcttatattatatgtaagtgtgttctgcatacacacacaacagaagtattacagtatgcctgcaagtggttcctaaagcaatatggatttgacttttttttttgttagttttagttttagttttaatttatgtttcttcttaactatctcatgtgtgccttttttagtttagttgctcttttttttcatatatcaacttgagtaactgatgcttatacctttttcatatttcaggcctttgtttcatgtcaaatgaactggtaagaactaagaagaattataatttctgttgttcatatgcaactttaattgcacacctttggctttgagtgtttttatggttatgcaccttagcatgttacaactctgcatttaagttattcttcttaactggtatgtaagaaggcactctatgccgtaaaatgtggtaatctttgcagccaagatatgtggtgaatcaagtgacagcaggggactatgattgtccaagaaaggtgttgaaattcttaacagaactccatgcagccttccgtatgcttaatcttcggaacgatttcttgcggaaaaagtttgatggtaagctattcattttatatcctctttcccataaatgttcacttgtacttatacttacattcattcaatcttttgccatctactgtagggatgaaatatgacctaaaaagagttgaagaagttcactatgatgttaagatcagaggcttaacagccagggactaaacaaaccaaaaccaagaacaacaagaggatgcctaagtttatactttcttcactattcatcttgtgtagcttttcttttgttaagagtaatccaaatttccaaacatcttttctaatcctcatgtaaaagtttgtgtgagggtaagtggctgaattcagttaaaaaatgacattacctctctacaaggcttgggcctttttttccccattattttaaatgatgccattgaggaactatatggagcatgaacaagtgactgtatctagaaaaagtaactttagaagatatagttttggcccaaaagaatgaacaaaataaaaaagaagaggtagttaagggtaaaaattaggattatgtgatgaagttataacaactggagcgcataagagtaaacatcttaatcattttcccgagaggctttagcggtcacatcgaagagatttcaataattttattacttgacaactttggatatttttggcctctcgtattcaccaaacgtcatcatcacttacttatcagaaaacctaatcatcacttgagcgttaaatgtcaagaatatgatttaaaagggattttttctattttaacctaaaattactcaaaataaacttttatactactacaataaaaaaataaacatttataagatttaatgtatactaatatattgtctttaaaatttcttatttacaaaaatacagtagagacaaataaattgaaaatgatagtgattaggcgggcaagt

SEQ ID NO: 296558 - DNA, 7075 bp, Cannabis indica
ttataatgtttttaaattaatattaaaagttaagtgtagaattaaaatccaattaaaaaatcgttcttagttgaattgaattagattttggattataattgaattatatcgaatgataattttctaaatacaattattaattggattgaattgcaagcatcttttaaggatacacaattatactaaattgatgtggaatcttcacattattcaaccccaaggatactaaattgttgtgcaccaaattacacactaatgatgttacattttgaagttacatcaaattggtatataactttttcttttcattttaactatttttttcattttttcttttcaaattggtcatacataccctcctacaatttcaatttttcttttgtataattttttcttgctgtcacaaaattctggctttgtgagtggtcataaatatttaatatgtgagcagttgtgagtgtgagaagaaggggtgtggttaattcaagttggaaatgatggaggactttactcttaagccacgccaatttgtaacttgacactgtatatatctatgaacaagataatggaatttctttgccttttggccccattaaatgtttatgtgtaacaaccttgaagtgactcttggccaatcttcacacaccctaatgattgcttcaataaataaaataaaaattgaagtgtaggaaagtaaagaagaataaaggaacataactcacttaagggaatatatgttattccacactcaattatacttagttttatataaaatattattagcaatgtgataaaccagcctgtaatatgtaaatatattatattagtgtgtttccaatgccacaatagttttcattgtggaatgattagattaatcatcattacacattttttttctatgtatatatatatatgtaaaaagtactgcacttatacaaaaatatacacatttttttgttggtagtgataagaaaaggtattaattaggaatctattaagcagttggggctgcaacaagatataattatatattatcattttaagcacttagaatttgaatcaattgatgaacaaaacagcacagattctctgtacactttttaagaaaagagaaaagcacacaattagtggattgagaaaaaaattgttctaaaacgaaaggagtatttttcccctgtttatacaaggacaccgacagcataatttcaattcaataagactttttaattggttaatttatttgcaataaacatttttaaatattatgtgctttgacaattaaaataaacatgtgattaagagaaaattatatacaaggggtgataataaataattatataattttttttaaatatcctgaaaaacttattacatgcatgcaaaaagtattcatattagactgttttacttcaatttccttagtccaattaatcataattaaaatctatggtttatgaagattagtatatttaattatgaataatgatgtttcaccgaaaaataaatgaagttggggacatggtggtgatctggttgttaagtcaatccaaaagaagaaaagctgttttgaattatattaaattattatgaataataattaactctaataaattggccaaaggacaatagccattaactcagtactgctgacaaggcatgtatgttgactgaacacccctcctccttcccatatatactaaaatgaattcattctatcttatgcatttttggtacaacaatatccaccatgaagcttcataccattcctgactttcataatggaaaactcccaccacccaattcactcaagaaatttcttcttctacttctatacttcattctcttaactacaatcccattttgtctaagaaatacttctcctttttcattattgtcaccccctgagagtgatgatatcagtagcttggaagaagatgattcaagcaagacttgtaatgtctttaatggaacttgggttccatattttgaagagccttattacaccaatgaaacttgtaatttgatcattgatcagcagaattgtctcaagtttgggagacccaataaggagtttttgaattggaggtggaaaccagatgagtgtgagcttcctttgtttgatgctgttcagtttttagagcttgttagagggaaatcactagcttttcttggtgattcagttggaaagaatcaaatgcattctttgttatgccttttaaccaaagtaagcattcaaaagaaagaaagaaagaatatgtggtaataatagtacacatttttctttataacaataaaaatatctgaacattttttggttttttctgcaggtggcatatccagaagatttatcagacagatattacacagacacatcttatttcaagcgctatttctaccctgattacaactttactatgggaacactttgggcaccatttctggtcaaatccatagagtcagactccaatggctactcacccaacagtcagatgaacctgtacttagatgagcctaatgagggttggttaaatgatgttgagaagtttgactatgtgattgtctcggccggccaatggttctttcggccaaccatgttacacgagaatggcagcctcatcggctgctcaacttgtaagtatgacaacctcacaaccttcacaccttattatgcatacaggaaggccttcagaactgtctttagaactctcttaggccttgaaaactacaagggggttacttttttgaggactttttcgccttctcacttcgaaaatggagcgtggaacgagggagggaactgtgtgaggactaggccttttgccagagaagaactaaaggttgatcagtacatatgggatatgcattcacctcaggttgaggaatttagagtttttgaagagctcgggaagaagagaggtttggagttcaagctaatggatacaactgaggctatgttgatgagacctgatggacatcctaacttctatggacactcaccacacaggaatatgactttagcagactgtgtacactggtgcttgcctggccccattgatgtttggaatgagtttttactctactttttgagaactcagcagagttctcttgatggtaaaactatagaagtatgattcttaagaaactatacatatataaaatatatatatacttgtttacaatatacaatgtttaggaaatatataatttaagcacagttgtgttagataaagtttcagagagagagatgtctgtcatgtacatgtggacagttcataattcaattacacttgaaaagcaattttttattcatcataacttggattctgtggctacttaccacaatgtttacaaattacaaagttggaaaactgtatgcattacataaatattatgattgaagtttattatcatacaccaaaaagtggcatatcaaagtaaagtacaattttttttcaactgggaggaaaaaaaacagatgaaaaaccattcaaacttgtgtaaagacatctcgaaaatattatgtccaatgtctagtttaagcctttgatgtatgatgtatcaaattttgtatattatgattgttgaaaataacagagttcacttcctctagagcttcaattttttaaaagtaacaaagcttatgtaaaatcatattaaattacagatttttttgagcaacaacagaaacattccatcttaattatgtatttattgaataagaataaagttacgagttgcttaatgaattgacaagaacagagtcacctgtttacttcaagaaagaaagaaaacatgagataattcttgaaaatgaatattgtattgagacaattctgaactacacacacacagaggaccataattgatttggattttctaaggcagggatacacagcctctagttgaatccactgtcactgagaacgactacatactggagcattacatcaattgtgactattataatctctttggttttctcaatttccaactaatattactagaaaatattaatcattttctggctgccataatagttacccttagttacaaaaattaggctgcaatccaattcctaacgaagaattaaccgaaaaagctaactcttaactacaaaactaacagacaaggccaagtttctgatcttggctttgtaaagaacctttcacaattggttcaaaatacagcttcagattgaacctttgatctaaccaaagctccattaacaaaagacaagatgtgactgacaagctcttaaagattcccaaatgccatcattatgtgaggtcatatgtgtgaagacaaataacacagataagcaacactagttgacctcaataacatcaacagctatcgcaatagtaagacaggactcatttagttttcatttgagaaagttgtttccaattaaagagcaaatgagggtttgcaagtgactcaaccaaaagaaatagtacaaattgaattgtacttcataattgagacttattttcatcaaaagttgcatattaaagcacaccatacattttaaaccaaagaaaaatatcagtagaagatgaggatcaggagtccagaagtggattaagcacagctccaaagaagaacacaattccatgagtctcttctctaatcatgaacaagaagggatgatcagccacaaagctaggatacactctttggcattgcatttcaaatataacagcagtgctagccgtggcttctgtcccttcctcgttgacttcaatacaagacttgtggaatatttctgaaacatagatgtccttaccaagaataggacaatcgatcacttctgtaagctcaccagcttggaaaggtagttcaagccccatatccttcatggtctgtttcggttcaaacccgaaagagaatttaaattttggaatccaaaactcagtgagttgtcttttgtcagctcatattgttgattcaaaaaaattaggatttgatttaaccatttggattagattgaagataccatccctctcgttcggaaggaaaaaatacatggaaaatttacgagagtcttgaccacttcggtatggaattttgagaaccttaaagccatcaaagcatctgtatagatgtctctcaaaagggttactagtggtggtcataaaggggactcgaacagtttgatcgttaagaaggcgaaagtttttagttcgagtatttgaaacatcaaattgtgtgtcccatgatcctttgaagtagagtgcatttgcaaaaacaagtacagtcaaaggatctacagacccataagggagaagttcagttatgagtcctctagtcgctttttcagcccaagaattcacttcatccaccgattcatcagccttcagggagaaaccacaagcaaaaccgaattaaattgatactttttagtaacaatatatgtatatgtgttgtgtatgttgagtataacaaatcaagctattcaacataattacacaagttcatctccatggatctaaaagtcaaactataactgagaaagtcaacctaaatgagaaagttaacgactataaaaagtggaaaactatgagatttaccttggtacagaagtcaacgttttttatctgggctttgtgagtctctttcacaatagcttcaaatgatggcttcaaattgtacctttgatccaaccaagccccattgacaaacgacaataggggaccacttcttggacttgtactgccttcatttggtgatatcagacttgtgacatgtgaagacaataaactgagttcatcaacactttgtgatcccaaaaaccacaacagctgttttagagtacgtcccgttgaccctgcggctaccaggcttaacacaacatgtaatgataagggtgaggccacaaagtttgaacccttaatggcttcattttctaaaacttgggttgccaatgccaaacagaagttggtattgaaatgtttggaggggtttggttttgatgaaagttccattgaggttatctaagctcaaattgaacgttgtaggtgtagtgatgtttcaatatacttgactcctcttaaatagagttacaagaatgaactgttggactttgttcctcttgtaataggttgcttaatatccacgtatacttcttgaagcatgcttggtatccacgtacatgtacatttgactacatgtcgttttcccttgagtgtctccttacacagatgaatgacaacatgttgggccaaatcaactataaaacatgatcaaattctaaagaaacgacatgtagttttctattatgcccctgtaattgtatgtattatgtaacgctgacaatttcctcattctttcagatgaaaagaacatatgaggcagaaacggcatgtagttttttgtttcatatgtttgaactttgaattgtatcttgtttcgtattaataatgtaaactatataaaacgtcgatttctgtcaaaacaataaaacttatgaaaagatgttttcacttgatgccgttttgtttgatcataaatgacatttactttccttctggcaataaaggaaaatgaagaatttgctacaacatgatcttgagagtatagataaaacattacattatatatacacaactataattcatacacgcaagagttcttaaggtaatctccttttttttcctagtatactccattctatattggaggcataaaaccaagaataaaacaacgtattgaatcagtaacagcatctccatatatattttttatataaaaatacatatattatattaccaaaatgaaattttgatgaagaccaagatgtgcaaaactaaaatgtaaagcacaaaacctgatctgagtaacataagcctttgctgactttcatttcggccaccagaagaataagggttcttgtaattaggttcaccaatgtaatcagaagaagcagaccccttctctgatgcacttcgtacaaaccgatttcttgctgcattcacttctacactgctactttcaagccgcctccacacaccattcaaattttctagttccatcccttttacatgaatttcacttaccaagccttctgcttgtgcct

SEQ ID NO: 296559 - DNA, 2601 bp, Cannabis indica
aaaaaaaaaaataaaaaaaactcataaccctatagtattatttatttatgtcataatgtaaaattcactctaaaatattaattgatccaattcaacattcaatagatgttgaatagattcaataactaaaattaattgaatctaatggtaaaatctaacatccaatcatatattaattaaattcaacaccatacataaataaagtaatttcttactttgtgtgaatcataacctcctttcgtcgacaaccaattggatattctcttcacacgctccacactccaaaagtgtaggggtagttcattcaacttattcccttcaccccatttgacatgattgaagtaataaagctatatacgtaacacaactaaaactcatcaaaacatcattaattaatactaacatcatcatataattaattgatcactatgaataattcatttgataggtttcgatggtaccggggattgtacatgagacaaatgaagtgcagatgctgaaagatgaactcagcaaaatgaaaaatgaagttgagtcagtcacttcaaatccaataacaaattaaatacattattaatctcataataatctctgacttaattaatattgactttcactgaaaatcttgctcatcactctattatatattagacaaaacaattagtttgttatttctgttagaagtagtcacagacactttccaaacttctttctctctctctatgaaactattttccactgctctgcaatcattgagttttggttgtaataaaagcttgcacatacgattactacatgatctaattattagtattattattactcaattctctatactcatgttcaatattcaattattgttttcacattaaatattaattgtggcaaaaagttgtttggccatgcgacgatttcaagactggctggatcagaagattgggaagaaatgttctttggaaaagaccttaggaactgtgagcatgtacgtatggattataattgattagttttattttagttaatctcataaaacgctttactccagtactcccctctatcaattaattttatatatatatatatgtatgtaacaggttttggtcccactgtcagtcccaatgggatggtggcatatatgtgatggcattgatgaagcatttcagggttcgacagcaggataacatgtctcacaaggtatgtttatgtttatgtttatttgaatgaaattagacaacagctgtgtgtgtaataaggatcctaatttggctcattttgttacagattgacttattcgaccaaaaagaagatattgttttacaacttgtacgccatccaaaaaataaggtccgccataataaagtttgcaagtttttcaagaaaaggttggaattgtatgggtcaagggagtcagagtagttttttccaaccatatgtcatgtactcaatagtcatgcgtagtgtgtttgagttttaacaaacaattttcttagtgttttctcacttctatactattctacaaattatgacatcttacaaccacttttataactagaaacacattatccgttgtagaatatatcataattaaggatatatatgattccaattgatcaactacaaaccaaaccacgtacagagtaacattatcatgtattattatctcaacttagcaacactaataaaacaggctccatacagatgataacacatatgttttaaaaatatatcaaaagtagatcataagctcattgttgacaaggttaaaacacactatgctgcaagtgaaaagccattgaatcaacccatctcatcagcataataatcttccaataagcatcattctcatcttcaaatcaaatgcttgatgaagaagatgagatctcaccaaatcaaaaccatccaaattcaccttaaaagccaccatgttctcatcatccaaaaccccatgaatcctatgcattttgtttttataaataacataaaaaatcgctaactaattataaattgctctgtgatatagtatatagtgtcacttatttaaatcatccaattatgtaatcgcaatacttagccatttttgattaattagcaaagaattaatacttaatgatcattacctgccctgtcctagctaggttcctcaatacaatatataaggctatatatatagaattgttgagtaaaaagaacaatcaaacgataaagtattccatgtccaataaataaaagataatatattgtgttgttaaaggtgtgtgatgaagattgattgacattattaagggttcttttttctttggcttttcctttttatcttgtcaaatttcatgaatgttgcactcttttttatttgactaaactttatatagtcaatgactatctatagcacatgttttttaccacttaaaagtgactaatagcctaatagaggatggtgatcaagtgtacaggcaggcccggccctggacataggcgggctaagcctgtgcctagggcccactcagaccagggtcccaaaatttttttttcctcttttaaaattatacatttttttaccgattttgaaaaataccacatttttctaatataagggcccaaaaa

SEQ ID NO: 296560 - DNA, 7850 bp, Cannabis indica
aaaataattaaaaaaaaaactcaatcgtagatgtacaacagcaaaaacctaatcgtatttttttagatttaatggaatttattttatttattttattatatttaaataaaaagtgatccatgaatttctcataaaccattttatttttaatataaataaaaaaatcacccataaatttctcataaatcaaaaattatgttatataaaaacactttatatagaatagatatatctattgtttatttttcaatttcatcattagaaaatttgatatatgaacttcgtattacctttttttttttaattagtcgtataagtctcaaaaaaaaaaagtatatgttatatatataattaattaaacggactaaatcaaccaaaaccccaaccattttatatgttcttttcttagtttattcatcccttttagttcctcgtaagtttttttttgttttttttttctttttcttgatttgtttataactaacagaattaacttttttttatcaatctcaaagttgaaacatttgtttttgaaacatatttttcaagaaatattttttttcacaaagagaataatatttccaaatcaatatgtgatatgatttgaagtttgtcaactgaaaggagctcaaaagaggcaggtaataattatattagaaaaagatcaatatgcaaattaaatggtccgaaaattacatcaccaagactcattattattggtatttaatttttctttgttttgtataacaataatataattgtcatcgtagtctttctcatttgtgtgtcatattcacaatttttcacattttaaatattatgtacacccatggccataacttcatggttggctacatagtttatgttattaaatattttttaaataaaataaaatatccatgtgattatagagtaaacatctacattaacattagtgattaaaaaaagaaaacaaaatagttaaactaatattagaaacttttaaattagttttaaaataatttgcgacacaactacgttaatattttatgaaccgacaaaacttaacaatttacaacaccataaatagtgtaggaactatttttaatggactgaaaaaattaggagcacactaatacataggtcgaaatttcagggctaaaaattataaataactattgaattatcattaaattaaaagacacaattaatttcatattttccgccgcaaagcgcgagttgtttactagtatcttttttaaatatgtgcagagaatttcaaaaaattacaataaaaagatatatttttaaaaaatttaaatttgaattacaatatttaaaaaaaaaaaaaacaattttaattggccacacttaatataaaaaataatatatatattaaatatatatttatggatatggtcaaactattactcatatacaaatttaaaagcataataacataaaataataccaagctcttatttatttatttatttattttgaactttgtttcttagattgatcaaataaactaggggcaagttaaaatctactatctagacaaaagaagaagaaaacctagctagaagctaaacagaaaataataataataataataataataataataaaatattgttaaggaaatttattgagcaactaattacacaaaatatttatgattaaattaataacatgtatgacagactctacacttgaaaaaacaaattactattaagaaaacatagacaaatttcatctttacaatttttgcatggaagaacaatgacttcaccaatgctgacttgacattattaatctaaaaatcaaaacatatttactaaaatatattgaagttcaaaaaagagcttttatacacttgtctaattcataatgtgatatattcctggacaaaatggttggtcaagaaaagatttaaatgaaaagcaatgagaataaaattgataatattaatttcaaaaaaaaaattaagaatactaaaaagtcactatcaaatcataacaagcaatggcataactatttttttttttctttttctcttttttcaaataatccttgagattaacgtttatatgaaattaacaaatatagattgttagccattaaacagagaacacattgagttttaagacaaaacaaatgatcatgaaatgataattacagacctggagcaaaggtgagctttaagccttgacattttgtttagtgataaattaaccgtaataaaaaattaatcattgcatgcatatataaagtcaatttacgcattttctacccctaaaaattgaaaatagcagattcaaaaggatgagaggcttccgatgcaacctcttctttacacgagcacaatttctaatgttaggcttgctataactgtattatctttaatctcattattgtatataaccggaattaaaactgtcattgcaacttaagtatctttccattaggtggggggaattgaactctccgaaatggccgtcttcagtggagaaaggtgggacactgatactgaagactttctaactggtcttcactcttcagaagaacataattataaaaagcttttttgagtgtggcagtgaaaagcttcttcgaagcgtacgaaaaagaagatattgtcgcacaaaatagccctaatatgaggcgcatcatatcacacaagctttggaagctcttggaatccagtgatttcagatatatagatacttggtgtgaagaaaaatatatgaataccaaacatctttatttacctaataacaatttagtaattaagttacctataaactcctggaatttatattttccagtgatgttttctgtaatatataaatttatattaatgtatacacaacagatgaaaggctcatgtattgctaatctctttaattagacattcataagaaaaccatttgttttatttgtacaagttttaatcacagataacggccatggttatgacttgcaaaattagaaatacaatactaatgttgctcttttgagtccattgtcagcattttgtcagaacaaattgatcaattatgttcaaaaatggccaatgtagagcatcgccgatagtgtagcaagtttaacttcttctaatatgaaagcattgccatgtacatgatataaaaattctgcttaccctcaaaaattctgttttcaacagttacccaaccaagctcatctagccatgcttcccattttgttatgcagataggtctgtctgaactctatactcctctccgcaagagcatttagcaacaagagaaattccctagggaacaaaaagatttcagaatatgagtcgagctctttcagattttaaatacttgtacaatagtaaacacagtaaaacaaagatagtggactgatggtaattattttatatttctgtattttacccttattatttcataagctggatatttattggttaaatagacaaccatattggtaaatgggaggtctctctaacaaacttcctaacatggtctttgagcgaaatttacaaaccacatgaaatttttatattgatatcaaaaccatttaattttatgcaatcatgctatattgagttttgtaaagaaagaaaggaaaaaaagaacaccttattagccatttaccttaagtttttcaacttgttcccgcagggatttcaagtactcagtctctcctgctttatcagataaaagagcattgtgttcctcttctagagtctttatatccattgccctcagttcaggcttaagtagcaatgaaaaggggagacaaagtagatcaaaattttttcatgataggaaaagactgctcagatgaattaatgagaaacagaccaactcaatattaagaattgcattattacattcatgtttttcttgtcatcagaaactcgaaaatccaaccgaatttttggataccattccaaccatctaatctatgtgaacgaattacaattaacaaagtgcatatacaatcccagtattaagtctaattagaagggctggaggaataggtcgaaacaagtaaaaatgcatacacgtcaataccagagaaaacatctaacctgacaatcaattgctctacaattgactaggtcaatggcctgttccatctgaaaggcacaaagtgagattcagactgaaaaatatacatgccataatcacttcaaatattaatagtgtgacaaaagaagccacatcaaattacgttacctttgtgttctccataacaagtttcaattttatctctgttatttctgcaagcttggccttaactgattccaacttggcatttgaactttttgtagaactattttcctgttattctaagaaatttattaataaaaacatcaacaattttagatatacaagcaaataaatgaaagtctttcaccagatggtcggccttgagcaggttgatagagctatactcccctgcaaagagaaaacaaagaactagatgtaaaagcaagcatcatatgtttaggtaccacattgttgtgcatcgaaaaattggagttacgatacaatatttctaaattttaacaaatattctgctaacaaaattgtataattctaaaattcagacagtgtgttcgttctgaccctatgaacttatgaagggtttatccacgtgaagatgcagctttttctttctttttctgacttcttcttcttctattttttttttttggaataaattgcctatacaggtcttatgatttacttatctctaaatcagcaagattttacctatgattatttttttttctccaatgaatgctccaatagaagagacagaaacaaaagttaaaattcaatagttggaaataaatcaagcaaactatcttatacactaaataaaattgaggggaattttcatgttttatttataattttacgacttaaagtttctatttacaaatatacgtttgtaaatttttaaaattacaaaaatagaattttttcagcaaaaagtgagaaaactaaaaaataatgagaaatcaaccttacgacaactataaatcaactataaaacaataaagaaataactagaaaagcaaccccacaacaactataatacaactataaataaactataaaacaacaaaaaaacagtttactgtttttactgaagaagtatttttgtaaataaaaaaatccaaaagcgtaaaaatgaagcttttttcgtgaagtttttttcatattgacgtatttttgttaatttttttaaatttttggtctattatgtaagaatttctaaaactaaacataaagctataatatatatttatatatatatctaactaactgaatggtagttcactagcactgcatgtgcatttgacagggtggcagttgtggcaactacatatttgattgccaacttgagctggggtccaattacccaactggtgtttgaaagcataatggtacaaataatctcaagccaacatataagaaacagtttttctacagtgcagtatttgacaaacaacttacaaagaacataaagtaacaaattcaaaaatcatattaactgaaatatgacaagaaagtctaaaagcaataccttacagatttatgcatttgtttatccaaattatccataacctacataaattcatttttagtagggtagcatagtaactccaatctgcaggactttattgactctcaaaatgcttttcataatcaatcgtaacaaagaacgaatatgaaataccacataaaaatttatcttcaaaatggttttcctagtcaagcagtccagttaaaacgcaaaatgaagttgcagttacatggctaaggtagaatgtaggtgatggataagtgatccagaggaactgctaatggcaattaaagttttgagtagtgaactaccaaaatgagctatatgggaaccacacacatgaacacatactaagcttgtcactccctggaaagtgaactaccaaaatgagctatttgggaaccacacacatgaacacatactaaacttatcactcctgaaaagtgacagagaatggtttctttttgtatttcttaatggaagtacaacaaatatgaaagctgtgatagtgtataatgatgctgaataattcaagcaaaaaagaaaatccaaagaaactgtctggattcttggtagttagacagcaatgaaagatatgatatatcatgtgaaaaaagaaaaccaaaacaggaagtgacaacaaagtaccattcccagatttcttgtttctatcccagtcatgagagttttgaaggagtcctaaccacatttgaaaaggacacatccttaggacaaaatactgtaacataaacattcatacacaaggaaattcagttcaggcagtaaccatttgatcctgtaatctagcatttatgtcttctgcaactttgaggtagtaagtcctgtcaatggaaatcttacactataatatttggtatgaagcacttgaataattcttattttcaagctacattaccttttctccgtcagcttggcagatacgctaattctttcttgttgaataagctccaaagtctatttgttgaacaaatttggagagagaaacatatacaagtttcttataaattttattctattaaaagaaaattattattttcaaattagaactaaaccaacttgaacaaagaaaattagttaagctaagtcatccacaaattagatagtgtattgctttcatttgtctacctgagaaagagtggatgaatcggactctaaagaagatattttcctatgattttccaatattttagagcatatctcgccctttgtcttcaacattgcttcattatccttattgaattgatctacttgtgattttgctgcaaaatcatccaggacagtcgattgaagacgacgacgatgataattacatgaattgatatcatcaaagtgaccatgcatatttcacttatttcattctagaaagaaaattagatcgctacaaagatattgatactgtcaacatcataggtattaaatttgataatattcaaggcaaatctaaagtatactcaaaccgattcgattgcaattaccttttcactaagatagtaagatatctaaatgtttaattgtgaatgcatttatgtttaaatgttggagtcagattcatagacgatgtgatcaatcaataaggaagaaaaaaaaaagaaagatcaccataactaagatcgttctcaaaagtgtgaagtgtcgtcaattgcgtttgttcttccactgagaccttcgccgcctgatcttccacatctgttgtttggcacatttgaatacaaacaaaagaggaaaaaacaaaatcaaaatcgaagttctccacctcgattagtgaaaattcaattgagagagagaccgttcatttggaagcgcaaggtcttcatatagtgcaagtagtcctccatttccaattcaaatctctaccggtctgttaaagatgaaacctccggagctgtagtaagaaacgttgccgacggtagaggcgaatttcacgccgatgagaggaagggcagaacgcgcgcgcgcctcctgctctgcgttttcttttttctgtgttgcctttgtttcaaatgagtagaaaatggagatggaaattggcggttaatgtacaggcgtccccatctccctacctatttataccccattcccgtctaataattaacaattcggagttggagaataactatctggggaacccatcaggtatccattaaagtaaaatgaaaaacaaaattaatttaaaataattgaaaaaaataaattaaaccagtattttcacatatatgtctcaaagtttgaaaaaaaaaatcataattcaagtatag

SEQ ID NO: 296561 - DNA, 2163 bp, Cannabis indica
attaaaaaagtgttaccaaacggtacttttgttttcttaaaatttaatatcacttacatagaaaaatcccctgaaaatataattaaaagctaagcttacatcatatagagtcatcaaatttcactctcgaaaacttgcaggagccaataataacaacaaagaagccactagggacatgtcaacagtggaagtaggtgaattgatgaatcatgagaaatcagtactggacactataagcaataataataagcttattgtagtagtggagccgctgagcgagagtgaaaaccagcttaagcagatactcattaagaatcaactgttccttaacacagcagaggctctcttgaagctccatatccccaataatggcgatcatgatcatggtggtgaccatgaagacaaaaagctgatattagactgtgggtatgagctgatgagaagaatagggagaaagcatgagttggcattatatccttgttgtgttagtataagtttggtgaagataacaagctttgattggctagtcaaacaattgagtaaggactttgagaaattgagatcctacggtaggaacggtgtagaggatgattgtgaagtggatgagtatctgcctaggatgttggaaagtgatgtactgtttaacaaagatccccatgtgaattgcatgtgggatttgggttggaatgaagacatgtttgcattcgttgaagttgatgaagttgtaagagatgttgagaaacatttactcaatggggtcttagatgatatcacaggtgatcttttcttacaacagatgatgactatgagtagtactagtactgttcttagttattgaaataataacttaagcattttgttacctatccaatgaaacattttctttatatttttccaaagccaaagagaagaaaaagaaaaatcaattgttgtttctttttttattaattttgttatttcaaagtatatattaatgggtacgtatacgtgttcatatataattatcatgggggtttgatgtgtataataatttaatttctctaaagttttggtattcactagctagctatatatcaataatatttgcttgtgacactgcaagaagtactatttcataggcttcggtttactttttcttttttccacaaccaaactatcagagagtattaaaaaaaaaacaaaacttaatcgtgtttctaaaatgcaatatcgacaagcaatctttattattcaaagctagatacttttttggtgttttaatttgtatttttattactaaaatttatttggggtcggaattgccgggcccataacattcacaatgtggaataaagtaagtacattgaaatgaaaggcctttagggaagaatcaaggatagctacctactccaagtaatgcaaaattggtccgttcctattcaaaaagacccacttaaaaatacatactatctaactttatgaaagatatacttaggtcatgcattaaatgctaaaaaggcaattgtgaacttggagtttattgcttaagcatatttagtccaaaagtgccaaatagcacacatgaaggcaatgataataatttccgagttttttttttatttttattgaaattatcataatgatttccgagtcttgttaagctacgtttatccaaaagtgcaaaataaaaatgtagcatctgtactttcgcagggatcgaacacaagcacaactatattctattatagtgtgatcaatgtctataaaataatgaggatttacacgttaattactccaaaaatgactttttgcgtcaccccataacatcaaacattaattgacgcaacactttgttataacgcaacaattcgttaataacatcatattacaagtattgatcccattaacaacacatgttaaagacaatataaattttacactgacgttaaaagttattaaaaaaaaaaggggcttaagcctacataccccaaaccctacatcattctctatctttatcatcctattgttgtgcgcgaaagcaataaatagcgaaagatagcgataaatacatatatcaaagcggtgaataagaaaaaaaaaacaacacacacacacacacagaatcacgtggttcggcaattcgcttacttcataggaggcagctaatattattaatctgagtag

SEQ ID NO: 296562 - DNA, 4665 bp, Cannabis indica
gagaaatctcactataacagacagctactccttgcactgtctcatcaaccgcgtaaaagtcaggtcgtgtcacaccaaactcatacttcagagcttattaaatgcgcacattgtaaaaattatttcctacacctatagaaaaggacatgtgagtctagaggtaaagagatgatgtatcaattaccccgaaatatctcatttctctgtctataagtagagaaggaatgtaagagaaaatgggatcaaaattcagagcaaaagagagaactctaaaaccaaaaaagagagtatgctatattgtaataacaatattaccttttcataagagtgacgtaaaaatactcttctttacttataattaacttttgtaaaacaagattaaatagttgccgaaaatctcgaacaacacataagtatagtttaacaatgcgaactacataagaattttcgccgcaaatatccccaataataatagtaacgtacctttccaaataaaatatcttcataaatttgaaaatttatgtatcattttcctttatattttaatgggtaaatactatttttgatcctgtagtttgcaaaaattagtaattaagtcttttattttgttaaatgataaattgaatcctatattttttaaaatagtactaaatttattattaaaaaaaattataaaaaattaaactttgagtcctgtttatgtcatttttgaaaatacaaaatttatcttatctattaatatttaataaaataaaaaatttaaaaatagatattaaccctattttaattgctatcactgctctttctggaattataaaaaattaaaagaagccgctgaagctctcaggtcatgcttccgtggcagaaaggttttggcacaagaaatgtggttgtggcagtcaataattactacctattcctacggcgctgtgtagctaggcaaggctggtgtcagggggtctaaatactgaggtggagtattatatcacacagcagaaaaagaaagtacagtcacccttcccacaataaattcagtttaaatataatacttgtataaggcacaattagattagattaagatggtcttttcttttttaacataattatgaataagagagagatggttgcagtgcaagtttgcaacacagcaaagatttgctgtcttttaacagatagatacactggtgtgtaaaatacaataaattgattggatataggttggtatgaaaacaaaaagatacataaatgaaataaaaagcccccaacccccactcccaaaattaataataacaagtaagcatcccttagtagttagtacattagtacttagcttagttgtcattgtttgtctgttcaacaataatattatatgtatgcttaaaaacaattagcttttgccaccaaatttcacaaatctccgaaaccctttatgatttttggtcagtgccaccgatttggtgttcatcacacttaaattacaataactactaaacatgatgtataaattggcaacaatataacatttcactagtaacttgttgaggtatatatatgacctttttgcattgataagactatgaactacaaatattgccaagatacaagagagaagactaactttacatgaacatatatatacaattctacagaagattaagaaacaaaagaaaaacttatttttcataaacaaatggaagtgagcactactaactgaggtcaaattattcccataccttgcaatgaattacatatacatacatctctttctcatatattcacatgttgattgttgaactatcacctgttttcttcaagtattgggaaaatcaaggaaaaagcttcacgagctttgctcaagaatgcaaaaccaagaatgatagcatcaatcagcataagctgcagctctgcattgcagttgccactccatacagtcttcgaaatcgaaactgctagcacaatccaacaatgcgttttgctgatgttcataacggcatatgtaattcaaaccaagaagaagcttgcatatggcagcctcagtcttctctctatcagcaaagtacaaggtctgaagcagaagaacatttgttcgcgttacaatctgctgctgttcgaaatttcgctcactttgccatctgatcatgttatgtgccaatggagctaaccatttcaataagccatcaagagtttctttccaatcatgagcaagaggggcatcatatattgcaaagttcttcatataggacttgagattagtcctcaaagataatcttaagctagttggtaacatctgataaagatcatctcttgcttcctcgccaacaaggtgagggtatcgaagtaacttttctatgacaataatgacatttgcatagtgcaaagctagagctgagccccccacagttgaaggaggagcatagcaaactagcctacttttgggaccaaatctcgcaccattcatcgagtttgattgcctctgatgatccatactaatcagtgagctactaaaacagctagagttgttcctttgctctctccttgatccattagttaaaataccactacgacaagtagaaatttggctacctcgatcatcataatcaccaccacagccatcataataatcatcatcatcatcaaactttgaaactgaactacttaaactaaggcattccatgaaaagccttccagggctagttccacaagggaaaactatatcttctggttgaaacatggccaattcactccttcttgaatcagcttgagacttaaaactcaaccccttcttgagcattgcaccactattcttcttgctgagaacccttctaggtggtaaggggggggctgctgcagctggggaatggcggcgacgatcgagctgacttgaaacctgaatgccttcatccttgttaggagattgagaagaagcttcaaaactcagacaagagtcaccaaaaacagaacaaatcctagcatagacagtacacacagttctggccaacaattcaacaaccttgtcatatgtttggttccaaagtgaaatgtccctaagatgcctcacatcttgcttctgccacatgaatttctgctcaaaagccctcttactttcctcatgttgattatgctgaaatttcttcatggctcgctccaattcattcaaaacctccatctcgctatacaatctcgcagtggcattaacgtacctctccatcttcctcgccatagcctccatgtcctttaccaaaaaccccaactccttcacttctataaccccactcatgatatcagagtaaacatgttcgaacccttgaagagccggctcggtacacctcttacccagtcgagacacaacggctgcgaccctgttcaggtcgtcaagcctctcggctaaagcaagctcaagaagatatgactcgtcagaggagacaagattctgaaccccctcacacttcaagatctcgttttaagcttggatatctcggactcagtcagggacttatagaggtatacagttttggacataacattagctacctcgaaagagagaatgcctatagtctgcttattattcttcttatcactatgctctgatgagtttctaaggctttttctcttcgaagtttgaagaagaaaggtttgtttcagattggtactaacctggctacccatcttcaaaatccaaggctctgcaaccattgtagtagttgcagagagaagaaacacacaccccctttaaagaaaaaaagaaatgggtttttctcagaaccaaagatgagacttttcccttggatttggaaccagaattttgagaattcaatcacatctacagatacccattaccctcaaaagcttaaaaaaactgcatggaatactaattaggcgtgaaacaaacatatcatgattgaaatggcaaacataaatgagtacctgggaatgaaattttgctgagaaaaaaaagaaaagaaaagcagaatgaaggaccacggaaagagaaaaactctgaaagaaactaagcgtggtggagtggatgagaatgcgcaattgattgtgagccaaaaagagaaaatcttttttgtgggttttagcaagagaatcagttgcagcgttcgtaagacgctctttcaaggtgttctcagctttagctttcgaagagaaaagaaagaacagaaaaatgagagatcggtatttgaaagtgctctgacttaagtaacagggtagtttttattagatatttgaatgtattaggtttggaccttttgttctgatttgactaaaatgcccttaacaaattaatttttttataattatattgactatatatgatctctgcaagtctgcaacaatgaaagtcaaacataaattgaataaaataaaacttattccaaaataggtatttctctagttcatcttcttggagtggaggttagtgagtgagtggttctggtaaaattaatttaagaggacaagtcttgagctaaaattagctataaaggcatttgattgtacatgggtctacttctttccttttttatgcatcaaaaactaaaatggagtgaaatgatttcgtttcatttcgttagataaattaatttaatttaaaaaaaaaaagagaaaataaattcacagaggaaagaagtgattttgacttggaatcgatggaaagcatta

SEQ ID NO: 296563 - DNA, 744 bp, Cannabis indica
tttttttttttgtttttaaaggggttaggtatctacatatataaaatgattttttgggtgggtccagatttttgggtgtcacaattttagaacccaaacttggctcggtgggtaactgggtgtatcctgaacccatcctataattttttaaacccgtttatttgagtttttaaggtttcgagttaggcgagtttcctaggtgggtgggtttttgagtacgaatgtgccaccctaataaagaatgcctaagaaaattagacaaaaatcaacaactctcacttatgctcttgattggttcaattccttgataaagagttgtaggaaatttaactctgatatatatgaattaacttctgtaattctgacgtctctttagtgtgttgtgtcttttttgttattcattttattctcttgtgaagtcctctttatatagaccaaaagatccaatatgtttgctatcatatttgacagttaagttagttaatggataactaactaactaaccagatcttagttaaaagtttaaggaataataccataagagtcgtataacccttgaacttgacatattaattgtcaaaacatgaatgtggaaatccaactaattgccaaggccaaaaggatgaggatcgcactctacaccacgacgacatgaactcgttatgtgtcaatatatatctttatatattaaaagtgtttatctaacgatatttttttggtttaacagaatataccttaaaaata

SEQ ID NO: 296564 - DNA, 2693 bp, Cannabis indica
ttaagtattcgccttcaaaaaaagaattaagtattctaacttttccaattcttagctttattgctctaggaggattcattagttcctacttgccatctattaataggcatttatatgctcgttacttttactggcatgttaatgaaaatacagatcattcagtctaaaagttcagtgctatttttcttcttttctagattttctctcttgattcttctttcacttatatcttttctctctcaaatctgtaagtcttgctatataattttgagcttatataactgttgacagattgcagttaaagtttgatctctgggaattcgggtatccaggatggtgaagctaacaatgattgctcgtgttactgatggtcttccactagcagagggacttgatgatggccgtgatattagagatgttgaattttacaaacagcaagtcaaagctttgtttaagaacctctcaagtggccaaaatgagccgtcaaggatgtcagttgaaactggaccttacattttccagtatccttgtgtgttctgtctctgttctcctttctttacttgttccttatttattatcaaacgacaattttattgacaatgtgttcagacacttaaatagtgttatactgatgacatgatatgatgggttcatgtagttgaagttgttgtagttaattagtctactgatcctagcatgctttggatgttggttgtcgaggcctttcttacattcacatttgatcatttaacttcttaactctagaactgttaatgtttggggaataaatttaacagacctatctgtaaagatttatttcagctatgcttatgacagatacatgatttcattttcaaaatttactttgtggattgtacttgtaacttttactgcgtgcattcctattttgatcgcagtcaactctaacttgtatgtaaccttgacacagtttcttagctatataatagaaggtcgtgtctgttacttgacaatgtgcgaccgtgcctacccaaagaaacttgcttttcaataccttgaagacctcaagaatgaatttgagcatgttaatggggcacaaatcgaaactgctgccagaccttatgccttcattaagttcggtgtgttatcaatccttttgtattttaaactttgtggttaattaatttggtctgatttaagattcttttgtgtttatagatacatttatacagaaaacaaagaaattgtaccaggacactcgtactcagcggaatatctcgaagttgaatgatgaactctatgaagtccaccagataatgactcgaaatgtgcaggaagtccttggcgttggtgaaaagttagaccgtaagataattttccatctcctgtgtgtggtgcaatttttctttatcaatttgaatgatgatattcaaatatcaattttgcagaggtcagtcaaatgtctagtcgtttaacatcagaatcgcgcatatatgctgataaggctagggatctaaatcgtcaggtcagttttgtctgcttcatcaatattatgctgactttagtttagttgcgtttgcgtgttagatgcattcgtaattctttccaatattgtaatttttttccatcttaaatcctctttgtttaacttcattataggctttaattcgaaagtgggctccagttgccattgttcttggtgttgtgttcctcctcttctgggctaaaaacaagctctggtaatctagttgagctattattttggagaggataatgttttcactgggctataggactgacgtttggttacttgtccaaacattacgacttgggagtcaggtttggtgcctgactctgaggctcatgaatgattacgggatgtcagttacaagttcatcttagttgatggttcaggtaatgaaacctgtaactgacttcggagaggagacccttatatcagattaactagtaaattacagtaatataatactacaacaattactattgtaagtgaatagaattttcatttttgatacattctatgggtcatattcattcagtttcaattttaatagaacggctttggtgtgaaaacaacttccaattaaaccggatatgttgaaagctgtctgagcacaattactgtatgtttcgataagtggtaataagtctcagcaattcttggcatcggactgtgttcatgtcgtgtcattgcaagtttgcttgtctagttgatcaattttaatccatcccacaccatttatgattcatattaagaaatttcaaaccttggtccatcaactcattgtgttcgtaacttcgtatgtataaaaatattggaaaaaaaggaaacttctgatatatgtaaaatgtacactttgtatcaaatatggcatttttaaaaaataaaatttaaaatataggataaatctaagtaggaatactatagaactttaaaaatgcatataaattttattttttatataattaaaactaacttttcttttttatgataaaactgatttcttgatgaaatcattataaataaggaagaatatgataaaaaaaaatttaaaacttatgtataaatttaacttttatgaaattaatttcttaataaaaaaattagtttgggaatatcatatttttaacttctctggtttatgcttgggaaatttacacccattactttttttttctaatttctttcattt

SEQ ID NO: 296565 - DNA, 3067 bp, Cannabis indica
caagtttatgcttattatatggtattatatttggaaaacacctacatccaaaggtcttaaaagctgtttaatcgggttgaatgtgaaacagaacctcaatgggggatttgttgcctagaataggagtaggaagtctgttgtgaatgtagacaacagttctaaaggctttatcccaaaacttaaggggtaaagaaacttgagctaatagggcaaggccattctcaacaatgtgcctatgttttctttctgctaggccattttgttggtgtgttgtaggacaagggtgtctatgttttatcccatggtctgtaaggtacttagtaaaggatgtaaggtacttagtaaaggatctaaactcaccccccaatccgtgtgcaaacattttaattgtttgcctagttgtaactctacttcagctttaaaatttaagaaaactttgaaagcatcagatttatttttcaagaggtacaactaggtaaacctagagaaaacatcaacaaaatgtatataatacttataattgttgagggaagtagtgtgagatggaccccatagatcagacactactagctgcaaaggttcagaaataacagtgttaaaggctttgggaaatagaaacttgtgaattttgccaagacaacaagcagaacatatggagaaatgagagattttattgctgatatgaatattacaaggctgtaaaatagtgtgtacaactttctcaaatggatgccctagtttattatgccaaagagtaaagtcattttcaacttcagaattacatttaatgcatttggacacgacaactttggcattattcatggtaaccatgtaagtggtttttatttctaaggaatctgagacaatatctactggtgtgggaggctttggcaggttgctcatgtgttggagggacaatctggacatggcttgactcaaacgaatataggccattcttgttcttccccatcatcaatgtagtatgagtcaaattgtccttgacacaacacatataagtataaaaattaaaaaaacacattattgtcacgtgcaaacttagacacactaataagatttttagttatttctagaacatgcaacaagttgttaagaataagaggttcaaaagagttatttggtaagagaaaagattgaccaacatgctttatagacaaacctgttccatctcccatatacaactgatctgaaccaccataattagtgctgatgccatggttttgagcttggtaggtccagtagtttgtgcctcctgaattggggtaccaacttgtgtcattggagctattgttggttgccatattcgcttgagcttgaggctgagactagggctatgttggggtctgagatggattggtactatttgctacagaaggtcttgagaaagacttgtcatatctaaaaaaggcaatcttgcacagcatgaccaaatctcaaacttggattgaggttgggattgaacctaacattttcattcctttaaattgggcaggggcattgctaaattcagtgtttcctcgaccaaactgcttgaatcttcgaaaggcaagattagcttcagcaatggaatccaagtcattagtaaccagattggtactcaaatccacttccttgctggatttttcgatccttgattaagaggcaagaagcaaagcttcaatttctctaactgtgtaattctcgatcctagtattggatgagattacaaatgtatcatactcacttgacagcccattgaatattgtagccacatgatctcgatttcttagaacttcaccatttgtggccaatagatccacaatttgtttgaccttgagcaggtacttattgagactcatggatcctttctttaaattatgtggtttgattctaaactccagaatttttgaagaaacttgtagtgtgaaatgtttttccagtgaattccaaatctgaagtgaggagttgcatccaaccattcttgctaaaagactttcaatcatggaggagagtaaccacgatataagaagttgatttttgaacttcccattcagagtacatcagattaattctattgttgtcacgatctgcatcattcaagaactcagctcgtggaggttctttaatgtatttcaacaattggtttcctcttatagcagctagaacttgctgcttccacaagaggaagttatgatcatttagacaaatcgagatgttgtgattgaagattactggttcttgatgtgttcgagttctcacaggagctccattgacaccggatggatatggatgagtagcaccactagaatttgttgcagcattcccaacagtcgccatgttcatgcctaagggagggaactgctctgataccatgttgaagttgcgagccattgatgaacacaaaaccagaaatagagagaggaaagagagaagacgaagaagaaggaaagagaagaaaagattgaagaaagattcttattgattgaaatgaagtgttacagcttatataacaacactgagctaagatacaataacaaaattctacaactaactcataatagaattaagcacgtgtttaacaacaccaacagctccaacaaacactaacggttctaactgtcttcaacagaagggatttcttctaactacttacaatcattatccaacactaaagcctgtttagccaagccatgagctgcttggttagcatcccgtctaatatgagatacacaagctgaagagagataagataattgatgtgaaatatctgtcaccaggtcttgaaaacaagaatggttagatgtagagccatttagagagttggcgagaatcaaggaatccatttctacaaaatcaagttggaagcgaagatgtttatcctaacaaagaccataaaacatgacttttgcatcaatttcttgtggtttgaaattgcctattactggtttagcaaggtctgcctgaatgtgtccatgagaatcccttataatagcaccgacaattaattttattcctcgaagaatcaatagcggcatcgacatttaattttaatttgttctctggaggaggt

SEQ ID NO: 296566 - DNA, 5892 bp, Cannabis indica
ttttataataattaaataattaattacgtgaaccattaaaaatttagaacatatacatttgttatttgtgtacacgtaagcagtctaatataccaatttttggatgaaagtgtgaagaacaaaataaaatctaaataaattttaccattaaaattctaatttttgtgagttcaagtaattttaccgccaatatcccaaataaaaacatatttgaaaagtttgaaaaaaaatatcaatatttaatttctacctatgatgtagtcagagttatttaaaaagttgccatatgcttgtaaaaatagatattaattaatccaatagaaaagcttcccaaataattttaggtagaaaactgaaattttaattaatactcgaaagaaaaaaaaacttagataacttttccccctaaaacttcatttcactactaaattcctgttaaaagtaaagaaacacagccagctagagcttcaaattctttaagcaaaagattaaattttcactaaaaaaagaatcaattgtgtacacagacaaacatggaaactgtggacaaactagttgtaacgagagaacaacaaaatttctctgatattggttatggggaaaattttgatagattacagtacttgacatgcttcagaacacaaggcacaggacccctagtgttaacatccagcaaaaacgaagggatagataatgccgaactctgcatctcactcaaagactgcaaacactgtgtcatcgacaaatggttttatgtcccaaataagtgtttgtgtattggtggagcttcaaggtttttaaccacttccatccaaggtttgtctatgatcaagatagaattattcgaaaggggtccaataaataaaatagggtctctgaaactaacaaagtcgaaattctttctaccaaggagtttcgtttggtagtctcttagtttacgtttcaaactcccactaggaggacctaaactctttactgctccatcctgaccatttactatcccactttcatcctcttgatccacgggcaacccaaagtctatccggcaaagtgccctaaaatatcagaaaatgaagaatattagagtataagggagcacaaaattgtcaaaagtatgatcaaactcccccatttgtatgaacaaaataaaataaaaagaagaatatacaatctcaatagatgtaacaaggacccaaagctgtcaattagagtaagtttagatttaccagtattgagattagttaattcagaaaatttacacataatggtaagcttatgataattgtcgttcttaaaatggttttctagctgttcaagaaataccatgttttttcttaaaactaggattcacgtctaaccctacaatatttggggactaataacaattgctatgtaggttctcaggagggactcgaacctcagagttagccacatgcctgaccattcgagctacccgcttacttcccgcatgattatgcaagttacttcccgttcaagaaatactttcaaatgtatgattatgcaagttacttcccgtatttatactactgcgcttacaccatttaaatttttataccataactattcttaaatggaaatccaaattaggcaaaattaaaatgaaattaggtaaaaggagcacctggcactataaacaatcacagttggtgattttgatggtgggaaacatagactaatgacttccccaggaaactcctggaatcttcgaggtagaacatgtgaatttcgcctggaccaatcccccaatttcttctcctccacatctaatgcatagacttgatttgaagaagttgtaactataagcacattattattaagtggaggaaaacccccagctgtaatagaggcaccatctagtcttgcgataaaccagtgctgtctgtttttgagagggcaaacaacagttacattgcaattgcaaaaaagatgaaacgatatctttattaaaaatagttgtttgatgtttacaatactgctcattacaacaaatagatgcagaaaagatccatacctcattatctccagattgaaaatatatacatctccaaagcagttgatggcagctagccattgcccatcagaactggtgaacattttagtaatgggaggctcgctaggtggcaatccttcatcatgtggatcattgcaaggagtgaatacatttattatttctgagttgaccacatctacaacctacagaataaggatcaagaaaccaaagtaaatgagaaacaaaacacattgccaaataaataaaattatagagacaaagtagtagcttacataaatttttctatcatgcccggctatcatcaactgagaagaatcaaaattgaaaaccatggaatgggcatatggtaggtttcgaggaagttgttttttatccacagtccaaccactcttaccaattttacgtttcagttcgaataggttgggtttcacatggtcagaataagcaaaaagggtccctgaattagaaatggtgctacaaataattctccgagatcccttactcttaattcgagcaagcagatctgtagccactgggtttccagaaggaccataagccatatcaggaggcgcaccattttttgttcgaacacaacatatatccaaccaagaagcagcctggacaagaagtaatgatgattcattgaatgctgtatttactaccagctgaataggcactctctgaggtgcaggacaaatatcatgtggagcaaacattgtgaattccttagctgagtaggcatagagcttggtatcatcaccggcggaaataagcataggaacacccaaatgtgcccacttatggtaactaaagtcaaccggcttttccttacgtcgaagttttttcacatcttgatctggtaatggatctgcaaatgtaaataaaaaataaaattaacaaatgattttatgaacatactatatgacaaaagcatgcactatgacagaaaacaagtagtagcaacagcttgtatattgttaaaatgaccttctcggctgataggcacagccaccgtcaaagccctaacatcatgagaatgagctcttgtataaccaacgtaggtccatctcttcattgaattagaagaatcaccatcagtggattctattatctcgcttgagagcttataaagaataacctacaagtgaaagcaggtaaatgaccattaaaccaagatgaacatagaacacagacaaaaatgagacagttttacataggcacgacactaaatccagtcaaacaatgaacccttgcatagtccaactatattgcattctaaccttaaactagtaacctaatctcaattttacttgatactgaaacttcatataaaaacgactttctactcaagtacattggatacaaatccaatcttaatgaataggactgaggacaacaatgacacctgtgaactcagatagctttgttgtgggccaaactaggggtttctaaacttgtattgagaaggtgaaccaagggactttctaatcttatattggagaaggtgatgttatatgaaagcatgtaaggtcttattgggcaagcatacgtgaacatcatttacaagtgcttcactaagctcatagctacggtaatcaaccaactaaaaacttaactgagttgaataaaatataatgctaaaaaatagatcatctgcagagcctgatgttattatcaatcaagaaaacatagttgttaaacttcttaactattaaaagcaagacattgattggttaacctttaatattttgtttgtcacttaaacatgacaaatggtaagctcttaaagactattttggttttgaaatattgatatgacggagaaatacaattatacacgacttctactgaaacaagcaagtttgttcactaatacaaccatgaaaattgcataaacggataaatgttaaaatagttcatttattattatttccttttcaattattacatatggaaatttatccatattccacaaaggagaaaaaatgtatacctgaccatcagaacctgcagaaaacaccctgttatgtcctggagcagctgccagtgcattcacatcacctttatgatatgaatgtgcctgcaacagagtcccatgcttactgtcccaaaattgtacactaccagtactatccgcacttacaagtgtcccagacctggtgtcaacaaatcaccacataagcaatgtagtcgcatgatgattaccattttcgaaaaataaatgatgattcaacgtaatagatacctcaatgaaagtaatgaccacacacaaagatcgggtccactgcccaaacctcctagtccaactgtaatcctataaatttcatgacccaatattggattccagcatcttataaacctgagggaaagaaaaaaaccaatattgagacaattattactgtttaaggctttaaagcaccttcacatatgtagtgaaacatgaatacgaagtaggcatgcagaagaagaaactcaagtaaatgaacattcatacgcacccatcactgcttcccgcaaatatccttttagcatcaggactccatgtcacgcttaaaattcgtcctgaaaataacaatttcaacatgtcatcaaaataaagtccatattaaatttatccttctctcctcccaggaagaagaacaagcgtacggagcaatcaaataaaaatttgagagcaagaatggcgatagagagtagatatctcaccactgaccctgggcaacgttttagtgtaaataagtttatcttcaataacactgtatattcgcacacaaccatcatcacaagctaatgctacccgtggattctcaataactgactgcacatgaagctcagcagaatctgagtcatcttcactatcactactttcctcatttaagttattacttaaatatccatttcctaaatgctgcgtccccggctctgtattttgattacagggagccgcagacatctgccatattgacacgcctgttgaatctaaaagagtctgcgaattcaagttatttcagtcaaacatcagggtttaaaacactttgaactagaataacacaaactacatagttcaggaaacgttctataataaaagaagcaactgaacctttttcttgaggagggaaatatcccactcggaaactgagccatcaatgctagacgataatagccggccacaaggcaagtcctttgagccaccccgacaccacacaagcgacgagactcttgaatcagggtcgccatgaacagtctacccacaagaagaaggattgaaaaagaacccaaaaagaaaattagaagctacaattaaatgaaatatatatacaaatataagcatgtatatcttcatgtatgttcttttgtgggtttgtaccagctgacagtgccagccaacagagccgggtgagacgagccaaatctcaagagatccgtcctcgcgagctgcagcaacctgagagtcgtcgacgctggtggctagggctactactggagatggcttccaatcaattgtgctgttcctgtaataataagcttcaaccatgtcgataccctaagaagtaaaagtggctccgatttgagtcgattcgactacgaagcttagtgtgagatgagagagcatccgaagagaacaacagctaagacagtggaattgagaagaggcggtgtgaagtgtgaagtgtgaagtcaggttaggtttttgagggtttaagcgcggcgctattaattgaagtaccctatcagtttctttctgcaatttactcaatgggccgaatctttattttttaaataaatactaaagccctttagaaattgggcccctttttctcttttgggctttttaattattgttgcacacaattggagtt

SEQ ID NO: 296567 - DNA, 1748 bp, Cannabis indica
tgaagcggggacgttacacaagcttcggctaggaggaaaaaaaataagatccatggtttgatggatagtatgggaatttggcgtactgaggcaggcatggttcagagaattgtggaggagtacttccggaatatattcaggtcttctcctatagatcataatattttttcggaggtagttatgggagttcaaccgaaagtcaccgaagctatgaatgaatcacttgtgggaatttttttcgaagaggaggtggttaaggctgtcaaggacatgaatcctaccaaagcaccaggcgctgatggacttccagcacttttttaccaaaaattttggaaaaaactcaaacaggatgtgattgggatgtgcttgaaggtgctgaatgagggtgctgatttatcttgtttgaatgaaactatcatagcccttataccgaaagtggagaggcctaagcaagttgaggaatttcgacccataagcctatataatgttatatataagatagtgtcaaagtgtttggtacaccaattgagaagtgtgatggggacgatcatatctgatactcagagtgcattcatcaaggatagattaattcatgacaatgcgattgttgcttatgagggtcttcattgtatgcgtaaggacacatttaacaatggggataaattggctttaaagctggacatggccaaagcgtatgatagagttaaatggtcctttcttcaagcggtaatgatccagatggggtttaatagaagttgggttgacaaggtgatgcggtgtgtttcttccacaagtctgtcctttttaattaatggtgaagttagagggaagttgataccggagcgcggtttgcgtcaaggtgatccgttatctccatttttatttctcttttgtgctgaagcttttttgaatcttatccaaaaagaggagcgggagggcaggttaagtgggattcgatttggtcgccaaggaccttcagtaactcatcaattctttgcggatgatagtttgatttttttggattctaccttgccgagttgccaacattttcaacaagttttgagtaagtattcggctgcttcgggccagcttattaactaccacaaatcagaggtgtgttttggccgaaacatatctaatgagactcgggaacaattagctgcctttatgggggttcgattagtttataatcatgggaagtatctaggattaccgtcatttgtggggcgcaataagaaggaatttctggatgagattaagaataagtttgggccaagatgaaagggtggaagcaatcaatgttctcgatggcgggtaaagaggtgctcattaaagctattgtccaagcaatccctacttatacgatgtcgtgcttcaagttgccaaaaaaaaaaaaccatttcaagtcttcaccgcatggcggcaaggttttggtggggttctttggataaagaaaagaaaactcattggtgtaagtggcggtacttgtgtaaaccgaaggataaggggaggttagggttccgtgacatggggatgttcaactaagcccttctcaccaagcagatttggagatgcatacgccatcctaacaatctacgtagccgtgtgttgaaagcttcgtactatcctggtaaaagcgtgttagaagctagctgtggagccaatgcttcctttgtgtggcgtagtttggtttggggtaaaaaatgttggtttttgtgccctaaatataactcatttcaatataatca

SEQ ID NO: 296568 - DNA, 3336 bp, Cannabis indica
ataggttgctgatgtttctcttcttcttggccacaaatcaagcaggctccattccaaagcatgccttgtttcttcaacttgtggattgttttcaatcctttccaagaagttatccatgtgatatatctatgtttaagaatactatacctcttccattaaatgcttgcataccatgtaaagtcctccttacttgaaaacatctccttgctgctcatttttgccctattctaaaatgttgccaaaaaaaattaaaattataagagaaatactaaaaagcactactagtgtctaacatgatccttagtgttatacttttattggactaaccaattgtaggataccacctatagaaggtgctagacatgtccaaaaacaattctcaaataataagcctatcacctagtaagcttttagttattttgtatatttgtacggatcgatcgatatgtggggaaattaattaaaatattattacattaaatacgcaaagcttcaggtttcattcttgaacagtagagtagagaaggaataaaaaaaataattataaaaactcatatgacttgcaattggatgagagctttatattttttggaaaagcaatttaaaagaatataatgtaaaaattagttcttacttattactggttgatttgtggttcaattgtcattaatacaaatctctaattaaaattaaatacttgatcagctattactgttatgaatgtcaaagtgacatatatagaagaacttgtagcatctgtatcttcatatacatcatgactctggtacacatgtgtgagccccacacaaagaggttattcaaactcattaatgtgccactcatttgtattttttgaacaatctaattgacccctaattgttatcataaataaattagtcatgcctgtaccacaaaacaatttattcttacttgaccatctttcactattattgaattatggtatatgtgacagctgaagttgaggtaattagaaaaggctaaatttttaactcaattgatggatcattgttattggaagctacttttccaggtgcttccatatgaatcctacagataaggcataaccaactagttcaaacaaaataatataacaaattaattaaaaaaaaaaacagccatcatccttgaattgaagaaaaacaataatatgttactcataatttaatattttattatttactataattattaatttttgtgactattatcattatgcaactttttattgatattaaaaataacgaaaatattaaagtgatgaatttcaacatcaaatattcaacatttaaaagtctcattaatcttaagcaatatgattgaacaatatttttataatgttttgaccacacatctgaacctggcccaaatcgaattctagacccagacacatgaccctcggcgtgaccccagcacaaatctctataacttcgattcgcacccgcacctcgaccacgaattggtctgaaacctgaattaagacccacactcctaatccggaccccaaacccttgcttcgacctcaaattccaaaccacaacgtgaacctaaacctgatcctaatcccgtccccaatcatgatccttggacctttggatcccaaacccaacattgacactaattaatcccgatcccaaaccttggatcctggtcacaaccctcaccccgataaaccaagaacctaaacattagaccatgagtggacccaaacctacagccacacttcggccctaagcctgaacttgaacctcagcaaacctcaatcgtgacaacacaagtcttcatctaactccaaagtgttttttgctaaaccaggagcaacttggttagccttcctccttacatgagaaacaatagctttagagaaaaaagataaaagacaaggaacatcgaggattaaatttgagaaacaagataaatcctttgatgtggagttcaaagcatcagagactcacaatgcatctgtttcaatttttgtaatctacaattgcatctgcaatacctaattaaagctatggaaaagggctttaacttctattttattagagcaaaaagaaccttgtactggcttcgggagagtagcgatcacatgaccagtatgatctcgagcaatcacaccaacacccagtatttttgatgcagagtttagggcaccatctatattaagtttaagcccttgttattttgaagtttccaagatgtttcttctattatgttactggtgacagttcttgttgtgtgtacaggagcagaaataatcacaacatgtccttgttgggtgcgtatagaaactgagtgaaacttttccatgtaattcatagcataaccatagatacaggcaccatttgttaaatttccaccatgaaaaaccttgtttctttccatccaaattgcccaaatgacacaaatgatatgtttaaaatcagtttgggaatgtaatgtggaaagatagattaggtaatcaccattatacatgtcgaaagggcattgtgcagtgctttccatgcaaaaattttattttttgacggtagatttagactctaaaaagttttccaccaattcctatgattgtccgaataggaagattgttgttgttcttctaaacttgctgcaaaatgaaaacatgattttatagtataaattcctgaggttgtgtgacgctaaatcaatctgtcattggatggaaaaaaactcagggggatcataactattcattcaatatccatctctccgaaaaaatcctaaagtagctccaaattttattctctttcctttgtgatgaaatgtgcaactaggagtgaggcaggcccaatatatgtcatcaacttaaactcagtgaatccgggtacgaatttgtccaaaccacattgaatattaaagccataacctattttataccgatgctattttgtcaacaactctcaaccccaatgactgctttgtcatgttagagatggtgaatgtcctagcctttcttccaaaaagaattgtttaaaaaatacctacacttcaataatcaactcaacaaagaatttgacatttcaaatatcctccatgcttatttagctaagagagcttgattataatccacaaaagaatgaaaactcgtgccaccattaaatttgaatttacaaagaaacttctatattttccaatgaatttctgtgccatccttgttagacccctacctgaaatttgtcatgacgctttccaattgttgatagaaagttttcgttaaggaaaaataattcctagcataagttgaaattgtctgaaaaactgctttaagtaaaacctcttttccaccaatggagaaca

SEQ ID NO: 296569 - DNA, 2325 bp, Cannabis indica
ttcatctcatcatcatcatcatcatctttcgttatatacataattacaaatatatatgatcatggtacgtatatactactctcaatttctcttattaattccaaatgtgtatataattaatttattgtaataatcaaattaattataataagttgaattttttggatacatcagggatatgagaagcctgcatggttggaagctctatacagccaaaaattcttcgctgggtgttcttatcatgaaaattcaaagaagaatgaaaagaacatatgttgtttggattgttgtttgagtatttgccctcactgtttgccttcccaccgattccatagacttctccaagttcgtcgttatgtctatcatgatgtcgttcgcttggaagatcttcagaaacttattgactgctctaacgttcaggttacgtttcttaattcttaatcttataattattctcctattattaataattatcttgttactaatttattacatacattattgattttgcataatttaggcttacactataaatagtgcaaaagtagtgtttatcaagaagagacctcaaaataggcaattcaaggggtccggtaactattgcacttcttgtgatagaagtctccaagaaccttatattcattgctcccttggctgcaaggtaataataataatactaatatgtacattttagtccaaaatttgatcatatgatctatatattaaaaatatttgtacatatgtaactgatgtttatagctatatatatactatgtgtatatattgtgatcgattattacaggtggattatgtgctcaagtacaagaaagacttgtctccatacctaaggaaatgtaattctctacaactaagtccagactttttggttccacaagactacatgggagatgatgagactacaaatgagacccctcactcgaccatagtcgacagtgacgagccaatgagttggtcatctgggtcgtcaggctcagagaacatgagcaatatgacttgtactactcttcataatcatcatcatcatcatcatgagattattgtgagaaagaagagaagtggccttagtaaatataatctttgtgcaagatcagctactaataataatactaataataaggtcgttgtatcagataatgaagacatggccactagcatgatcagtagaagaaaaggaattcctcatagatctcctatgtgttaagttaaaccatctctcttcttgttactattagtacaattattatttttgaattctaatgataaatttgactgaatgattcaaatgctttagctctctttctctctctctctttcattggaagtttaagttaattaatcacttggtcggggtgttttgtcttaatggtatcacgtggttcccaattccaagttatggttttctaaggtttttgcatgtttctatatatataatttaaatgtgccattaaattattatatcatatacacttatattaactaaaatcatatgtatcttgtacggtggttctagatagtagatactccttgagcaaaagaaaagatagtagatgctcacattttattaaacaatttcacttttgcaaattgtgggctcgacgtatatataagtgaatttttaccaattagaatagttatatatatacatacgggatacaaagtatttatatttatacttatatatatacataactacttttaccttcatttaatgtatgcatgtataaatattttataaagtgtcggaatagttcttcatgatccatgcatgcatgcttatatatagcatgagtgtacattttatttgctcctatatgaaaatcgcatatatatatagtaatatagagagagagagagagagagaaactttaaactatatattttgtattccggtataatagcatatcatgaccttttgtgttataaaaaggtacatacattgttaaaactgatccgctaaatctgaattcagttaaaaggaaaaaaaaaaattgcactaaaatttatttacaaaattactgatttgggacaattatgtagatctcgagcaagccttggaccatcactaatgatttaaagaaagaataattacataaaatattaatttctgtaaaaattttacattttaatattaattttttttacatttttacattattgtataaaaaaaataacaaaaaattcacataaaaacaaaaaaaataaataatatcaaaacaacaacaaaacaacatacaaaaaaacaataaaaaaaatataatatataaataacaaaaaaacaacaataaaataacaagatacaacata

SEQ ID NO: 296570 - DNA, 4157 bp, Cannabis indica
aaaaatatgcatgtatttaatacaaataagattaataaggtaaaaagttgaaccaaccatatagattgaactgaagtttcaagcactggattaggaaaaaacccagaaaagatgattaatatctcaaatgcccaagtcttgaagctgttgataatcaatggaacattaataatgtatatgttagaatatacattaattgaaagagaaaattaaatgtatatgtataggtaaatataatttcatcattttatttaccattccattagtaccgaaggcaaggctaatttcatataaggaagaaaattgtgaagagcttgctttgaaaaaccattccaagtttctttgcatgttgaagaaaacttgataaagagggccaaacaaaatgcatttacacaatacgatatagaggttgccactgcagctccactgcttccccactcatatttacaaaccataatccaacaacagagaatatgcacaatagttgctactacagagctcaagactatgggatttactatattttggttctgcaaaaaacttcgaaagcattggagtagaccaaatgcaaaattgctaggaaccaaatatagtaaatatcttcctgcttcatgagatatttcatgatcttggtgcatggcaatcaaaattggagttgcatttgcccatatgattgaaatcataacactagtagctgaactaaaaataattgctctttgcaattctatgccaagaataggatagtgttttgctccaaatagttggctacataaagtgtccagtgcattagtggatcccacctggtcaaacaagtcaagtaaaatgtaatagtgataccatgctaatcaaaaaaataataataggaaacaaaatgagtactagtaaaaaagatgcatgaataaattaatagaattgataacaaaatataataaacttatagtaagtatgaagtgtagagaaacaaagcacgagagagaaagaaagatagaagaaaatagttctgcaaaagctgaaaattacagcaaaggcaatgttatttatagagaagttttgatacatatacaaaattgaaaataagaatcatataactataactaacacaattaactaatcctatagttaatagaaaactaagtattcgttaacagtgtttacatctcccctcaaacgaaaaaaaatttagccattttaagtttggacttaaggtaggtaaatcaatctttggacagtggtttagtgagcatattagctacttgatcgaaacaaggaacataacaagctgagagcttcttgtctagaatgtgatccctgacaaaatgcaaatctatttcaatatgcttggatcgagcatggaaaattgggttagctgctagagtagtagcactctgattatcgactcaaataacagggcattgtggaagagtgacttgtgctcagtaagcagagaaacaatccatttcaactcagcaactgtgtttgcttaagcacaaaattcacttttagtacttaatcaagcaacaacctattgcttctttgcagaccgtgaaatgatatatcacctaagtaaaccacataaccccctgtcaatcttctgtcaacaatacagttggcccaatcagcatcggagtagctttctagtgtcatgacagtggtaggtttgagaaataatccatttgagatagtgcctttgagatatcgcaataacttcttacatgcctcctaatgcagcactattggagctttcaaaaattggctcagtttgttgattgcagaggcaacatttggcctggtgagagtaaggtattgtagggccccaatcgtgctcctatacagtgttggttcttcaaatggttctccatcattgagagacagttttgttgtactgcttaaatgagtagagcaagttttggctccttccatgtgaagaatgactaaaagatcagtggtatacttagtctgtgataagaacatgccattggagtctcgataaatttccactccaagaaagtagtgaacctcaccaagatcattgagtgaaaattgcctgttaagatctgtaaccagtttagttatgacagacttgtttggacctgttaccagaatatcatctacatatacaaggagtataagcaggttgtttccaataccatgaacaaatagagatgtgtcagatttgaatgccttaaagccccattgaagtaaactagttctgagtttgttattccaaactcttggagcttgagcttgtgaagaagacaaacatgatctggtttagactgatcaacaaaaccttaggttgttgcatgaaattgtctcaattagtgatccatttaggaaagcattactaacatccaattgagtcactgtccaatttgaagtaacagctagagataagactgttctaactgtaacaagttttactactagggaaaatgtctcctcgtagtcaataccaggagtttgtaaatagcatttggctgcaagtcttgatttgaacttttctaatgaaccattagcattgagtttaattctatgaacccacttgttgccaatgatgtgcatgacatgtttatagggaaccaatgtccatgtaccttccttttttaaagcatgaacttcatgttgcattgagttaaaccattgaagatctttaagggctgcttgaagaggtcttggcttataaggtaaaagagattctggtaaagggtgcttgggggccaattaagcttttggtttaactatgccattcttggatctagtgaccataggatgagatctgtgagcaatagtggcagaaatgtgtttcctgagacacaagttgagggattggggccaggagcagcaagagctttctcatgaagagttgcggaaccaacatctaaaacaggttcaacatttggaacaggaacaacattggctattgggtttgaggtagaaggagtttctgttgtattggtatattgtgggtcaaataggtcaggttgttggacaggctggtgtgtaaatatttgtggaggtaaagatgcaggttgtggagctggttggggaattggttgtgaggcagggatgagagaacaatatgccttggttagccaaaaatctttcaaaaggtttgtactcaccaccaccattagcctgcgcactcttaataggcaatccaaactgttttttcaccaaacttttaaactgaataaacatgtcaaatgcctgatatttcaatgttagtggataaatcaaagtaaaccggctatggtcatccaagaaatggatgtaatatctgaatccatctttgaaaagttcatgagaggggccccaaaggtctgtatgtattagttataatggtttatttgcacgatattgatattgagatgttgaaaagggaagtctatgacttttcccttgttgacaggcattacaaaactgaatgtttttcagtgagatagtatggggttgggaaggcaatagtttctgtaatgtagaatgagaaagatggcctaatttacaatgccacaagttaatggtaacaggttgtgaaacatgcaaagtagaatacttagaagaagaagaagacgaagaagaagaagaagaagaacataattcattttcatttattgaaattgtataacaagagattgatgtgtgaacacactcagtagtacaagtacagtttgttttaaagtagacattattagagttggcagaagtggaaacatgacattgtagtgtagggcttgactgatgagaggcatcaccaaggagatagaggccatctttaaccttccctttgagaagaacggtgtctattgtcttgtccttgacaaagcaatttttatgaaattcaagaaaaatgtcattatccttagttagtttagatcactaaccagatttttagtaatggacgggacatttagaactgaatgcatatgtaagggataagatttattaagagatggaattgagacaaaacctatatgaaagatgaatagttcttaccatcttcaatggttagagtctcagtactagtgaaggcctttgaggtgtcgagattagcattgtcaaaggtgacatgagtggtagctcctgagttcacataccaagaactatcctctccaaaatcttgaaccatggtggtggtgtattgtaaagaccgcttagtt

SEQ ID NO: 296571 - DNA, 1133 bp, Cannabis indica
aaaaaaaaaaattaaatagaaaaggtagctccatcttagaaagaattaatcattattataaagaaaggtacattttaaccaattatactttgtgtagtgaaaatgccaaacaatatgacatatctatgtatatacatagagagaaaggtgatgtaataatctacaaatttatataattacgcataggcactataataataatcacaaatatatatcacaattcacaacatatatataaatgaaaggttcaaacatattcaccccaaaaatagtacaaaagaaaagagagaattttggagtacttcaatatgacttaagtatatgtattagtcctgaatgatcttagatacaattttaaatatatggtggtgatggattgatgtttcttattattaagaggcagagcccttaataacaagaggtggttgattattattattattattatgaggatgtgtagtagccatggatgggaactgaaaggatgatgtccaaggaacaacatcaatgtcattattgagcaaatcaggagaaataagattctcccaacctttaacggcgtcgttatgtgttgtagaaccgtcccaacctatgtgtgtcacgtgcttgacatcagttggtcctcctatttccatatccatctccagttcttccatttcttccttgtaaactgtcacgtgcatgcatatatcaaatatttaatctcaatatatgaatgcattcaatcacaaattcggactaaatttataattttaacctatatatatatatataatatatgatagtagaatcttgataaatttagtcaaagttcgtatcctatattcatacaatcttgataaatttagttatgtcgaaatcgcttaccaaatatttgagagatgttcttgaaacccttgaacagcctattgattccagttgatatgtttggctttagagacctaaatgagctctttgtactttcaccacctgatgataagctctcatcatcatcctcatcgtcctcatgattgtgatcatattcttgatccaattctttaggcccttaataaacataacatacatgaacatgtgagatgggtttgtgtcaaatatagccaacctagaaatacagatatatatatatatattat

SEQ ID NO: 296572 - DNA, 2786 bp, Cannabis indica
aaaaaaaaaaagaaagataagtcaggttggatctgatgtgatccaaataagttgggttggatcggatgagattcaggtttcggatctagcggggtagatcattacatgatttgtatcgggttggatcataggcagttcagatttgacccaatccatttacactcttactataatctactaagctattaattaatttaaatgtgtacttttaattacttgtttgacgtgtgtacataatatatttatatcaaccgtaatcaatgagaattcatatattattatttgccaatttttccaaagaaagttttccaaatttaggttcccatcctaaaatgatatatcaatatatataaattttatattcacataatcaaaaaataaggttcacttctgtttcttcaagctcaagaagagctgtctaaactcttatgtagagatgagaggttaaacttgatccatggtgtccaaattgctagagcagctctagctatttcgcatttgatgttcattgatgacaccatcttatttactagggcaaatgtgggggaagccaagaaactgcttagatgccttgaggtgtatgagacatggtctagacaagtctgcagcaaagctaagtctagtgtcttattctcaaaaaatctaaataacaataaaaaggaaagatttgctcttagcccttgaagtttctcaagtctaggcaactcgtttgtgttcaagagaaggaagaaggaagactataacatcctgaaaaccaacatgataaaacggcttgaggggtagaagttgaagctattatcttatgcggattgccttaccttgattaaatctttcacatcttccatgtcggtttattgtatgtccaccaacaacgtaatttagatgaaatgttgaggaagtactggtggataggtaacgaatgaaaggatcatttgatggctttaagacctgagaccaaatttgtcaactaagatcttttggtggcctaggtatcaggaggcttgaagacatgaatcaagcccttttggaaaaactggtgtggtctgttgctcaacatgagaccaggccttgggtttgctgtcttctcaataagtattgctctactgagagtttctgaacagtgaactctaagagtaataactcgtatatgtggaagaattcattggatgttagaggtatcattttaaaaggttcagtttcattggcagcagatggtagtgatatagatgtttagaaacaaccttggatacgtttgttagattatttgagtttcagtaggcttatgaaaagttttaagtatgaagggtttttacattcaaatcaatggcagatctttctagaggcaacgattggcatgagaagcttgttattcaggtgtttggagaggaattagggtattaaattctagatattcttagaattctctctctacatcatgattagattatatggaaggataatagcaatgagaagttgtctgtgaagaatgttgagaaaaatgaaagaaccagtggctagccttcagtacatttcctctgcttttctggttcaaccgttgtggtcctgcctcgtccttcattcgactgacagctcatcattgagcaatcattgcatactctaatttaatcacgtttctgttattaccttttagagaatattcccttttctgttattctgattgctgaggtgtataattctagaatgatcctgtattgtactataaaaggaaatgaatgaattgatgctcattgagctgaacattacaaaaattatcttctctgtatttccttacttggtatcagagcaaccctcgacaccatgtctactggtgatcaatccaacccagaaactcccataaatcgttcagctccaacgtcctcaactacagcagtcaacacaggccatggagtagtggtcccacagttcggaaccacctttaaccagccctttgccctcaagctagacagaaacaatttctctttatggaaaacaatggtgtccgccattgttagaggacatcgccttgatggatacctcaaaggcactaaaccgaggccagtcgagttcatcactgctattgcaaaagaaggtggagaacaaaccacagatctggaaatcaatccagaattcgaacaatggatagtgcatgaccagcttctcatgggatggctttaaggatccatgacggaagggatagctactgaagttatgggatgtgaatattcagcagcactttggcaagcactcgaagctttgtacggagctcattcgaaagccaaaatggacgaatatcagactaaaatccagatagcaagaaagggctcagtcagtatggttgattacttgaaacaaaaaaggcagtgggcagatgttttggcccttgcaggtgaccctttatcctgaatccttgctcgtatctaatgtgttatctggtttggatctagattatcttcctattgttttgcaaatagaggcaagagcctctacaacttggccagtattgcaggatatccttctcagttttgacagcaagatagagagactaagtgccatctcaggcatcaacaaacagcccaacaatccagctgctccaaatgcgaattatgccaataaaacacctcactccagtggaaaccaaggatactcgggaggctccagtgatttaagtcacaatggtggccgcagaggaggttacaacaacaataacagaggcagatttggcactagaggaagaggaggaaggtcaggaggcccaaaacctacttgccaagtttgtggcaagtatg

SEQ ID NO: 296573 - DNA, 2988 bp, Cannabis indica
aaggtacatgaacaatttggaaacttaatttaattcaaacgacttatttgatttttttttggtaataaaatctgtaaaaatcttaatataatgatactcatccgataaatgcgctatttctttccccgtaaaatttaattttaggaatttttttttttcgttttttttttttccaacccaacaaataatatattgtttaatattttgaatttattcagttatttttttttcccaacctttacgccttaaaccagctcaaaacttcattagtctctctatcgtctctctgtcttctctttccgcaaaaaaaaatgctaaattgtactgagtatggagtttcaactctggagaagagaaaaaccacatatgcagtctactgtggcaaaagtattcagctccggcaagggctttgggaggacacaaaaaaattcatatccaacaaaaacgtcaagctgccgccgaggccgtggccaaagcttgtaccgatcaagacagtggtggtaataacaacaacaacaatggaagtagtaggttctattgtccagtgtgtcccaagcactttccctcattgaaatctgtatctggtcatatgagaactcatggtgatagggtttggcgagggattaacccaccagcaccagctgataataatcttcataacaaacccactacaacaacaacaacaactgttgatttgctgcaaagtttaccatcgaattggtccaacattggcggtaagagaggtaggaaatttaatccagatactactagtcctagtattgctgcagccattcaactaatcaaactttctcaatcgaaagatagagtttttacgaaacaaattggtgatgggtatgaggtaataaaagcaaattcttcttctagtactgattattataattctgatcatcatcattatcatcaagaaaataccctagggttagggttattaatgatgatgatgaagatgatgattttattagtttgaaaagaaaggttatgatgattaagaagaacaatggaagcgttaatagtagtagtaacagtaccgaaactactaccgatcataaagatgatgagaaaaacgtttctaataagaagctgaagattagatttggtacttcttcgaattctactaaatgttacaaatgtaacagttgtgataaatcttttactacatttcaagccttgggaggacatagctcaactcataataaagataataatcacaagaagaattgtactacaaagaagatggattccaaattattaaggcccaataagtacttttatggtgatcaaggtagtggtcatggtgatgtgcttcagattatgatggggtcttcaatatcatcatcttctcaattgatagcaatggatcatggtggaaattgtagtagcacagctgctgaacgacgtcgtacgcttgatatagatctcaatgaattgcctgttatgagcgtaactgatgtctaagaaaaatggttagatttgttctaatttttcttttatgttaattaagaattttttttctgttcagttagatattttgttttttgggtgtaaaaaaaagtttatttttaagaacaatctagatcagttagctatcattttgcaatttgtttctctaaaagttcttttatgacttttctatgttatagttagctattatcgtgtagctgatataggcttgcaattttgaaatgtgtttcgtgaattagcgtacaacccgaaacaaccttgtaattgtgagcaataaacaactgttattctttctacacacctcttatttgattgttcggaagaaaaactcagttgaagaaacatataaaacattttatttgaaagaaattgaatgtcctttctcttcaattatttctctctgtgaattttataaaattaatatgattgtggaaagagttctacatgggattattacaagtgtatatatgaaatgttaacatagagacttacacatttgggtatccatttttgtgtgcattataacttggatcctaagtaaatggttgtcttacctgaaatttaagagcggtcctaagttattatgctaattaattatatttaggtccttaaggcttctccaagaaaggggcatctatgtaaaatgccatttttttttgttcccaagctttggccacggcctcggcggcatatatgtcatacacggtagatattttttttaataaatatttataattatttgatttattaatcaaattaaaaatttaatttttgaaaaattctaagtgcacattctaaaaataatgtaatgatgtattcttatttgttgcacttaacaaatttttttagtattataattatttaagatattttgtaaaataattttgagaaattcaaaaaaattaacacgtattcctacttgttttggtattcaagagacttttttagtctaatttttttaagagcattgctattaggcatcagtggtgcctagcacctttgcgacatgtcgcgttgcgattggccagtggtgccctttagcatttctctttttttaatggtcgtgtacattataattttttaaaacattttgtaaaattttaaaaaataaaaaaatttaatatgtcgaaattaaaattcaaactgtcggttgtacgcatgactcttttatttataagggtgcattgtggtgattttaattaattaatatgatattttttttattttattaaaaaataatataatagagagtattttagtgtaatttttggtgttgtggttagaatgataatactttttaacattaaatttaatgataatgtgacaagctaaatttagtgtgctccttaaaatgctcttaaacatactctagtagttaatattgttggtgtagtagtataaaagtgtcattatttaattaagtattatattaaatttaaaatattaatttaataatttaaatttcaattattttttatttgaatttttttaaagttatctgtatat

SEQ ID NO: 296574 - DNA, 7828 bp, Cannabis indica
aaatgacaattattcaacgaatgcaaaaaaaaaaaaagatgatatatgctgccatatgaaggttacatctgaaaataatctaagaagttagcatttcacaatatgttattgaaagatttgtaaaagcaagaaatcatatgcagttttcattagcagttgacaaaaccaagcaaaagcaactctgattctgaaaacaaaagctagtcaaagattgaagacaaataagccagaaaatgataaatatcataagggcaagtataaaataaagaaaagaatgattagtactagtttaacctctgtcaaggtacaagaaaaaccaaaggaataacagaagagagtttactactaaattctcttttaaaatcattctacgtataagtattgtcaacgaaacccggagggattgacaaagatctcaagtacattgactatccaagaatgtcgccgcaactaactacgccgaaatttagtttaacatggaaatagatttaagaattttagtacttagaaatcaatataaaaaaaagggtaatcttgcagaatcaagtaacagtaatgtgtacttactttccaccaaaagaaacagaaaagaaaacttatggttacaagtgtgttaagaactcaggtgtggctatatatatataactatctactccatttcttgaaaccacttgtctatggattttcaaaaaggacaaattgaccttccttaacaacttaaaagatggattctgcttggatttttttttttcctattgtagaccaaaaatatcaaatatgtgatttggtcatttgacataatgggaaaagttttttaaaaggtttcaagggtgtgaaatgaacttgcatacatgagtttttgataaattaggtaataccagaaacatttctatatgtgaaggtttcaaaaatcagaaactttatgcttttctgagttacacattttctgtgaagctaagaaaccccaccttgccaaaaacacctcttaacaactatttttttttcctttcctttaataaaaaacaaagtagagactaaatctggtttttgctgttagtacctggttttgcctacattttcttttcaagaatatccttaaaaaaaacataggccaatggttgagagtacttttatattggtcaatgattcacttaagaaagacaagccttagtcaactacatacattaaaagttttctgctaaagtggtactttggatagtgaaatcaaaaggatattttttattgacactcaaaaatgattcgcttccacaaaatctgacagatgaaaagataacagtattcacttgaacaaatacaatgggcaaaaatgaaaaggcaaatactgaataatctgaaagaaacttaaattaatataaatattatgaaaaatcattcctagtgttcatgctcttcttcactttctctgcattttctttgacatattccttagacacctcagttctgttcataactgtctctttggctttttgggctgcatccttggttgaatcccatacttgttctgttgtcttctttgctttatctgcagtatcttgggccttctcagaaaattcacctgcagcttctttagtctttttagtcacctacaatttcatgaatcaattcagtgcgcttgctcggttgggactaaaataaaaagttgacatgagtaaaaaaaattaataagttttgttactaatgcgatgaatgacttccatttatttttgagtgaaatagccgttccacaaaaattgtagaaaaaccattttagtggattgttattcaaatagttcaatttctaagcaaacatagaaaagtaatgaaacagatttcctatccattccattccttttctccaacaaaatggcgtcataggaatcttttccattttcttaattatgcgtaggaatgacttagccgtttcactattaaaaaccatcttattggaacattattcaaatattttagtttctaaccatacatagaaaaggaatgaaactggtttcctatcaattccattacttcttcccaaccaaattttttaattatgcattcaaatgacttccacttatttttttagtggaatcgccattccactaaaatgatgggaaaaccattttattggaacgttattcaaataattcaaatattttagtttctagccaaacatagaaaaggccaaacatagaaaaggaatgaaactggttttcatgcattccattccttttccccaatcaaacagctcactaggaaccttttccattttgtcaattatgcattgaaatgacttttccatttatttttgagcaaataccaaaacagccgaaaaaatttattagaatgttattcaaatattttagtttcttgccaaacatagaaaaggaatgaaaccgttccttcttcccaacaaaatggcgccataagaatcttttccattattcttaattatgcgtaggaatgacttccattttttttttagtgaaattgccgttccgccaaaatggtgggaaaaccattttattggaacgttattcaaatattttagtttctagctaaatgtagaaaaggaatgaaacgaatttccaacccatttcattccttttctccaatcaaacggggcccaaggaatcttttccatttttgttaattatgcataggaataatttttccatttaattttgattgaaatagttgttccaccaaaatagtggaaaagcttttattagaacgttattcaaatattttagtttcttgcaaaaacatagaaaaggaatgaaacgagttcctatccatgccgttccttttccgtttgccttaggaatctaggatatcaccaaaacattctcaagtatctatggaacatgcattattgtaatactaagttccttatactatgaacttaaactgatgaaaaatgatgtaatgtcattaacaaaataaatggtgaaacgcttacatggtctgcagcagagctggtactttctttgatgtctttcacttggcttgcccatgttgaactagcctgtaatacatcagaaacattcaccataaaattcataagcacaacacgatctaactgattgaaaactttaagagcagtattaacattgctacataataagttattggccaaaaaaatatgtaaatagaattttgatattagatcagaaaatttaggctgcagcttacatgaaaacgtctcatgtaagaagccaatagtagtaagggatttggggtgtttctagcaacttgagaagatttcagaaggctggtgagcagggtagtcgacgccatctttgtcttttctttctctacagctcttctgtttatgattttttttctaactttttctgtatgaaggaacaatgtgtcttgagaaattgggtatataaagaagcatgagagacttttttgcttactttatgtatgtattaagagtattctacgcagatgactggtgaaaaactaacctacctcaatggtcaaagaagatccactattataggacagttatataggtgactctatttagaactcgttttaagcatttgaagtttggctttccacagagatttgatcctttgataatcagatgtattgatggtttcatctttaaaatctcaactttaacttggaccaaggaattcattaaagaaaaaccataccaggtagtatctatacactacacttaagtttgcataaatgagttttattctgtaccaagaatagaggactaagatgatcaataaattttatacaaacaacaccatctaataaatgagaattgtaaggtagggtccattgcatgatgcataatacctatatatgcagtgtaactgaaaaatccacaatgcaggtcttgatggaagtagttccatttcaattcttttttggtttgttcagttgcaaattaaaatagcttgctgcatagatttatcaatccatcttgggattttatttggttaggaagaagaatgcactataaagttggctgtgtttccatttttcttttgtgcagaactgaaataaccctagtattgtgtctaatatcaattaggcctatatcggctacaagttggatggttcaactccttattgaagtgttcaaatttgggatttgtataggagaaaagggaaaagaaacatgcttgactaaatagaagcaatcaagttgcatataatatataataaaccatagatatataaaactcttcataacgacagcagttaatatgccatctattatttcacatcatattaattatgtcagctaaaacttataagtcaaaacatacgtcaacaacaaatgacaaatggaaaaccaagtaaaaaagaaaaaacatatgagaaataagttgaaatcaaagcaacagcaccagtcaccacgttcaggaagagccagatcccactgctttccaaagcctcacccagtccaccatggcttcagcagcacgaccaaacacgggatccacctttcccagttggtccttcacttctttggcaacttcaataacacaatcctcagctttaacggtcgctcgttttaacttcagcgtctgaaagaaaggaacaacttcctccatcagcttgaccccttcccactcttttctcaagctgtcggcagcattgcctctctctgatctctccacatatggcagtccacttttaaccccatagccaaggtgatcacaaatgactttcacacacattccagaccaaatatcttccattgtttcccacctaaacttcccctctcctgccaaccttaaagctggaaacaatgccggtccaaccaactcacgatcaaaagcaatgttgattccacttaaaggcatcaaggttctagctggaacagtcaggacagcatccacgattcttgaattccttagttctggtttgagagcttgtgttggtgcatcatagtctgccaaattgagccacagtccacatgacagagcacatgtaaccccagtacgcaggctaaaggggtaaccgcgaacgaaatctgctccctttcgatatgggtcataaagtgtgttgaaaaagaaaggagtggctggacttgtaaggttggcaatatgctgggacacaacatctactacagaaccgtcgtcattcttgacaggaatgcagtcatcgtcaacagagacaatatatttcttcctggacacaaggaagccaaaataacggcaggagtaaccagagaaaagaattgcagaagaggaaccaaccacacggtccatgtcagactttgtaaagatatcgacattaaagccatcaggtattataagttcctctttcatatcaagatctttcactattgtcaggtggtaaggagaaaatataggtctccaagcatttaggaatggtgtcaggtcaggatggagggcagcaatcacaatgtcaatctcatcatccatgacagtgaagttggtgctagacatcttccaataatcttagtgaaaataatgaaaaagaaaaaaaagaggacttttcaaggcttcttaacacagttgatgtttgtactgcaacttattgaatttggattatgcaaccactacatgggttagaagaacctttgtgaacatcctgaaacaaaatatggatgtcagaaatgaacagaacagatgttagtttaaagtttgtggacaataattattccatagaagagggaagagagagagctggaaaagtaaaagtttagacaaccacgtactactaggtattacaggagcaataatctcgcgaatattaagtgactgaattaatgcaagtacttcatctttgccagttgcaatgaacaacttgagaactctctcgttaagctttccagctttcaatgttttctgcacaaaagcaagaagtaccactaagatgatgccaacaagtactcaacgtgaaaggaaacagtaagaggtctaaagtgtactagataaagattaaataatcaaattagaatcataagaacaagaaagaaaatatcaaagtgtccataaaattaacatgacaacccaattgttaaaattttaacacttatcaagctgattgattttcttttaaaatttgatttatgatccaatggcaattacaacaaaagtttaatgatagataattatcagaagaaaaaacctctcatccattatgttcttacacatttagggatagattttagacatttcaattccttttttttatttccattacaatactccacagagaaatagcaaacttgacatagggtaatggaagttatcagttgctgctaaaataagagaacaggtcatttctaaagaagcaacacttaaatcacaccctaaaaagtatccaaacaattaaactctagaatgaaaagtagacaatttagtgatcaaatgccatcacattctcattcgtgattataaaaaacagtgtctgagttaatcatcctatcaaactacatggaacaaacaagttgatccggtttcattcttctgatctcaaccgatgcaaggtaggatgaaaatcttagatatttcttacctcgcacctatgtcctaatacatacatattctatccatacaaacccaatttttttattattattttgaacaatgaccattttattttcatagtatgatacatcatggagaacatacaaacccaattaaaatccccaattttctcactgcccggaaaacgaaagtagccccatttaacatttcaccccaaaaaataaaaatgtaaggacagcaaatacataaaagaaatataaattcaaaaacaaagagagagagagaggagggagagattttaccaggaaaaggtcgagaaggatgtgttcagggagaggagatagatcagatatatgggagagattatggagtgcagagtcaactgagagagatagcagagaaggcgggtttctcattcactttaatactctcatactcaaaaatgtataaattaatatatcattctctttctctctccttcttctgaaccagttttttctctctccgcaacaaaaaattagggggaataaaaagacgagcagaaagaaaaagtcaaagaagcttgggtgccgaagttgcagatactcttgacaatgcctttctttacaactgtgatacgtttcgttctctccgtctcggggattgctacaagcaaaacccctcttcttttttccccgtttcgtacgctgtgaaactccacacgtgcgttccacactttcgcacgtgctcgtgaatggcccatgccgacgacgaacaaggcccaaccgtaacaaaacctgatccgttcctacttattttctttcttttgtctacttaacgacctgtcgttttctttgttattttataggaagacttggagagaaaactgatacgctgtgcaagcagtgttgcaaattagtgtctgtcgtacttgtccgcccatatttttccgtgctttgcaaaatatgagttgtgtgtgttgggtcatattatgatgtgacaatattttcaaaaggtagatccggcacaactaggcgtgttcattggatcacatccaatatttttaggtctatccagatccgatccaattataaattggatgttaaattttaccattcgatccgatccaattgatttcagtcatccaatcgatccaacatccattggatgttggattggatcggttctatccgttaaatgtatttcatatgtattggtttaatttgaatttaatcaatatttaagactagtatttttggatcagatcggatccatccaatattttaggtccaatatgtattggattagactggatccatccaatccaagaaaaaaagaataaaattttaatgttaatt

SEQ ID NO: 296575 - DNA, 1305 bp, Cannabis indica
cagattctgactctgtttacttcgtccttgtactttgctgggcttgtttctacttttgctgcttcccatgttaccagaaacaaaggaagaagagctagcatcatcgttggatccatcagtttcttcttaggagctgtcctaaatgcagctgccattaacattgccatgttgatcataggaagaatcttccttggaattggcattggattcggcaatcaagtaattttacatttcttttcttacttttattcactcattatcatctcctttggataatgatattagaaaccttatgaatgagattaaactaggggattatttaagttttgttgttttttgtaatatttacaatgtaaaaattttctaattgtgtaggcagttcctttgtacctatcagaaatggctccttcaaaaattcgaggtgcagtgaaccaactatttcagttgacaacttgcttaggaatcctagtagcaaacttaataaactatggaactgaaaagatccatccatggggatggagattgtcacttggtttggctacagttccagctattcttatgttcattggaggaatctttcttcctgagaccccaaatagtcttgtggaacaaggcaaattagatgaagcaagaagagtacttgagaaagttagaggaacaacaaaagttgatgctgagtttgctgatttgattgatgctagcaatgcagcaagagccataaaacacccttttagaaatcttctccaaaggaaaaaccgaccccagttggttatcggtgcactcggtatccctgcattccaacagctcactgggatgaactctatactcttttacgcaccagttatattccagagcttaggatttggctcaggggcttctctgtattcctctgttatcacaagtgtagcccttgttcttgccacattcatttcaatggcatttgttgacaagtttgggagaagagctttcttcttggaagctggttctgaaatgatatgttgcctggtaagtaaagcttccaatgttaaacttaatcacatattaccctatttaaagcattaattctacaattgaaacatacctcccaaattgttcattccatccctttgagtcatttctttgtcactatgaatctgtcaaagaaccactaatataattaacaagtgttaaatcatctcattatggttattgacagtattaggcatcacgtttgagattatgttagcttattatgtcatagtaatatttactaacatgttttttgttgaaccttttttccttttttcagattgctttggctataac

SEQ ID NO: 296576 - DNA, 1247 bp, Cannabis indica
tatatatataaattcgaaaagcttaaagaaacaatatatggatcaattaagtcctatagtcaaataatttatactttatggattaatcactaccatttttatgtctagagccaagtgcacttaacatctttgaagacatttgttgtgattttcaaaattcaacctttgatgattgaaatgaatttgcttctaaccaaagaactctatgaaattacccaattgattgtgacttagagttctatcatcaacatctttacaataattactttatttttagttttgttaacttatattaagagttaatacttaaaatttactaaacaactctcaataacttaagaatggtggataccgataaatgtaaatacgaacatgacacattgacattttttttttattctatttattacctatttgacccacataaaaaaataaacaggttcaactttggtcattttagtatatataatctatcatagttttattaatagattaatacattaaggctaattttatattaccatatttatgatttatttgttaatatataattaattgtgttaaacttattaaatttacgtttaataggttaatttgagttaatttgaaatttgattgtgtctaataacctattttgaactgtacttgttcataataaatttaaactcactaattttatgtcattttcaagttatattattgtgttatgacttatattgtcacccttaaaatgtagtgttacaaaaaatatataaaatttgataaacaaaaaattatctaaatattagtagaaaatttacactacctattatatggtcttaaattagaaactctcttatacaaaattattgttttttattattatttgtatgaatattgattatttgagatcattatatttatgaaattataatatttaatttattgaaaagcacattaacaaggtgtcatatagctagaggcttaatgtctaacaaaacacacaatgacatagtaatgacacacattactaaaactaaatataaaaataaaattaaatgaatcaacaaacttaactattcctattaattaatctttaatttgctaaccttcccaacaacacttccatattatcaataggattaataaggccctacctcatccatcatacctcaataagacatagttctaaagtcataatttgaccatatatatttatatacactaggtgattgttacgtgtcaagccacgtagtgttagttttatt

SEQ ID NO: 296577 - DNA, 1676 bp, Cannabis indica
tcctttatatatatatatatagcatgtattcacacactaacacattgaccattaaccacaactttaatcattaattaatcttttaattaattgttgattttcttttctttttccaatattcattatattaatctgtttttcctccttaaattatttacatgatcaccatttaaacattaataaattaatatattgatacataacagaatcaatcaatcaataattgaaaatccaaataataaataaataaaattactaacaacaagagaattagcattaataatcatcaacaagtattattattattattgctattattgttcttgtgattaggtgaggaagatgaagctgttgaggatgaaacttcatagctacaaatagggcaagatttcttgatttgaagccactttgttatgcaatctaaatgataaggatgttcacatggaagctcaaccaaattattattatcatcttcatcttcatgatcatattcaatttggcaaatcacacacttatcaatatcattaccattttctttcttcttcatcaccatttggttactattactaattgtaataggtttcaaacatgaagaaatttcattaggagagagacctctttgctcaactccaatgaactctcccaaagctatcaattcttcatatgtcaacacatctacatccaaatcatcatcgtcgtcctcatattcttccatgttttcatcttcttcttcttcgtcatccagaaaccctagctcaacttcgaatccgctggaatcaaagaaaaactcgtagtcttcttgattgtactcataatttgagtctgcttcgctttcagtggtggagacctcgggctctgtggaagatcgttcttgctcttgcaaagacatggctaagacgaaatttggatcgtctgatgattgacttggctctttggtagcttgatcatggttgtcatccattattgatgaagattttgatattttttagagagagagaagaagaagaagaagaagaagataagaaggatgagagagagagagagaggattagagaaagggttatagagagaatatagctagggtttttttagtgtttgtttggagtgaaagcaaccttcatatggatagtaatggagaaaagggaaagaaaattctcaagtcttatctaaagttagacttgtagaaaagtcttatatgaagaattattatatataacactttttttttatatattggtggctttgtggagaaggtaaactttgactgaaggcaaaggaggtgtcatgtaaagggttacaacgttattccaattttcaaactttgaaattaagatttctacgttggcctttttgattatttattaattttattaatttatatttagtagtgcttaattacttgcaccatattttaggtaaccaaacacggattggtcaacaaaattccaagtgtttcgtacgtgttcatacttctacgtgggggcccaaatgatatatatgattattcactaaaaaagaattttaattttagtcacaacaaaatttgcggctaaagataaaaaaattgtaactaattataaattatcattattgtgttgtgactaaaaaatctgtagctaaaagtattaatcacaaaaattacaatttattgtgactaaatgtatttttagtcacaa

SEQ ID NO: 296578 - DNA, 4768 bp, Cannabis indica
gtagcgtgccttagcattagggcgttacatgtaacttggttgggagacaatctgcaatgatccgccaaagcagatgttgaaccttagcaggaacattcaattgccagatttgcttccaatggcttatcccaccagtactcggccaatccccattaacaatttgtaggagtttataagcacttcgaactgaatacgccccacttgtctctttagaccatgaccaacaatcaacaccgctggagctactcaactgaatggaaagaattaaatcactatcatgttgattgaaaatatcccgaatcaagtcaacatcccattctcttgaatcaacttgaagcaagctatcaccagattgacccacaagacttgggtggtaagttgttacaaacttgttgtccacatttggaagccaagggtcttctaaaatagttgttttcccatcacagatagatcttatagcacccatctgaacaagagctttagcctccaatatactacgccaaatgaaacttgggttcggtcctaactcaactgataagaaattgcctttagggaaatatcttgctttgtaaacttttgccactaatgaagtttcattagtaagcaaatgccacccctgtttccctagaaaagccatgttataatcccttagattcctaaaaccaagtccaccaacatctttatgacaataaagcttacgccaactcatccaactaactcccttagatgaacccttaccttgcgatttccaccaaaatttagccattaacccctcgaggcttgaacatatttctttaatgagattaaatacactcatagcatagtttgggagagattgagccacagactttagcaaaacctctttgccggccttagaaagaaatctagtctcccaactttggatcttctttatcatcttctccttgagaaaacctaaaatggcatttttacttcttcccatagtgcaaggcaaacccaggtatgaattgtcagaagcaggaaccataccatgtaaattacacaggtgagtccaatcctcatattgaacattattactgaaaaagactgaggatttagcaaagttgatcttctttcccgaagctctctcatagatagcaagaagccaaagtacactagcaacctccgtctcatttgctttgcaaaaaatataactatcatctgcaaacaacatatgagaaataagaggagcatttctagcaacacgacatcccgttaaccaatgtttttgcacaaacaaattaaccagataagagaaaccctcagcacaaatcaagaacaggtaggggataatggatctccctgcctaatacctctgcttagtacaatgggacccaaagctttaccaccgtgagtgatcttgtatgtaactgaagaaacagagtacataatcaacgcaacaagtttactagagaaccccatctgaatcatcatcagttcaagaaaagtccactccactctatcatacgctttactcatatccagtttcaaagccatagtaccaactttgcccattctctttctcttaagataatgcattatctcaaaagaaatcattatattatcagagattagtcttccctgtataaaagcactctgagtttcagaaataacacaaggtaagacaatcttcagtctgttggcaagtaccttagatatgactttgtacacaacattacaaagcgagataggacgaagatccatcatagtttcaggttgtttcttcttaggaatgagaacaatattagtttcattaagcaaaggagaaaagtaacatgtgtaaaaaaacatttggacttgcgagataatatcaccacccactacattccatcattttgaaaaaaacccggagtcttatcgtcaggtccgggtgatttatctggatgcatttggaaaagtgctcttcaaacttcatcatcagtaacaggttccaacaacaaactattttgagatgccgtgacaacacttggaatagtgtcagtaacctctcgaatttccaacgaagaagaagagaacaactgactgaaataatcaatcattagaccttccaagttattctcccaatcaacccatccaccttggtcatttttcagcttctgaattgaattatttctccttcttgaagtggccatagcatgaaaatacttagaattctgatcaccctcctttaaccacaattgtttcgatcgctggcgccaaaaaatctccttctgaatcaacacctcttgcagtcgagcctctgcatttttatagttctgaatagaggcatcatctccaccattcttccaccttttaatctcacttttacaatcccgaatgcgagctttaaagttgcctgaatagtctttcccccaaaccagtaactttttaccacaatagctgattttatccattacagaacagcctgaaaaatactcccagatatcttgaataatttgcaaacaaggcggctccctgagccataaattttcaaatcaaaacttcttctgaaactcctgtttctttacaatatcaagagtcaattgtatcggacagtggtccgaagttgagacttcaagattgatcaacttagcaagtgggaaaacatcaagccaagtttgaaagactaaagccctatcaatttgaatgtcaatccaagcactagtaccacggcccttctcccaagtgtagggatatccacacaactccatgtcaaataaattacactcctccaacatgttcccaaatccttcaatgagccaattaggatatggatgaccacccctcttatccgattgagaagtaacattgttaaggtccccaataacacaccatggcaaagaatagctatcctttagagaccgaatttgattccaagtgtttctcctaagactttggtttggctctccataaagaccagtgaggcgccattgtttcccatcattctcaaggatttcaacatcaatgaagttcccaccataaccaagtaacttaacatcattactatcacgccagagcatagctactcctccacttttacctctagcatcaactgaaaacaccccctcaaaacctagagacacacgtgtcttttccaacacttcagactttgacaaagtttcacaaagaaacacaactttgggctgcttttggataactaaatcctttaagaatgaataacccatgggttcccaagcccatggcaattccaagccaagatactcataatgatcggtgggcctgtgcaccaaggcccacctgtgaatcgttttttgagctatcattcaaatcctccataccgcccatattactatcttccacttcatgagactccttcattatttccttattagtacgccttcttttattgtccaatataagcacagaatcctcaattggactttccacctggtgatctttattaccatgatcctcattattaaccatgataatgtttcctttattccctccttgattggatacccgaattactcccccattgtctcctgaattatctccatcaaatcgcaccattgttggaatgattgattctcttgcctccgccatactccgagactgtccactgccagcagccccaccatcatcttcctatcggcctgaacgtaaccattgagccccaatgaggtaattctttttcctagtaacagctttcatccattcaccataaggtttgatgttctgatcaaaatgagggtcaaatcttcttggacaaaacctgtctgaatggccaatgaatccacatataaaacagaacgtaaggacatgttcatatttaaaagtagtccaaagccaagagccatctgatttaatcaacttcatgcgcctctttaatggcttgttgatatcattgtgacccgcactcgaagataatctcgccaaattccaataaagttttttggatcagatttaacaaactttccaatgtaattacctgcatgtctaacaacccaatccgacataaaaccatatttcaaatcatgaagctgaacccacatatccaactcatgcaactgaaccaatctggggtcttctcctctctttaaacgatgaaacaccaattgcaatctattgaaagtccaaggacttccatcaataacagtttgaatatcaagttcacggtaaaaatggaaaagatattggtttgtgtccagttctttgacatagactcctttaccaggttgccaaagggaagccaacatgtgcctcattgcatcaaaatcgatagttctattagtggggaacttaccaaccaaacaccacctatcatcaaatgcttggacctctccctcgtgttcttcaccaattaggatcccctcctcctcttcttccaactgtaagtgtgcgtattcatccatccattctccaccttcatggctgctcgaagccataacagaaaacaaccaaaactcacataaacaaggaaaccagagaactttcaaaacatgtcaaaagacaagacatcactaatttccattttagtttgtgcatttgtaaaacttgaaaaatctgctacataattttggcattcttctacttattaaacacttatatcattatcatcaaaacaattgtttaaaagttctactaaaggaaagcaacgtgaaaaatatataaagaaaaaaaatataaaaatacaaaaggaacaaaatgtataaagtccacatacaaatatttacaaaataccacatgcactaagccttcagctgtacagagcgaaccatgaagataaaaatacgcgctcgtttcaaaa

SEQ ID NO: 296579 - DNA, 4258 bp, Cannabis indica
gggactaaaagtcacatttagtacaaaaaaaaactatgttatgactaaaaaattgtcactaaaagtaacagttttttgtagtgaaatttaaataagattcaaacagtttatttcatacgtgtataaaataaaatattctcctctacaatatttaaatattgtttttaaaattttacaaaatgttttaaaaaactaaaacataaaatctcccatgcatcgataaacccttctgggtgcattatagtgctttcttgcagttacatatatatagtgttgctgcaaaaaataaagtcatgtacttactactactatttgcatgttaaaagtaagcacgcttaacattgtttgaactttgaatcacatacaaatatgtacgaacaaattcatgcagatcatcactactataggtataggccacaatcatttcaccaatatttttttacttataattagatttgtaagagagaaatatgtttaatttgataaatgttaattaagagtaatttattagtatatttcaattatcgtttcacttgatttaatcctttaaactcaaattttggcagtaaaattttccaaattattaaactgtgttagtaaattatttcaatttgtcatttgattaactgacattaactacttatatatatacacttttatacacatgatattttatattggtacacctaatcttattattttaaagtttattttaaaattaaataaaattattcttgagagaaatatttgtaaaaaagatcattgatataagcttaataaagttgactaatgaactatgactcgttagcacataaaaattgcttgattatttcttttttgtccttaatttaagctctaattctcttctttaaatcggtttctaaaacactcagcaaacacaaactaatgtcaatttttaaactcgtcaaaaaaaaaaaggtttatatattaaacccacacacatattagagaacaatcacatctaaaaaataatgaaccctacaataataaataaatattattagttgaaattatttgtcaaatatataaatgtgtgtgacacaccgaaaattcacacgaaaaaattcatagtactaactttcactcccccaactttaatatataaaaataaaaaaaattatgtgcttgtttttaattaatagatgaggaagtcttattttttgacaccataaatgcatagttttaagtttttgggctagccaacaacaaaaataataataattataatatgcaaatctaagaaaaatgctaaccagggcgactcttgactaaagcaagttaagctcgtgcctaaaactcgttcatataaggctcaaataaaaaatatattttttttaataaatatacatatttcttgtatttttttttaaaataccatatacaagtccaaaagtttaaatcaactcaaggccaactttgatgccaatatattcactgtttacataaaaccacaaaaagaaacactcactataaatatatttacaaaacctcttaatcaacaaatacataaaactcttttaaattgactcaccctatatgtaaaacaagttctccctcataaaaatggcataattaatttcctatatatatgtatatacatattataataatcccaatacatcaactccaccacaaatactaattgcctcttgtctaagttgatcaatttcagcttgagcctgtgccctaatctctgcattgtatgactccaaacttggcctcaagctttctattttccttgtaatacttctgatctgtaattaattaattaataaattagaccccataatatataattgtaacaaagtttataatatatataaattaattaagaattaattaattaacctttctataaggccatctatgcaaaccacttttacgacaaatcttttttagaacagttgggcaaacattcatagcctttgcagcatcctcgattgtaagatgaagataatcgcgtagatccatcagtgtcaaccttcctgttctttgtctctgtattcaatccaatccaattcatcgaaatataaaattttgatttttaatttcgactttcactacaaaaaatcataataactaagaaataaaaaaccaaataagcatagaattaagaataaattttagtggatgcacacacattttacacacttaatttgtacactatgaatggttttaaatgtatggtgtgtaaattaagtgtgtatctattattaacatttaacttaataatcacaaattataataactttgactttgactacaacaaaatcacagtaaaatattgaaatttttaatagtcaaattatattatatattccaatctactctcctaaaaattaattagtaataagagaagaaattaaacagtactattcactacactcaatagatgcacacacatttttacacactattaagtatatatctattattaacattcattttaataatcacaaaatatactaataaattaagacacagatttcaaattactaatcagcactaaataattttgagttaaatcatatatttaagaaataattaagaacctgttgagcaagagacagcctggtattattattcctttctaaatcactctgctgggctggttcagtttgttctggccttatcacttcttcttcttcttcttgttccaaaaattaaatctcctaataataattaacaaaaacacataaaaatgtaaatgataataaaaaatggtatttttccaatttattttaaaatggtaattttctaatttttaaaaatggttacctgaattgagtggagaaaggggaaagaatggaaaatcatcccattctaaaccaacacacaaagcctcataaaaagtagccaatggatcatttatcataacataaccttctctctttctttctgaacaataatccactagaaacctcttcacttcttctatgctttgtctacaaaaactgttcaaaattcatatttttatttatccatacatataaatataatcattaatctatatatatatataatcatcacttactcaaacatttgaaatcgaggattttctgaagtagaagtagaagtagaagacttagtctcacaaagtgcatgacaaatcataccaagtcttccatgaatctcaagtttcatgtagttgttcaataattcttcaaaagagacaaaaacgacattaagttagtcaaaacgacaatgaaatcactcataataaaatgtgacaataattagttaccattgacatgaatgatttctctaagaacttgacaacaactacaattgaatggaacaggagaaggaggccaattctgaagcaacattggataattaccaccaccaccaccattattattattattataattaatattatcattattataattataattagtactagtattgccttgttcaaaaaatgaatgattattctctactgataataaagcaggatcaatattaggatcaattggcaaactatcccaagtaatcattggaggaggaatttgattattattattattattattattgttattattattaatattatgatcgtgtggcggtggtaaatccatcaaggttggattttgatctccaccgttcaaaatcattgaaatgaattctgaaaatgggccatcaaatgattcgtacagagataaaaacagggcctcttcatctgttgccatacatggcgattttccctactttttttttcttttatttgggggaatttgtgtatatatatatatgtatatatgtatggtggtaagtagtagtagtagtggcggcgcgtgtgaaccaagcgccaccactgaaggggggtgttgaagagagcaccagtgatgtttggtgattcggagaaattgaagttttgaagtttgaagaattttatgtgtgtgaagagatgctttggtgatattataatttaagaggtagttacttaccgtttggttggattcaaaaacggttattttggtctttttgaaaaacattaatttattatttaaatatcaatgtttgtttgtttgtacttcaaatgattttagcaacgtcaccacttcttaattagtttgttaattatggtcttaattattattattattattattattattattatttgggaaatttacatggtatactaacttttgcttatttttttacaaaaatactaccaggcggtattttttacttttttactgttatttttatataagtttcatac

SEQ ID NO: 296580 - DNA, 7290 bp, Cannabis indica
taatggagacccgaacgaatcccaagagtttcgcattcctcatttttctccgctcgccaactctgttgtctctcgctcttccaggtttattaccaaaaaaaatgcacttcttgtctttatatgttatgggtgatgctgaagatttgaaatttacagtaccaatcattttgcggggagcaacatcgacttttgttagcatagctcacattatgaactagctatgtaataatattgatcggtgtatagtttcagggaagtaaaatgtttaggatcggattttctaagagcttgatctcgggagattttcccattaagagtaggtgtaaggtggactgtttaagctagatatgttcagtttgatttttatagtaacttacctagatatgttcagtttcatatgtgaggttgtgtttatcgggtggactagtatacaataaaatgaactctctcaaatcaacttggtttaaaaagattgagaatgtacattttggtttcatgtgtatgtttggtaatttttggtgaatcttgaattataatttgctataatataattggagtggaatcgaggggaggaaattgggggatcatgagagttgggatataattttgggtgaatcttgaattataatttgcattcacttcattcatgtgtttagtcgatggcaagattgatagctctagcaagattttaagttggtaaatcgattagtttagttggcgtagatgagagagattaattttgagatggagtggaattgtgttggcaaattttcgtgatttttcaagaataaaaaatgttcatactgcatattaattaactgcttaaacaatgtacttctagtaagtttcatggcttctcaaatgtgttcttgtggtgtttcagaatacttcaaattcctactgaagaattacagcatcattttggaacagagccacctgagaatgctaaagaacttcagacttatgcaagacattttttagaattttgctcttaccaagctttacagatagtgagtaagcgctcagattacttaagcgataaggagttccgtcgtttgacttttgacatgatgcttgcatgggaggatcctgtagttaagagtaaaccggtacagaaagtgagacagccaaatatatcttttccttttgattttgtaacataatagtagtgttttatgttaatgttaaatttaaaaaattaacaggactctttaatacatttctgattttatttttcttcggattaaagatgatgcattaatttttctttgactgcaggtgattgaatccagcattaatcaggaagtagaggatgaaagtgggtggtcacttttctattcaagttctacaaacatggctgttcaggttctgttcatatacttttccccctgtatgcatgttgtggcttggcaagtctaccttccaagaattattgatggctatattgcttcgttttgtttctcctttaggtcgatgaggagaaaactgttggacctgaggcttttgcacggatagctcctgcttgtgcagctgttgctgatataatcacggtgcacaatctttttgatgcactggcagcttctactggtcatcgacttcattttcttgtatatgacaaatacataagaaaccttgacaagtaagacgttacatcttgattatgttactttctagattccagacttcttaagaagaatttatcttaacttcttaaatttgttaccatttttgccctattattattattaactctttaagataaattcttttgttgaagttcctggcatttaatggacatattaaaaaagacaagttgattaagttaatatctacaatttggtcctttcatctcaatatgaaaatacaataagatggtgattctctctgctcaagaaaactgtttaaatattcaagtcagaaagttcatatatttttttttactattatgatactttttctattgttgttaggcttctagtgctgggactttaatatacttccaaaaactaacatccagagatccaatgtaactcacttaactgtaaaagttataactggacctccttcgcccaccccaaaacaaaatttaaaaggggatgaagagggcaccataattgttggaatgttagatattattagctgtacagtagaattacaagtacattttccttgcccccaggccattggtgtagagacaagaggggactcgagtatgcctgactgtggcgggcatctcaaggtcaattcctagtagctgcagaattgtgtggggtaacccctttgtcgataagtgggggtgtggcccacatgtcctcagttattaaaaaatcttcaatgtcattgttgtttttctcttattttatttttctctttggtggtggtggtggtgtggggggtaaaatttcttggtttcttgatttgttaatcattgtgagtgaggttatcatactaggttttttttgtaggattattaggctgcgaaaaatgcattggtctcttctatcggaaatctcattcttctatatgactttccattttactccaataaataaagcagaaatagggtttcatgatttcatttgcaactaaaatttgcttactaaatagttctttagcaagataaataccactaatacataattgaaaaggaaaaaaactataccactatgtcatgagatgaaatggacattactgctggcttagctttttaggttagttacttctcttgcctaaataatgattctagaaaccctcgtgaaagtgcaatgccacaaaatgtggagttgatgtggtttccttacggtggtgatgtaaccccagcccccagcctaggggcatctatgaattacagagataataggcaaaattgtagagaaacttgggaagaatgcaatagaaacaactaggcagatcttgtatttaatatttaattatataaagacaagaaaacacaagaacaatgaggtgtttgagagacctcaactctccaaagggttactgctcaattacaaaaaatactgaccttcctcacgttttcatctcatccccttctattttcctaacttacccaaaacaaaacataaaccaaacagaagcaaaagccaaaacagaaaccaagcaagtaaataaaatcataaatttactaaacttacataaatatcccctcccccgaatctactcactaattggtggtctatctttcaaggtttcatcagtttgaacttgtgtgttttgtttgatgacctaatgcaagataattttaattttgatgtgtctgctaaattttcatcacaattttttcttattcaagttatggttttttgtagggcggctgacactgactaattatgctctgtactttgaatcactgggagttgggttgtatgataaagctgttagatatgatctcgcaaccgatatgaagcaggtcataaaacctgaaatgactggaccattgggtgcaagaatttttgataaagcggttatgtacaaatcaacatctatgtatgttatcgtcaatgatgcatattttgtgactagcatatatttgtgaatttgcaacgtactgtcatcttctttttcttttcttttctttttattatttatttatttatcgctgttgttgagtttgttctgcattttcttatgcagagcagaccctgtttattttgaatttcctgaattcaaagggagttctcgccgggattattggttggatattggtctggagatcttttatgcacaccggtttatcaggaaaaataacctgaaaggaactcaaaaatcagaagctctttcacgggctattctgggaatctttcggtatcatgcaattagggaagcgttccgcttttcctcatcacaatacaagaccttacttccttataacctcgctgaaagtctaccaaggggagattttatattggaaactctgttaagtagattgatccttataaatgctgatactacccatcgtgatgtttctggtgggagttcatcagcaaaacaggtgccaaaagcatctccagtttcacttctggcacttctgcatctcggattcatattgcaaaaagaggtaatgcttgatgaaaaagcaataatagttggggacatttgtgttggtgagaccaatcccttagaaacagcggtgaaacagtcagtgtcagacacaagtagtgctgaagctgctcaggcaactatagaccaagtgaaggttgaaggaatcgatacaaatgttgcagtgatgaaggttaatcatgaacttaacctgctcagttttcttttcctattaaaataacttaatactccattttcactggtttgattatcctgctttaatgagtggagcaaggtgggtgatttttttatctctgaataagagataaagctcttgatattattgcttacccaattccaaaaaaggattgaatttagtgtaactcatggtgtaaactagtctgtatgttgtttgcatattttgctgttttgcacctgggccaaatcgttagttggaaatatatataataggataataggatacgcatagactgtaatagatttcagtggctgtctttctgtaaaaattattcgcattgtagtctgcttgtcactcaccaaattactgtgtttggcctctattttttttttcaggaactactgtttccggttattgcaatagctagccggctccaacttttggcttcatgggaagagtcttataaatcaataatgtttatgttgctcacctgctactgtattttcaggtttgtcatatttagcctccacaccagtgtatgttaacataaagacattgctttgggttgttttgtttgtgggtggtgaacccagaataaactgcttatatgccatggaaacgctaccataaaagctttataatactcatattattattctcaaattaataaattgtctaaattattagataaagataggatttgattcttcaaggttataataactagcgccagtgcatattatccttgaatgctgattaactttccaattttttctgctaaatcttactttcatttttggaatcgaaatgtgaacattgctgccaatagcttaaatgaagagaactaatgttagttggttttcaattttgatgtacaggggttggattagatatatattgccattcctttttctatttgttgcggttatcatgctctggcgaaggcattttaacaaagggaagccattagaacccttcagagttacagcgcccccaaatcgaaatactgttgaacagctactgacattacaagaaattatttctcaagttgaagccttgattcaaagtgggaatatcgttctcttgaagattagagctctcatgtttgccgtactaccacgggtatagaaattcttgcaactaattaccactcaaaactttacattggtcgatgacatttttccagattaagcttttataaatgagtaattaaaatattaagattttataaatgatcttgcatgcattttaaaccaatcaaatttattaaagtagaactacaataattttatgtggtttagtttacttgtaaatttgagttataggtatttgtttaatattactccgtgtaaatttgagtaataagtattagtgatattactgatctagcctcagtaactattttcctcacaatttaattagactaggaaaaaactcggttgtttgaaattttttaaatttttactgtatataatattaatattatgtacgtaattttaaatttcaattaattattatttatatgtagaataaaaaaattataaaaatgaaagaattaaggtgagaataaatagaggtatttaaagctattttagactgtcgtttatagattcagatttagactttctaatgttatatatattttgtttgggtgcaggcgacggacggagtggttctattgcttgttttcttggctggagtcttcgcatttgtacctttcaaatacatcattatggtaattttccttgaggcttacactagggaaatgccttacaggaaagaaagcagtgacaagatatttagaagagctagagaatggtgggtccggataccagctgctcctgttcagcttattaaacccgaaagtgacaagaaaaagaagtcgtagttctatatgtaatataaccaagacttcagtttcaaacttccatcttcttccatttgttctatgtatataaaaattttagcttgcaactgtttgttccttttggcaggagataaaggttaatgcaaaatatcatacacttaattttttttttcatcacttgggtatgatagataatattaaattgaactgagagagagacttctttatccaaagtgaatacaaaatcataatatgtacacttctacgaaactgtgtataaaagaatgcatagtatactataatttgtgatgcaaagaacacactttcaattattattttacagcatgatgatcaactaccaaaaaagaggggaaaaaagtgttaagatctgtacaaaattagatgataaaaactaataagggcaggggccgcacatgatttaatgtgaagaaatgatctctaccttccgtgaatgatcaaacgttatctggccaaaattccctgaaaaaagccctttcaaattccttctcttgtaattttctttcaaattcctgcatcttcctcatctttttggagagtgacttcgacttttttgagggcggatcctaaaatgaaagaaatattagactcattaccaatgtacaagcaaatgcatgaacaaaacatgcatacatgggaaaaaaataaaaaagaagaccagattgcactttttacttaaaaaaaaaaaaggttagcagaatttaactgcccaacaacgctatcccatagaaatctccttgacattatggcattttttttaatcctaaaacgttctctaattcaagttgcttcacatcaattctgttagtaaatttggttctagatccatgtatctctttattcaaaaaaaaaaaaaagatccatgaatgtcttgtgttagaaacattgagacaaatgcaacttccatttataacctgggtttgttatctatcttttcatggttgtgatatttacttgatagtagaagatttcatataggaaaatattctgcaagtataacagctaatgaaaaccacctgatcatttttactgtgagagttagtagcgtccttagcatcatgaggctttagcacctttttctttcctttgtcagctcctaatccgcgcttgttatttttcaaacaggctt

SEQ ID NO: 296581 - DNA, 1509 bp, Cannabis indica
tctctctctctctctctccacaagcacaatggacgacatcggcgaagagaccactagggccacgaatcacgcacattcaccgtaaaaagttcactgctcatctagctcgctactaatctactgtggaaacccaaacacgcacattctcttcaataatggataagtatttttcaaacatttagaagagtatgtaattcatttccattaaatctgagtggttgttatttatattggtgatattttgctattttttgcttgaaatgacgagatatggttttccagtgaaagctaagttttttaggaaaattcgatagggttttgatattatatcaactgtttttgatgattaccaaggttagtgatgacacttttcgattgttttgagatagtttctcaattatttttatggctgtctgatttttacttgtctaaattttcattaagttctcgatgggatgttgatatctttttcgatactttcacgatttttctcgaaaagtgttgttatctttccatcatgattgtttctcaatagtttcttgattgccacctgataaatgtttgttctctatccgtcacgatgattttctgatagtttgtctatttattttgtgatgaaatgtataattttgcctattttaagtgtttttaatatttttgttcgatatttcctaactatttttttaagaaattgcaggataggttgtgtttttagttgtattgtatgatggtgtttgatgtgataagagttttaattgggtttataaaagtgaaggtagtttgacgttgatggttgaaattaacacaaccttacaaaaaatgcgcgagatgagggcaacaatatcaaacgcagaggttattaagaaataatgtcaactaagaggttatgaaaaaagaacgtcaactaagagtgttcttagagatgagggcaacaatgttaaatacagaatttatgtcattagttttgaccaaggtaaaaagagttggaaatttggagtctactctccttaatcctccccctcggagcgtggttggatcttttgtccctaaaagaaatgttgtggttagtgtgaatatggaggctcctacgaatatagatcaacactaagaactgccaggatttggtcagtttaaggagttcaatgctccctactacaacaatgatcctattatagtttgaatatggacgacaaagatgacttggtagtcaatgaagttattgaggtacctttcttgaggttggattgtgaaccaagaaactatggtgcatagcaacaacgaagaccccgtaatgaatatcgcgctacacttagaactagtagttgttgacaaggtagattagaagaacatgatccccattatgcaccgttctctacattctcttcatttgaagtttgtaccaagttcaaaactcctatgtgaacaaaggaaaatacattggaaaatcatgtgctgactacttcgttacaaagtgttatcccaaattttgcgctctgacgtggcatcacg

SEQ ID NO: 296582 - DNA, 5024 bp, Cannabis indica
atcatgtctgctattttgatcacatcttggtcagtgatatcaagctcgttaaccatttcagtagcaacgctcaacgcagtatcattctcaatatcaaatgggaaatatatgttccgaattcggcctgcataagcaaaagaaaaatgttacttaaaacattaatttttgatgataaattactttcatagttcccaaataataataataataaaaatgaacagaaacatagattatcatgactaaccctctttatctgcaatcctgagccttaaaaagattccatcctcgccatcttttctccttcctttgattgtgatgtcaaaatctcccacatgctcatcctcttgaccagagaagaggtcaatctcatttgcttcatactcaataacaggatgacaatccaagtcattttcaggttcatagacataaccattgttcaaatatctgttactgttactgtgatgaagtccatagtgaggttgcctaaagaaaggtcctacatcatcatagtcagtttcatactccaatgaactcatatcatatccataatcctccacttggagaaaagggtctttcagaagctctaaagcagtaaacctacaagacactgttgctaagcatttctcaacgaattgtctcacctcaggatttttcactttgtacaaagcttctggttttttaccctatatgaaagtaacgaaacaagaaaatcaattactggaaaccaaaatgatatagaaaagaaaagaaaaagtaagagttttagaggtcatacagagataactttcttgtaaatctgagcagggtgtgtacattcactgtatggatattcaaaggtaaccatttccaagatacacatcccaaaagcatatatgtctactaattcgttgtattcctcttcatacacttctggagccataaattctggtgttcctgggaacacacaaaaaagagaacaaacacaagtgaacaaagtcaatctcataatgctataaactctaagaactcgggaagaacaacatagtcaaacactgttatacacatgtatcactaagttcgaactcattgacacttacctacacaatgagcagcatgggattttctcagaatagcagcaaggccaaggtcaccaatcttaacttccccttggtttccattgatgaaaatattgtcacacttgagatctctgtgaatcacaggggggttacggctgtgaagatatagaagacctttcagaatctgtctgcaccaatgcttaaccgctcttatgttaactctcctgtgttttagcctatacctatccaatacaagtgaaaattaaacaaaacaatacaaatggtaagtactttttacttgtttgaggtaataaggtttgagaaaattagcaaaagggactaaaattcttactgcctaagagtgccagaggtgaacatctcagtgacaaagttaatgtttctgttagcagtatcaacccaagaagtgtagaacttcattatatgtttgtgtttcaaggtcttaagaagatgaatttcagagtagagtctctcaagatcttcaggattttgcaaaaagtcatagagtttaacttggttccatgccacttcaatcccttcatactcatcaaaggctctatagctgtaacaacaacatataatacatccaaatgaataataaaattttcaactttaactgaaaaaaaaaagctaaaaaattccaaccaaggaaataaatagaccagggtgcaaaaccaactattaaaagtcttactctttctaaattttaaaacagaatgcagagaaagagagctacttacactgtctttgatgcccctttaccaagaatctcattgtactgagaggaaaaagagaaaaaaaaaacagtaaagattgaacttttaaaactaagtttgatcaacatgtccaaaaaattgaagacaagaaaaaaaaagtatgaaaagttgttacccttccatatcttccagtaggatcaacttcaacaatttctgagcaagcttgttctgaattcccatccattctcccttctatgcttaatcaattggtcaatcctttttttttttaattgtccaaaatccaaaaatgtttagagagagagaaagagatggaaagggagaggtatatatatggctttaataaatgaaatgaaaatgtatgtaaaacaagaagggaagagtaaaaaagaagagttgattaagaagacaaattttttaataaatgacaagtagtgagagaataatagagagaaacagacaaggaggcaaaggttttcacaaggttggttttcacaaggttagggagtagtcttcctagtccccataccccacacatcctcatcctcacaaaaccacatttatggctaattaggaattttattcttaaattttgacatatactaaattgtgctctttgaatttttaaagtaagttcgagtggtagacttggtagatatcaaagtatgaagaacatggtttagtacataaataatcactgaaatagtaaaattaaacaaaagactttaaatctaactatctcaataattcaagaaaaatttttaatagtgagaaaaattcaaaattataatttaaagtttagggataaaactttctctttcactctctctcttctctctttccatctcatcacgagctgttaagccaaccacaactctctctctctccctcttcctttgcaaagacttggaccaaccaaccacaaactctctctctctctcatttctttttaatgaataagcattaatttgaaaaaattaaagggattaatatcaatattatatgtggttaaggtgatgtaaaactattggctatcggcagatatctttcgttttgggaaagctctgcttttattcatttttttttcatcaacaatatcttattcttattatattgccatttaggaaaaaaaaaacaatcttattataaacctttatgaacatcatggtgtgggtgagtttactttctcttttatattctttatcttcttaaatatgtttacgtgtattatatttagaaagaaaaaggcttggtattcatttatgtgacatattataacatttccaatacaattaagtataataaagttttagtattttattggtggatatgcgaaactagtggatgtaaaggctagagaaagagatacaattacatcatacattatattttgggaaagtttactttaattatcatcatcaataataatactcccttatataataaaaataaatacataaataataccccattatagtattctgtaatagactatacaataaatatatttataaaactatggagggcaaattaggattttaagagcatgataggttctttaaagagagagtgactttttatcttaattaaattatcatagtatcatttatttatttgtttttgaaattgggaggaaagagtcgaacttgagatacctcctttttgtaagaagaaatatgaaccactatgctatgcttatgactacttatttctttctattttgatatttcgtatttgtattattgtgcgaaacgaaaataatcaatgacctatgatatagtatattgtacaaactaatacgcgacataatcaaaaaccattattcgcgtttatagcattggacacatggattccagatcagcattcaagatccatcagtgggaccctcatcaatgataaagtcgggcagacccacctggatatgtcctttcaggagctatcttagttccgtactcgcacagtcttctgccttcggcgaaccgagcctggacggtatcacgagactggaggggtaaggtagtgccttcccagaagacccttctagtttccttatttattctcacacatatatataggaacattctagctgtcagatcacgtcagaatatggtatcatgattaaagggaaaacttcccataacaatcgttttgtagttaattcagaataataacccaccattagcggacacagtgttgactcaatcaacctaactccaatccgcctagttagcagatcgtatttttcatgggctagacttcatgaaaatgcccaaagatatcgtttaattgtaaactcccaagtagatggaaaaaggagaaccttaatgtaattctctaactattataaatatcccattaatctcatggattagaggttgaactctcttacgtactttgctcaggcaaacatacgaacatacatcctgtgtatctcttaaagcatttacaagtaaacaacttactgaataaaactgactcgcggactaaagctagttaacgccccaactacgtaaaaaactatttgtctctttatatactttctctttcgattgtgatttcttcagttcttattattattctgttctgaaaatcttgggaaacaagaacaatatatcgagagatctcaagaaccaagtaatgatttaaaacagtaaaataaagaagaatagcatcgggtttaatgagtctacatctcggttggaacaacagcagtcatatctttattggtatgagtgttatcaaggttacaagaatcctcacaaactctcagagattacgagaaaatatttctctctctagtttagactctcttctctcaaccttacactatcacgattttcactctagcaattatggtctgattcacctcacatgattacaaagatttgatagctatttatagattttcactgttgcttgaaataggtccaaagctatcgtggcacatttacaccactttaaatatttcagctcaccaccaacaaccataatccacgcagctttgagaatgcactttcagtactaataatatggaagctttaatacggataagctatctggacacgtacaagcgctccttccggagatgcacttccaaatagcttactatcagtcaaggatgttcgacttttacttgggcttacatcaatttttattggttttattaaaacttgagttgattggatagttttttgctgtattagtccatattgttggt

SEQ ID NO: 296583 - DNA, 4661 bp, Cannabis indica
aaaaaaaaaaaatcttttttttatatataaaaaacaaataaaaaaagagaggggaccccataacatgtgctgttatcacaaagaaactaaagaaagtcctaatcaaattgtatagaaagtccccacttttttgaacaaacctaacacgttcatttgtagttgtagattcttatgtatacatcttccatgtgctataactttcttcaccttacaaatcaaaccaaaccaaacacaactcatcaaatattaaaagggattgctattagacaccggtagtgttcaatatcactgttacgagttgttaagtatcgattgtgttgacagttttagatcgttttaagcaaatttaagagatatgatactttcagatcatattgtacactgtgttgtattgtataatattgtgttgaactagattatactgtactgttctatatttggtattaactgtaaaattatactaactttaccttaaacccaaccccgaccaggacccaaacccggtttccaaactaaacctggaccatgaaccacaaaccagaccctagacccaactcgaaaacctggatctggaaccaaacccgatcttggaccttaacccgagataatatctacttttttagagagtattaaatgactcaagcaacacatttttggtaatgttaggcaaatttgttcctttagcattaaaagcaagtcaaaaatcatagacatacacttctcatccagctaatatctaatcatcaacttttggttttttttatagccttatcaaaagctctctttccatgtcataatagagtggaaagtggttcaaaatatggggaatcctaagagagtattgagtccttttctttttaacactacaatactcaaaagaacaactcataagaaaaattgggcaaaggaaaatgtctcacaaagaaattataattaagaaagtaaaaaaggaaatattatacatttggagaataatataatgaaagaatatcaaaggagaacaacaacaacacacctttaggggccttttgttcttccttttttggccatattaaggtatcttggtaatgagaaaaacaatgtgttagctcaaaagaatcaacaatagctgtaaatttttacatatttcatctggttttaggacaagaaaacatattgtgtgaagaacaaaactaagcaataaatacagaagaagaaaaatttaagataaaaacagttgcaatattcaatcatcaaatcacttgggagtcaaatgattatcaccggcaatccgttgattgaaatgagtcagcgaatttcgatggaatgctagattgagtttgtgataaggaaatgtcatcaaacattcgggaagtcccttcatcggcttgccatctttgtaaagcttgaggaaggctcatgtttaggttaataccgtcgttttcatcgtcttcttggcaagaaggtttccattgctcgacgagaggacctaagatgttgacagcatgtcccatgtcgggtctttggtatggttcccgagcagtacaatgtcctgctaactcagcaactttgtatatgctctccattgtctcctcatcggggtcgagagtttgatcaatcgcctttggaatgttctccttgttgattaggactcttctgaaccatgtcaccaaatgagacctctcatcaggcactgtgtcatctagagcttttctaccagttatgatttccattaaaacaacaccaaatgcataaacatctactttcgttgtcactctaccggttgctgtagaaaatcaacatgagtaacaatatttagtactgtaaataactcttcctagcagtaatgtaaatagagattaaagagacaatgtaagaatttcttaccagcatactcaggtgcaaggtacccgaaagtcccagccaatctcgtctccaaagagtattttccatcaggggcattcttaaccaaaccgaaatcagcaacctttgctctcatcaaatcatcaagaagaatgtttgatggttttaaatctctatggataaaactctgttgagctaaactgtgaagatattccactcctcgcgccacatccaatgctatagtaaccctttgcttccatgtaagaggagaaatcccatactcttgccaatcaaacaaatgttgagtcaatgttccttgtggcatgtattcatataccaaaagcctctcatggccattgatgcagtatcccaagagtgcaaccaaatgtctatgcctaacttttgtaagaacagcaatctcggcctgaaactcgttcatccctttcgttcccatggcattagactccatccttttcactgcaattttagtcccatcatgcaactctcctttgtaaacaacaccgaaaccgcctctccccaaaatattatcttcactgaaattattcgtcacttgcctaagaacttgcatcgaaatggaaacatttccaccctcaaaaaccggaaaatcattccgatcaccactactctggctctgcaattcactagcaattccattataaccattattacccattacactagccttccccatttctttaccaatctcaggattttccacccttccaaatttcttatgcctattcttaacaaaacatttataggacacaaacaatacaacaagaacaaagataatcacagcaattacaataccagcaatcataccagccgaaacccgattaccattccccgttccattcgcgctcccatcagtggaattgctagagccagagccagaagaccctccactctccgagctcggagttttcccaagtaaaacattaccagtagtggtaaacttcacccttggtggaaaactaggaatgtcaccagtaagattgttattagaaacatcaagaacttgaagctgaggcaaaagggtcaaactactaggaattgaaccagtcaaaccattatcattcaagtacaaattcttcaaagatgtaagattagcaaaagcaggtgaaatcttccccaaaaacccctgctttttaaaattcacagtaataacattcccatcagaatcacaaataacaaaactccaatcagaacaagcatcattgtttttccatgaatttgctaacacagttggataacccaaatcctcagcaacctgaagcaaagccataacctgaggatcacaaggtccaggagtactcttacagaaactattagtaccatcaagctcaacattggtgacagacttaggaaacgaaggcattggaccctgcaacttattgttagccaaagtaatgttctttaagcttggaattgaagataagctattgggaacaatccctgttaacaaattatcacgaagttgaagatcaaataatgtgtccaaattcgaaaggtctggaattggaccagtgaacagattcttatgaagccaaacctgatacaaactagtcatattagccaacacttcaatggtaccagaaagccccatttgttgattattaagccatagatttcgaatcacagatccagcaaaactcggaggtaaaaccccagtgagattattgtaagaaagtctcacatcttgtaaatttgggaatgagccaaaaatatcaggaatagtaccaaacatattacaacttccggcatataaagtaaccaagctagaagatccgaccagctctgccggaaaactccacggagcaaggtttatgtttgtgctgatactcaaagtttgcaaatttgtcagtccttgaaaacacccagatggaattgaagtgaaattgttaccatcaaggtaaattgattgaagaagagaaagattcgccattgatgggaaagagcccttgaaatgattgccttgaagagacagagttgtgagttgagacagagtaccgagatcggaagggagagttccggtgagagacatatctcttaaattaatggcggtgacttttccggaactacactttatgccgtcccaggtggaacagtaatcggcggtggacgaccaacccttcggtgccggagatacgacggagagaagctttgacattacggcggattcgtcggcggcggcggcgagaatgaggcagagaaacaatggagatattcggaagaggaaatttagggtttccagaatccccatttttttggtagagagagaagagaagaagaaagaagaagaacttaaatgagtctttgtttggttgtctttttatttttttagggttttatgtttttttttttttttgttagtactacaaaatgtagaaggtgaactacgtggagaataaggtttgtttgaaaagaatttaataaataaataaataaaaagaagtttgttgaaatgaatttgacattcacatgttggtcacataatattattattattattattattattattattatttgtctaacaaattttggtatatattaaatcatactcttctggttgttaaaattttttattgaactactactacctatttaaattgttggatttaaggatttttatccaattcattcgctgattgttcatatactaaattatgctccttaaactttgatattatcaaatcatgttattcaaactttgatgtactacattattctctcttaattttgattcatattagacttttcttactaaaattgaacaaaagtctttaaattcaaca

SEQ ID NO: 296584 - DNA, 3640 bp, Cannabis indica
ttttcattttttttttcttttaggtacatacacaataaatttcaggattcattatttctttacaatagaaaataatacttttctcttttccgtaaagaaaagtcagcttttacacaaatcccaaaaataaaaaaataaaacaaaattactactactactacaactacagctacaatcttctagtcaacaatatgcatatgccgttttgggtgctttttcccatacagcagcaatagtgaggagcttatttattctcatttttaaattaattattgctttgttttcttcaaattcaacctaaacttaagccataaaatgatgatgagaatacacccaaatttagatctacaactttagccttaaagggtaatcaaattcaaaactttagtgccacaaacaagtatagtaactagtatcaacaatattggtttaactctttactacagtagctaattaaagagatctaaaaagggggtaaaatccagacattattatatacaaatacgtaacaattaaatgaacctatgatgactttaaagacttagtttaaacaaaaaagaagaaattgactgtactcaaagatcaatgtggatcctaataactctttttaaaatgatattttcatgaaagtctcctcctcataacccaaaaatcaatgccacttcattcagatatgtatcttttccaatcttatacgtattctctccaccttttttacgtctctctctagatctctctctctctctctctccctcactccctccctctctttttgtgtgtggcaaaaataaactgcaccagaaataagaaccagatcaaagtcagaataattaggtggttcgaccacatgcatgtatatacatatacttgactaataaccttcacaacatgcatttcaaaataagagatccataaaatgaatatatttccattgacaaactacatacactaattattaggtcaggtataaatttactactgtatatgtgttgtgtaaattatgttttaaaatgttccattactgtttcttcagagaccatataaataagtgtgaacgggagaatttcccgaagagatgcatgtgctaattttaaatacgagattattagaatcagatcaaacaatcatgaaagtattttatttcacagattataatttgtagccaaaattgaccctttgttaggtgaggactagtttagcttagctaattagggtagttctagtgtagtgtctctacatgtcttcaaaacctaactacctaaaagaggcttgtcaaaacaacgagagacttttctctagtcaaattaccacaaaacccctctatctacctaatacttgtctagataataagggtacaagaacaaaagaaaattttctctcttcaatatctgaaaaatacagttatataataatgtcatttaaatatcctaacaaagcttcacatcactatatgcgagtcatatgtaatttgttagtagggataatgacgaacaaaatttcgtcataaaattaataaattatataaataaaagcaaaaaacaaaacaaaagacaaaaggaaataaagtgtgcaagtaaacctaaagctactgctagagttcagatgggttcttattatagttgacaacggggaggacactctcttgaaaagacaataattctcataaccgacccctctgctctatgcaataaagagtaatattagctttctactgccaccaagtgacattaccccattaatgaaagaacaaggcaaattacatataaaagcatcataacactcataaatgcaaaggcagatatcaaacctcatgtgggcagagaaccaaatattattattattttatcttttaagttttaacaccacaaaagaataatggacaagtaagatgcccaaaaagttttttaacatgaaagaagaaactaaaaaccaagagcataatatgtaagtacacgaatagagcaactaattattgtagtaaagaagagaacatacctatattgaaaaaaaaatatttgaatgatgaagtgagatgaacaaaagagcgggaggtgaggtgatgatggcatatgctcaactagtcggaccattaatattattcctcctatcctcttcgtcatcaaacttgtgccacagctgagtttgcggacccaattgcagaaccggcgactcggggttattattaaacaaaagttgatcttcctcacgttgtagttgttgaagaggattttgaccatgttccgattgctgctgctgatcttgttgaacaagatcataaggatgttgatacccacttccaagaactaaaccaggccccactgctgtacttgtgttgctaccaatctcattgaactcagctgtctcatcatctggacccgtaccagggtcatgagcagtggtaaacctcgcgagattttgttgaacgggacgttgttgatactgactcagctgtcgttgttgctgttgttgttgttgctgctgcatcaaagccattttctgttccacagtaagcctcattaacatatcttgttggtgttcccttgccagttgatgagcgtcaaagaaatgaggcgatggagtctgcctctgagcctgaacctgcgcttgaacctgttgctgaatctgttggtgggcatcaacatgttgagcttgaacctgagaaggttcacggatgaccaattgatgacttgtactcccaccaggagcacccataatagagctatacggattattgtaaaccgaagaagaagaagaggggttgccttgctgcggcatatatgggtttgggtaaaagggaaccgcattttggggacccaaataagcagcaagctcttgtttagcggtgattagatcaatgtggacttgtttgagtctttgttgaagaactgagattagacccacacagccataaaccgggtctctaagacgcgcatcggcttcgtaggcgagagagttgactgcgtcttcacggctgtcggcgctgagttcttggagtagtttcgaaacattactagcaccaaatactttgtgaacattcacgaatttctggggttggtccggtgggaaatacggtgcgaagacgcattcttgagtacattttctcctttgaatcttgcacgccgcgcatggagaattcgattgcatttttatttatttattttggaaactcagaaactgcttaaggaaacaaaaacacacaaaatcaaaccctaaatatttttattttctacaggaaagacaaagagtactttatttccatggaagagagataaacctagagagagagaaataaaatagggggttttagagagagaaagagatgaaacgccattggaaaaaggaataataatcacagcttgctcagggaagaagaagaagaagatgaagaagattcaattcgattaagaatattttatttattaatataaaaaacatttttcgatttttttatatatagagatttgcattaaaagcttctcataatcacgctaatctaatatttggtattaaaagaaaacccgacaagatgagtcaatatgatacttataatcaaacagtaacttatatcgaaagcaatatattaaattttatattatataataatgataacaaaaaattttttatattaaaatacaatgaa

SEQ ID NO: 296585 - DNA, 4010 bp, Cannabis indica
tcacctaacttgccaaaaaaggactttacacataaattagcaatgctcttaataaaaagtgggacaagcatcatggacaattcgtttccttattcacaacggcttcttttatcaactttgaaacgtttgtccttttttaattattttgctttaacatcaagtttttaagaaagtaataaatatagttttggtagttaaaacatcaaaacatcttcttcataattagtgtacctttttctcaattcatttaataaataaaccttcaccttataatgatgatgatgaaataatagccactttgtatatctatgtacacatatcttctcaaacatctttcatttcaatagccaacattcttttcttctttaatttttttttcttgtaatttacaatgagaaaataccatcttctttcactaatctcaagctattgcctatggattcttgcctttgcatttagtttagtgttattaggagcaatttcaaggtcaacacaaaacatattttccgaaaaagtcaacgattttcaagttccaagaagaaatactaatagaataatcccatcaaaagagaaaggaaatcctccaatccttgcttattggatttatggtactaatggagacaatgagagaataattcggcttttaaaggcgatatatcatccaagaaatcgttacctacttcaacttgattcgggtgcttcagatcaggaaagagagagtttagcgctttttgttcaatcagagaaagtgtttcaagcttttgagaatgttgatgttgttggaaagagttatgcaataaacgagattggatcgtcggttgttgcagcaacgctacacgctgcagcgttgcttctcaagattaattcggattgggattggtttatcacattaagtgttgctgattatccactaatgactcaagatggtaattcaaatttcttctctccctttatgttttttgagttaataactattaagaattgaaaattttctaaacttttagcccccaaaacattgcattataacatgttaaatgctttgcattattttgtaatttctgtcttgtgctttttgtttgtgtttggttttctcaagttgcctttatggtattttttccccataagcaagggttcataataatttcagctcactctaagataaatgacctctgttttttaaaaaaatgtgaacatttagacacattaattagattttattacattttagcttttttacatgttaaaattacacttatctgcatatacaattgtgtatagggtagctaatcaaaagttcattatgttaatgaatccaaccaatttctatgttcaaaacttaaaagtatatgaaagtatttctaccaagcttttggtgggcattttcaggtccaaaatccaaacttttagatgccactttcctatttagagcccataacaaaaaaaaaaaaaaggttaatctttttagtattttattgaatctcaaacattttgcagatcttctccatgctctcactttcttgccaagaaatctcaattttgttcgatacaatgcaagtcgatggaaagagtaagaaatttatcaaactattttattttttgtttagaattatcattacatttacacacaatgccttttacttttttgtattagatcataacaattttatgtgacactctaaattattgtgttgtatttggtgtaggagacaaactgccaatcgaattgttatagatccaagtttgtataacaaaaaaagcagtccaattatgtattctgtagaaactagacatacccctgaagcttttactgtatttggaggttagtaatattaatttttttacttttacttcatgtatatatggttatgttatttgtgaagaacttaactagaataatcatagtatttttaaaaaaagtaaatattctcgaatgatgagagattatgataaatcaaattcaaaaagtcaaattccattagtaactaaagacttgatctataagaaggtaaaaagaaagtgtttttgaaagtatcataatttatatattgttttgaaaaatatcattttttttatttatacccaaaaaaacaaatcatattgcatttgatgttccatatgtttctttatttttgacttttaatttattagaccctatttgtttggtaacatttacaagagagtcatatatagaaaaatttacacttagtatgatttttgaaaatttaatagctttttatgctttttgtagaaatatatgtagtagataatttaaaacatccccattatcatataaatattatttatgttagcttaatgaggtcactaatatattcattcattttctctttgtttagcatataatcttattattatttttattttttggtggtccatcaaatcaaataggttctccttgggtgattttaacaagagaatttatggagtattgtatccaaggatgggacaatttaccaagaagattactaatgtacataagcaatgtgatataccctcttgagtcctacttccacacacttctatgcaactcaaatttattcaaaaataccacaatactcaacgatgacctaagttacacactttgggattcaacatttgagatctcccaactcctcaccatctcacattttgaccaactcatgtctagcaccggaacatcagcttttgcaagaccgtttgaagcaaatgatccagtgctagacaagatcgatgtcaccattctcaaccgaactcgaaagggttttgtcactggagaatggtgcagttctgttagtgatcatgaaaacgaaaaagagagtaagaagaagttatcgtcatcattgttagatgatgagttgagttgtcaaagttggggaagcattgacattgtgaagcctagttctattggagttaatttggaagtgtttttgactaaacttgctcaaattaacacattatttggatcttctatttgttccaaagacaataagtaatgatgatttatcaatctagaaaagtagtaaaaaaaacacaagtttttgatatagctagatatcattggccatttgcatctttttttgcttgttgtaaagaaaaaaaaagaagcaaaagtgtagattaattttatgatagcaaacatatgttatcaaataaaattttagtagtgacggatttttttttttggggggggggggagataatgagtagaataggccaattgaaaatataatcttattattattattaatttacaagttattttttatctatttttaggattttctataaagacataaaaaattaataaaaataacataaaaaaattataaaaaatagtaacaaaataataaaagtaaaacataaaaatacattaaaataacgtattttatataaataaaatctttaaaacggttaaaaaaaatctgtacaactatattttcttaattttttttttttttgtaaataataaccaaaaacaaataaataaataagaatatttgattgtgggcttttggaaaaaggtgggcttttgggctgggccggcagtcctccttatgcccttccctctttgcaataatgccaaataattttattcgattgtgcaactatacattactactattagttttttataaagcttaaatgcacttcaagtttccccaatttagttttttattttttttttaagaaaataataacagattgaatacttttagttaattttgtttaacaaaattataagtataatttttttatcaataaatttcttatattattaaccataataacacattaattactctaaggtattcatccaactttctcttttgagggtttactatatttgtttattatgttcttaattgttttttctttttgttggatttacttaaattgattaatattaataaaataaaattaaatatagttgagatggaatatgtcatgtgtaagtgtgttataatatagtgcaatatacaagtggccctatcatatcaatatctttatatatt

SEQ ID NO: 296586 - DNA, 2439 bp, Cannabis indica
gggggaacagaagctactcagctctcaaattagacatgagtaaggcatttgatagggtggagtggctctatgttgcggaggttatgcgaaagatgggcttccataatacatgggtctctctaatcatgagttgcttacaatctactagtttctcattcatgcttaatggataagaagttggtcatgttcagccttctcgggggctacgccaaggtgaccctttgtcaccttatctgtttttgatttgttctgagggcttatcacgattgctacaaagtgaagaatcaaatcataatctcaaaggattgcggttgacacgtcatgctccatcaatctctcatttgcttttcgcagatgacagtcttcttttttgtgaagctacaaacagttcggcaagggccattcacaaggttttagatatttatcacaaggcttcaggccaacttttgaacacagctaagtcagttatgtctttctctcccaacgctacacaagttgtaaaagatttcttccatcagacattaggaatgccaattagtggatgtcatgaacgttatcttggactccctgctttctcagagcgagaaagaaagaaatgtttagtgatatcaaggaacgtatttggcaaaaattacatgcgtggaatgaaaaacttttctcagttgggggtaaggaagtgctcctcaaagctgttgtccagtccatacccacatatgcaatgagttgttttcggttaccaacaactttttgcaatcaattggaatctatgatggcaaatttttggtggggttcaaataaagatggttcaaagattcattggaaaagttggaaattgctttgtaaatcgaaattggaaggaggcatgggttttcgttcatttgttcactttaatcaagccctcctcgccaaacaagcttggcgaatttttgaaatgccagattctctacttagccgaatcctcaagcatagatatttctccaacaacacttttctggaggctcgccttggacactctccctcactcacttggcaggctattcattggggacgtgaacttttagtggagggtcttcgttttaaggttggtaatggctttaaagtgcttgcaggggttgataaatggatccctagtcatttcaatttcaaactagtaagctactcgggacctaccaatgttctggtatcacattttattactgatcagcgagaatggaatgtaccactcctccatgcatattttcaaccaattgatgtggacaagattgtaacaattccccttagtttttttcctacccatgacagatatatatggcatcatactacaacaggtatatactctgtcaattcaggcttccatttggctgaaaccttagctgaaagtcgaaactcaagtggttcaaatgcacataaagattggtggaaaacattttggggtctaaatttaccatcaaaggtgaaaatttttgcttggagagtattttaaaatgctctacctgtggctgctgcactgtgtaaaaggaaagtcattacttcagccacttgttccttatgtcatactgctggggagtcgatcggtcacgccatgttcaattgcacaaaagctcgagcagtttggaaagaaacacagttcattattgactttgaaaatgctcagaatatgcacggtggtgactatttaattcatttatcttttgtacactccaaaccaaactttgagttgattgtttgtacaatgtgggcaatctggcatgagcgaaataaagtgattcatggaggcgttccaagaaccagcctcaccattgcaacgtttgctcactcacactaggaaaaatttaatcggcacaaatccaaaaaccagcaacaaacttccagtgttagtgttccatctgctgctgttgcagatcaacaatgttccaggcgtgtcaactcggctaggattgatccacaacatctcaggtctcctcaatggacaccaccaaccaatcaaggacttaaattaaatgtggatgctgctgtcaatgcagatttgaaaattctggggtgtggtgcaattgtcagggatcatcttggtaatgttatagctgctatctccaaaccagtccaaggatgttttagatctgatgagatggaagctaaatcactcttccatagtcttaattgggtgctgcaactacaacttccaattacgcatattgagactgatgcgttgcgtgtttcttcggccctcaattctgcatcaaggaatctctctagctttaatgatttaattactgatattagttatcttttatcctttttctcaggagtaactatctctcatgttaaaagagatgctaaccatgctgcacatggtttagctaagtatgctctcgaggtggatggagatgtctgttggatgggtgaaatcccaaatcctattttctctgttattgtaaacga

SEQ ID NO: 296587 - DNA, 6231 bp, Cannabis indica
tatatatatatatatatgcaaaaacaactataataaattagtactaccatccccgtaaccttataattggcatccttcgtaggaaaggactccaaacacacatttaaacaactttgtgagaaatggagacattttaatgatgcatatcactaaatggaattgactgggacttaacaaaatggtaatgaaagataaactttgtttttgtttgtctttctctttctcttccccttacattttctgcagtagagaatacacaaatcagcaacaatgcattttaactagtggcctgccacctctgtgactttgaccagaatatacatttgctggctgggattttaatcaatatttacacgcataggaacagcatatatccactcagatgtgacgctagcccttttgagtagctcacaattacagaaactttccctagttccgatcggaatggtatagttgagtcttcctggaaaccggactagtgagtttatctagaaaacttagcattcatttttctctctattttttctttcttgatgtttttaatcctttttttgttatagatgtaatacaagagtaagtaacagggacaataccaactgaacagtgggaggagagcctgaacctgcatcagctgcaacaacaatgaattagtgtataggatcaagtagggtgaaattggcaaataacctctataaaggcctgaaaataccatgtttctaaggctcaaaaaagttaattacatctattatttatggataaaaacagcagattgcagagacacagagaagtggaacgggtcttatagacatacaattgcataaattaaacaaataccatcaattgtacgtcaaatcataatttagaccacattagaccattagatcattagatacttacatgtaggaggaattggtgcaatcaccggccttgagtcaaaatgctcattatctggtttgctctttgatggaggctgagtatgagcaaaaattacacttggcaaaggactggaaacaggtacggaattgggtgtgtgttttggaggggctacttgcttatgtggtgaggccgatggatgatgtagagatacatttggttttgccggtgcaactgcaggagccaagtgaaggcgctttctctcttcccctttagatctgtatctaaatctgcaaccaggtggctttgcttcatagtttttctcatgagaactttctgccggggtaggtgcaccatcttcaggtgcaggcacacctttctgggttgcaggtgaacctttctggctggcaggtacaggtgaaatagcaggagcaagatgtgcactgtgatggtgatgatgatggtggtggtggcggtggtggtggtggtggtgggcatgagaaaaaggagcgggagacggtgaagaagcagaggcactgctatcaccaccatgaagatattgttgcatgatagaagaaagacgaacttgcttgacctttccaaatacagtattgtttagaccaaggttttttgagtgagaacctgtgatggtttgagccagttgcttcatcctctgatttgtattgccaacagtcagtaaaacagacgactggacaacagtaggtgcagatatggttgaaccttttgagtttgataagttaacatacaagttctgcacaacagataaaaaaatcactcaggatctgccactttcattcaggacaactagatacttagacttagcaaagtctgaatcagaatcaaacggccacaaaggtgcacagacatatatgtatcaactgtagcagggaaagacagggaagattgcctaacctcataaggtgcaagatgtagccccaacttcagttggcttgtcaaatccttaaaatttgcttgtatttgatggatagagaagtttaaagtaaaattaaaatagaattgcactttctgcagaagaaaagcattctgttggggaataattgtaattccacctggaaattttaggacgtcgaaagacttgggttccccaaacagagaaggggttaggtggaataatggcaggcgtgtaaaaaaaatctcaaaagaccccctgatcaaactttcagcagcttcagacaattttgaatattttgcttcagggtcgacagcgaatataactgttgtttcatttgatcctttgaagggttctagagacaagacaaccacctgattcaaatcatgaactaaatttattatttcaaaaataaatcctggcagtaaaaagtaaataaaaaagttactgtagataccttggttgaggcaacactgcctaattcatcaaaaacatcgtcctcaagctgcaagatgttatcttcaagcaaagaaactggctttaaaaggttgaaagttgctactatcccgtgatctggataaacagactttgttagtaacatgtgttaaatctacataataaagaaagacaaaactttttataagatgagagatgtaaatacaaaaacatcatatgttcattaagtttttcccttggaaaaatccttgcttatgcaatacacaagcgtaaatacaaagatcgtgtttactagaacaggtcgaaataatttacatgattaagatgagagatgtaatcaatgtaagctatgtctagtctctttcaaactctctttacacctaatgtacattcatatctttacatctatgtctgatctcttttcaactctctttacacctatagaccgataggtcttataacaagtcagtacaatataattgctcaggtcctagctatcaagctaaagggtgtgctacggaagaccattccggaaactcaatcggcctttgtagaaggacaacaaatattcgattcggtgctaattgctaatgagactgtagaagattatagtagcaaaggtaagagtggaatggtctttaaaattgactttgagaaagcatacaatcaggttgagtgggatttctaggatttggttttgtgtaacaaaagttttggagaaagttggaagaaatggattagaggatgtatctcatatacatcattctcgacaatcattaatggaagacctaggggaaagtttaaacaatcctgaggccttagacaaagtgatccactctcacctttcctcttcactttggtggcagatgttcttgggagaatgatggaaaaagtcgtaagcccaggcaattttgctctggatttatggtaggaaaagaaaaggtccatgttagtcatcttcaattcgcaaatgatactctttgtaaataatgataattcattacagaagttggttcagatggtggaagctttttgcgctagttccggattgaaagttaatttgagtaaaagccatttgttggggtcatacatgaatgagagggctgtgtcaaattgtgcctttgatcggttgtgaagtaagaagtagcccaatgaagtatttaggaatgcctttagggggctcgcctagaaagtagagtttttggaaaccaatcctgaataaatgtgcaaagaggcttgatgggtagaataccaactccaagaatgagagtattcatcagagaatactctttgaggaatcttcaaggtcatactcttagacattagatttgtaagatgtttagattggggaatcgagtgcattcccgaatttagttatgatttctaaggctaagaatgagagtattttggagttagtagctgatgagtgggtgaagggaggtagtgtcgcgagctggaatctcaagttcacaaggaatttaatggaaagggacattcctagtcttacatttttgatgtagcagttggaacatttaaactactacatatcgtgggcgattgtagaatttggagtacaaatccaataggaattttctcttgtaaatcagcgttctactggtttacatcaattctgatccatagacgcctggtttggacaaagattttatggtttaattggcttgtggcattaggcaaagtgaatgtctatgataaattacaaaataggagtttgtaaaagaagtggggaagatgtggaacatctatttttggaatgtttttttaaccgtagattatggattaatggtttgggtcttgcctagcttaatcccacaaatgttagttaatttgcagcaaacaaagaacaaattgtggaggactgcaattttggcaacgatctaggctgtttggctggaaagaaattctagaattcttgaaggtattaaaagttctacggtggctctttgtgataaaattaagttttggacaacaacttgaattttaaaaccaaacactttgagggttgtcatttttagatctgagtagggaatggaaaacattgttgtaatagcaattaattgttttactctgttttcgctactataggttttgtgtaattatagctaaaaaaatgtgtaaccacggtatccctcacccacaagtgagggttttcaagtgttgccaagacagcattggtgttcttgttgaacaaccacagagaaaaccttggacagtggcgaaagacagtggcgaaagaggatcaaagagaataatatgaactcgaatgccccagtaagattcattgaaaccaatcaagaactgaagaatctagtctctggtgtagtaatcttgaactttttgcatagcataagtgcagccacaagtgcaaggagagtttgttgatacttgttgagttcatcccagagggcttgtaactgggtgaaataagtagtgaccgagttatcaccttgtttaacattgttaacagaggtcttaagttgtagaatacgagagtcgttaatctaatcgaagcgatcatgaaaaattgtccacatttcatgggcagtagttttgaacatggtgctagcaccaatttcgcgagacacgaattgaagaatccatgacaacacagtgttgttgcatcgatcccaagctaatagagagtgatcattcaacgatggacgggtaaagtgtcgtctatgaatggggttttatttttggttgcgatattaatcgaagtcgctcgcctccaagactgaaagttttcttgaccagtcaagagaaacgaagaaatgatgtttggttgatctccagttcccaagtgataacgatcatcttgagaaggtcgatcgaaaaaggcacgagataggccttgatttgcaagaaaagcagagttatcattaaaagccataggccttgatgtccaagaaaaggattgttaccggttatgaaaggagatgagttctggacaggtggaaccgctcgcttccaagactaaaagttttcttaacaatcaaaagaaacgaagaaatgatgttggttgatctccagttcccaagtgataatgattaccttgagaaggtcgattgaaaaatgcacaagataggccttgatttgcaagaaaagcagagttatcattaaaagtcatatggccttgatgtccaagaaaaggattgttaccactgatgaacggggatgagttctggacgagtggaaatgtgaacgatggggtcggatccgtggtgctgccagaaagaatggaagtcagtgagggaaccgtctgagccaaggtcggagttgaggaagaaaaaggcagaagtatggttgtgtgagtttgtgatgccatggataccaacgtcggagcagagcaagagacgaacggtgctgcggaatgttgtccaatcagtccagaattggggatatcggcaacataatcgaagtcgagcacaccagtagtggaaggatcaaacatggaaggagtggcaccgatcgtgttcgagagagagttctcaagcaacggagaactgaacggagcaacgtcggaggtggtagcatcaatgtaagaagtatcttgaccatggacgacagtcggagttagcagcagaagagatggagattcactgatgtaggctacggcaatggtggagtttctggttctaggagccatgggagaagagactctggctttagggttagagtttgaaggaggcgggtagggtttttggtggtgggtaggggtgggcatcatctaatccaatctaatagaatcgaactgatctgatttaatccaatccaattacaaaaagttggatatccaattacaattggattggatgctaaaagttggattctgattggattggatcgactattggatgtcaatctcaaaatcgaattaaaaactgatccaacccaattacatttatagaagttaaaaaattatttataaaataaaaaatattaaaaatataata

SEQ ID NO: 296588 - DNA, 2163 bp, Cannabis indica
aatgacatgtccaaagatgttggtaatatacatctattagcaatggtctcagagataaacctagtcaaatttaatcaatgagaagggttgattgaaattgagtctacttaacatatatgcccgaaaagagtatgctcaaatcttttgaacaagtaaataatgaaaaaaaaaatattcatgaaaaattctgccacgtttgaaatagtggctcaaggtaaagtgatcctaaaaatgacttccaaaagggagctgactctcgacaatgtgctgtatgtactggagatttataagaactttgtaactagttcactgttgagtaaacatgaattttttttagtatatgagtcggacaaggttgtgttgtccaaaaatataatatatgttggaagaaattatataactgatgggttgtttaagttcaatgtaatgactttttaaaccaattatcaataaagttaataacgcctttgtttatttagttgggtttttcaatgtattacattgtagactaagatatgttaattgtgatactgtacatacattaattaacttaaatcacatacttaaatttcacattaatataaaatctatgttgaagcaaaactctcccttcaaaactattaacagtaataataaacctctagatttaatacatagtgatacatgtaatttaaaatttgttcaaacaatgggagacaataaatattttattacttttatcgataatagtataaaatagtgttatatgcattttttaaaaagcaaaaacgagactatagataaacttatactctataaaagtaaagttgacaatcaactcaacaaaaagatcaagagattaataagtgactgaggtagtgagtatgaatcactgtttggtgattttgtgctatgaaactacgacaccttatttgcctcaacaaaatagagttgctgaccgaaaaatttgcacattaaaaaaatgatgaatgcgattttaatcagttctaaattagctcagtgtaataaaaattgtcatgtcagctaatcatcttttaaacaaggtaccaaaaaacaaagaggataagaccccttatgagtcatagaaaaagaacaaagccttccttcaaatacgtgtcttatcaaagtggttgtaaacttacctaaaatggtaaacataaatctaaaaattattaattgcattttcattacgtatgcacataataatactgcttattagttttttgtacatgattcgcaaatctctgatattgatgatttaggaatgcctctttctttaaagatgtatttccatgtagattcaaagataattcatgtttattaaaatgaacacatgacactattgatgaaaatagttaggatcaaactagacgttaaaaaacaattataaaagaaatcttttttgtttagattttttgacctatttactagaaagtgaatctcaaagttttgaagaattcatatactttcctgaaggttctttgtaaaagaagccattaatagtaaaattgagtccatactacaaaatcatgcttgggagttggtagatcttcttccgggatgtaagcctttagggtctacgtgggtttttaagaagagaatgaaagcatataaataaattgacaagaatatcacgagacttataattaaagttataaacaacaagaattgatacatattctcctatgacgagaataaattttattagaatgatattttttattacagcaatacacattctcgatgtatatctaatgaatgtgaaaacaacttttccaaagggaatttaaatgagaaaatttatatgaaacaacatgagaatttttctacccgacgacaaggaaaaatttgtaaattggtgaagtctttatatggactaaaacaagcaccaaaataatggcataaaaaatttgaccatatgataatatgacgactatgttcatttaaagaaagaaatcatgactatcattttatgtctttatgttgatgacatgttcattatagaaagcaagcaacgataagatggtcaaatctatataaagtatgttgaaatctaaatttgaaatgaaaaatatgaatttagcagatgttattttggctattcaaatctcaagaataattgatggactcattctaagtcggtcacattatgtgaaaaaaaaa

SEQ ID NO: 296589 - DNA, 9929 bp, Cannabis indica
ttttttttttataaatttatttatgttttattgagctttatttaagttaaaaactttagtgggcctttttaaacataacagaatgaaattgggcttaaaaaaccctaatctttagttttaaaactgaggcgtgcgcctcactgaaatttatgcctaaaccattttcctatcgcctcaagcagttgaggcgtacgcctctcccacgactaccatggcagacgcctcaaagcgaaaagtttctgcctcaaactgaggcgcgcaataagaacgcaattttaaaaattggttttgggtagctgtgtgtattttcagttggaatgaaagagtaatagagtaggtagagtggggtattggggaattggtgtggtttagtggggagactagactctctgagacctggaggttttctttaccaattgtaatctcttcaaatagaattaagacacttttgttggagatacttgaactctagtagagattttcttttttaattcttccctaaaattggtactgtttgattgtctttgagagataagttgttgaaacttatcatattcctttcgaaattgaggaatcaaggaagatgaagcggacaacactaacctacccttatatagcagcttgccatgcttaaaggagaaacacggaactcgatcaccatgctctagctcagcgagtatgctgccaaaaaggtgtcttgattgatttcttgcgacacgatgttccaatctagccatgaagtagtggtgagcacagtacactctactgtagccattcgagatagagcatcagcaactcaattactcgtgctaggacgatattggatctcaaagtcgaatcctagcaatttaatcacccatttctgtgtattcggagttagatttgttgctcaaacttctggccaagtatggttgccattttagcactgccaacacgatcgccatgagctccttctcataaatagatttaaaatgaggacggggtttcaaaacttggttgaagtaggcaaggggttgcccttcttacattaagacatcctttatgccatagccgaaagcgtcaatttccaccccaaaagtcctagaaaaatgagggggggccaaaattggaactgtcgtcatagcaagctgcaatttctgaaaggcagtggtggcttcctatgaccgataaaactgatctttttttaattgattgtaagagggcgagctatactaccctaaccagccacaaacttgcaatactctgtgagtcccaagaagccttggaagtctcaaatagttgtagccttgtaggtagcgaccaatctagcatattttatgtatctttgttgggtccactgctaccccatctccagaaattatatgacccaaatactcgatcttggtatgctcaaaacaacatttcttccaattggcatagaattaatgttggtagagtagttggagcactttggataggtgttttgcatgagattcgacatttaggctatacactaagatgtcatcaaagagaaccagcacaatgacgtagaaagggcttgaaaatctcgttcatggtcgactgaaaagtagcaggggcattagtcattccaaaaagcattaccaaaaactcgtagtggcctttatgagttcgaatggttgttttgtgaacatcagctgccttcacacgtatttggtggtatctggacattaaatcgagcttggaaaacactttggcgctgctcaactcatccaagagttcatttattatcggaatcagaaacttgtcgagaatgataatgtaggaaatcaagctacctgtaaattagttgtaaatttacatttaatgcgtttttcatttactatagtattactaggtgttcacattgtatcatgtataccctttgtttgtactaagatgtaagaaaataaaaaatggtttccctcatttgcttcatggtgtcagagcatttgaagcttctcaaagcatattatctttttcatccctttcttaattttggggttcttaaagttagagtttggaggctctatcgtagaaaactaattaaaaggagttttctattctgacctttgacccagggagtttgtcttgcctccgatcggcaaaatccaaaaatttggtgtccatctgagctgcgagtgggccccacgcactaccttcatctgtccgaccctctccacgcgttgacgcgtgtatgtgcgtggcagtctctagcgacatttttttgcatcatctctcttaggtttctttatctctggtactcttagtgttcatcattcgccaagaaggttggctctaatattaatttgataagattcatgctacctgctaatcaatacttcaaccaaaccagcaaaataaaagcaataaagcagtaactcaaggaacagtagcaaattaagccattacaggcttacagccacggctttctttgtattactcaaaaaggaaaccttacagaacaaggaaaatccctctcggactcaaagatgtagagagagaagttctcaattcttacataccccacccaaaagcacaaacagccaatatagccctttcttactacaccacaatgaaattaccaaaaagcccctgacaaatcatattacccaacccttacccttggctctcctagagtatgtgaatcggataggtctaacataatctgttctccttctctatttattcccattcaacaaactagaatattccaaacaaactcttgaatcatcgctatcctcattctttaggctaacaaattaccttactagttgtccgttaataatactatcagctgtccttttttaacaaattccttaatccgtttcgtaacatgtatcactttacccctatcctatgcacaataaagctgaacacggggagtcttggtgggggttaaatgaacaaaagggaaaggactggaaacctgcagttcatggtttcagggatgctttgaagatcttttggaacatcatcaacattggcttggaaagatagcataagtagcagaattgtcctcgtacagggtagtattgtggtcaataatgagaggaaagaaaacatatgcttcacttgaattgatgtttctggctcaactcaaagctggtaagataaattactgggaagatactgtttttgctgttgaaggagcccctctggattcatggaataaacattttgatattgtctgagcacaacttgggttggttgctggatcccaatcttagggtgcaaaatgaacgtttaatacgatatgttcacgggatagaattgacatgcatatcagtgattgaattaatcatccatgaggacattgatttgttttttgtttgtgtgtttttttttctttgataaagagcacattgatttgttgtttaagtttctttccattagaaatatttgcatggtgataagagttgaaatgtttgttggtggaatattttattaactttttgtaaatagattttctttgtgcttgtcaatgcttatatggggcatttattgtaattaattctttgtagatgggcttttggaaatgtcctcttttataactactgagcactctatacatattttattggtttttttcctattgtagttgttagaaggtgttgatgatggtaatgattcaaagaactgtgaggagaggagtgaaaaggaaagtaatatggagactgctgaaaaaagtgtagcaggagatgagcaatgcgaatcaactgaaggtcatgagtcaaacattgacgccagtgaatctttttctaaagatgcagataaaatgaatgattcacctgttttaggccttttgactggaaagaaaacaaccaaacttgaaaataaggagtctgaacaagtcaatgaaaaaaaggctctgagtaaagcaacaataaaaatggcccttaggaaaagagctcggtatctgatagataattcagagtatgtttcttcattatttgaattgtttagcagtttattttcttgtttcattattttgttttttaatgtcacaccggattcttttgcgttttgtttcctattctcgggtgatatatggtggtaactgttggatctaatctattatgttacttttcatttggcttgcaaaaatagaaatccgcccgcatcactttcttgttatttcctttttcaggcaagttacacttgccggacttcgccggattttggaggaagatcttgaacttgaaaagatggctcttgattcctataaggagtttataaaggaccaagttgatgaggtgagtagaatttcttatgtttcattattgaattccaatcagtatgtttgataaaacgtcttgtttattcttaatcagatactaatttcttgcgaagtgtctcaaccagttaccaatgcaaagaaaaatgttgttaaggactctaaaagaaaagtagctagaaaaactagaaatgaagagagttctgattctccgaatagtggaagtgatggggatgaagatctagtcaaacctaaaaagaaatcaattactagaaaaaagaactctaatgaatccaaaaaaaggaaaaaaccaacaaaggatacaaatgcctctggcaagaagaggatcaaggctaaagaaacaatgacagaggacaatattggtgcagaagacaatgggatagtttctgaagacgatcattctcaatcatctgctgacaaatctacaaaggtgaaaatatttttcattgcagctcatataagttgattaaatgatgtagttctgcttatagctcgttcattaaaaatgcagaagaaagtggtgtcagcttctgcacctgcatatggaaagcgtgtggaaagtctaaaatccgttatcaaagcatgtgggatgaggttttatatctttgacttagagttcattagctttcatttttgttaatgattgcctttaaaattaatttatcatttttacagtgttcctcccatagtttacaagaaagccaagcaggtgtctgaaaacaaacgtgaatcgtatctagaaaaggagttagaggagatgctgtctaaagaaggattgtctgccaattcctctgaaaaaggtgagacttcaaactctttgtatgagagagacccactattgcatattggttctgtacaattttctcatctatatgctaatatgctctacatgctttataaagtgatagatttgggactttgggcagtatatctctttcgacgtcttagtgcactctctaacacatacactgattgtgttgttgaaactttaacggtgaaacaaagtttctaggtcctggaatgccagtcttttaggtaggggatggcagattagagtagaaatgaaagaggtgatgcacattaatgtagtaaaagtgtaaaagaaattaaattgaggatttgacgagtattaaaataaaaacatgacagtatgttagtgttgaaaggaaatgtatatttctcttctttggaattggaggagcaaaaagagctatatttagaactgaagcaaaggttacaaaagatgattaaacaaagaatcatacattgcatgtgggagtgcatgcacacaaagctcaatccgtgataggcaagccaaggtgaaaggagaaacccactaaggaatctataaatataaatgatatttttaaaatatcctccaaataattgtttaatcaatttcttccaactaatgccagtagctacatttataaaacctttgccatcttgttagactcaagaactacctgcactataggtggttgtgtgattgtgtcggaagtaagcgctagaagttgtagaatgctgcagtcttggttactgaagggtattgtgttaagagagaaacaatagaaattttcaagatatggaagctgatatatcttccatgtggaagatatactgggtacagggtagcactaaggatatttaacagtgttgatttagaagttttccatttttggtgttagtaaacgattaacataatttctcttattttttaatttcttttctagcttttgtcatagcatatttgtttttttttttccaatgtttaaaataacgcaaatatgccttgagctgtttttttttttgtgaggcaaggcgtaagcctcaaaaattaattgaaataatatttttagaacacctagggatgagcaaggcagcaagctgcttctttttaatttcttgctttgctttttgttgctatttggaaagaagaagaaaaagagcagctgtagtagaagagaaaggggggaagaagatagagttagggttttaaattttattttggctttttaagtgttttaagttaaaagcaagaaaacaaaagaaaaatagtgacttgggccttttttttagggctcaaagaggcccttttttgaggcgtatgcctcttctgcctcactcctcacagaaaaacgaagcgcctcaccatttgaggcgcatgccctggtgcagtttttgaacgcctcaagttgaggcgtgcctcaaaaatacctttttaaacattggttttttcaggaagataatatcatcttctaacaatacaccatgtcctttcttataaaaaacttgtttaattgtacttcctgtgtaaattatttctgaattttcttttcattgaaatttcagttcttttatagcatagtagattgaacttaaaatttcactcatggggtggggtgtatgattgatgatttttcaatttcttattgtcagaaatcaaggaagtaagaaagaaaaaggaaagagcaaaagaacttgagggcattgatatgagcaatattgtatctagtactcgcagaaggtcgacaaccagttttgtacctcctccaaggcccaaaataccagttgaaaatgatggtgacaactctgaagaagatgaagatgacaatgacgatgaggatgacgatgatggtgatagtgatgaggacatccagagtgaagagtctaatgagggtaagttttaatgttttatctgctattttatccttcaagttgcaatcaagagtaggtattatgacaagccttatattacctaggggttagccgtataatttttttcttcagcatcttatagaattggcattcaatgttgtgacataaaggttgaattgttttttttggctggaattttgtagagttttcagtcagttcagtcttaatgttacaagccttatatgatgttatgctccaagatgcagaatccatgttcttgtgtagtatttgatttcaatttaaagctaaaccaattttttaatattaatattggatcttttggaatcacctagccccctgcattttgtgttggtctctacgaataaggcaacatttacataattaaaagacatggaatcaatatatgatcgagtctttctttttatttcctgtcacttaaacatttcatactactaacattctactaaaatgaaattaccttctttcttgtataatattcatattactaaactcctcgaagctacattatctcttctagttaccatgtctaaccctgacaagatatttggtctttgtatgcagataatgatgggaacagtgattgaattttcatctattggaagattacttatataggagcctcagtgatagtcatactagtgtacaataagttttccctttagcaattttgtactatatatgtcatcaagagtctgcttttgggtttaggaatgaacaggtagtggcattccaactcaatcggtatactatctattggttagctatgtaggaaagcagtaaaaatatttagtagtatgggtgtgtttaagtataatatattattaaggcattcggtaattgctagccatgttttcacttactggtgcttcttttacttctgtaagctttatttgacattgaaaccaaacccattcgatttacagggtcttaagatttttaatgaatattttgtgtttaatacacatacatgtcacagctatttatactcaactggctaataaataattaaaattatgtatttgttgcggcaaggaatagattttacaatgatgaatttattttaaaatgcaaaagtttttaaccaaagttatagaatgtgggaaactaacttgaaaaggaaaacacaatgtagcaaacaaatgcttctctcaatttaggtttttttttttcctttgtgctacccgtttaattaggttagcttagcgtttgggttttatgagtaaaatgtctaattcattggaacacgggaaacctaatgggatactttaattcaagtagttttaatattgggaagttttttcatatacagacaaaaagagttaaaaattaacaaaatacggctacaagagattttaaacttatatacggtattttctattttaattacaaaaaatacggtgctcacattttattgtatacactcatcattccttccccttcgttattctctattttggaaaaaaaaaaaaatgctagtgatgccattattattggacaaatcttgataaaatgtcaaaacaaacatttttctaatcttacaatttaaattaataaaatatattttaaaaaataaaattttttgaaaatctgatatggttagcaaatttgaaattctaactaaattatatttaagctttattaatattttaatgtcaaaataagaccctttcaaattttattaataaaataagtaaatatctgatcttataattaaaattaataaaacaaacaaaaataatcaaatttcaaaaataaccgtaaaggctagtttgtggaaaaatgaaattttcaaatttaaagtccactaattaggggtgtacgtaggtcagtttacgttacattttatttaacccaatgtaaatatcgagttacaaaaatctaagtgcaacccgcccaattggtcagtttagtcgagttaacccgtctaaaccgagcactaatattttttttttccacattcaattgttatattttaggtattgtgacacaaaattctagcaaaatttgaattttgtttcattgaaaactgatttctaaaagttaaaaaatcacaataacaagatggcatagaatgcatactccctgggcgcgcaatagggctactgggcgaggaaacgaggctgtgtgcaaccttcttggccgaggaacctcagcgcatgcatgcttcgaacaagatctgtccgagaaacctctatcacgaggtttttctgaacctcggtcatgaccgaggtgcacttaaatccgcgcccgcacgtagtgcctcaggtttagatatttttattcaaaattcaaaaaaatcataactaattcaatgaaaatccaaattaagtttataaaagcttattcattaatttttcaattactttccagaaaaaataattcctgtacgaaactaaaattatttttcgtcgcaaaatttgtagttaacaaacattcatcaaatacgcacataaaccaacatgaacacatccaaatcatcacaatcattattttaaatccatatttcatgaaagtaaatcattaccaaggctctgaggccagttgttagggattattttaccaggatctagatttactaacatgtatgttatttagctccctaaatatgaattctctaaaataatagaattaaacatatataaagttaagaaaccttatattgattgcgacggaataatatgtctccttccgctcagatctctaacccttgttcctttctgtcgcagagtattatcaagatctgagtccgattctccttcaagtattggattcttcatagtcttacacactatgattgagtacttgacttgctatgggtggacatgtactctttcactataaagctaaaaaataatgaagaaagagagagagagggagattcgaattctatagaaggagactctcaaattttctagttctctaacagagttagaaaactaggataataggttggatgagaatgagagccatctta

SEQ ID NO: 296590 - DNA, 4564 bp, Cannabis indica
aaattaatgcttttaatttttacccattctttcaaaatctattatgttacctcttttttcaaccattctaccaattttactcctattacttcacaatagttttaattattctctaatcaaaattttgcatctccaaataacataatctattatgtttagattatttgaaattgtgtcttgggtacaatactcataaaatgatatatatttgaattaaagtattaaaaaaatgtatttgtcaacttctcccaatattagtactgtaaaaaatttggaaaaccgtaatatttatgcacaaattactcttttataaaataaaaaacagacgaggctctatcccttgtagaaaaacaaatataaatcacacaactttaatattgcaaattttgtagttaattcgttacaaattacacataataatattcccagctttgaatgaaatactcctatataatgagcaactaatttacatcaaacaattactcgtagttaggaattatttttaaaaagatatttaatttttttagaatatttcaatgtcttaattttttttttccaaactatctttaaaaaaaaaaggacacagcaaattatgttccgttgagaaatggatcaacggaacaaaaattggaaaaggaaaaatgaaactggatagtgtttctaaatacataaaaaagaaacaattacaataaacagaaaatgatagctttgacgacatatttacatgtgaatttatactaattttaactataatctgcttatcaaatggatggaacaaaatcctattctttctaagaacatgcatcttagatagaaaagaaagaaaaccatgctagaataggtcatagcttagtaccatcaaaatcccagcttcatcaacttttgccttgccacgatttaggggccgtcttcttgtgctgcaaatgggaaaaacaagagttatttttttattgtatagggaaaattatagcacatgaagaagaggcttactgcttaaaataaagccttggatcaagctctgtgctctctctacttggtcgggtgcgcctgatatttgaatgatcttttgggtcaactctggtctatcttctaacaaggttacattggctcctgataactgttcaatgaaagatacaggttagaagatatattactcaatctcaaatccataaatttgtaaagttgaaggtttatggtaaatactgacctcactgatcatggcaagcttgtttttcgattttgttatgagcttgggaactgcaggttccggtatgacaacttcaattgtactcctcgtaacaagaggtaccgagattctgatacaccacgcagattgcaaatgagatgttactaattaattatatgctatacaatgcccttatataatcaaattaaacgggaaatgtattcagtacctattcaaaccactaggagtgtcttcacgccgatcattctcgttctgctttgttgtttcaattccagtctcctgcagaaatgggtttgatttatcaaatacacaaatggtccgatgtggaaaaatgtgcaaccaagttgaaccgagctaaagcagttcataaggaattgtaaagatgttcagcataagaaactagctacaacacaatttcttaaaggagtaccttcactgctggtgctgctatcacagtttgaacattttgataactagtcgtagacggatcacttgcagtaagattatcgcgaactggagttctaccaccaggagaggagctctcgcatcccgcagcattaccaaaagagccagatacagaggcagaaggtggtgtcgaatccttttgaaagaactccctatataggtaacttcgaagtcttgatgtcatttcaacaagggcatttcgagctgcttttatctctcctactatctacatgaggtcattgtatgcagatatcaatgatacataataaaaagcactaaaattccctcaactccctcatttcacagaaataggggggaataggtagcatgtaagaagattaccatggcaccgtaataactgagtgactacagaacttaataatacaacaggaggcattgacaagaaattaatgggtgtaaatacaaacctgtatgagttcatcacttcctgatatacatgtaggaagttcatctctaggtaaaatttgtatattggcaccagttagccttcttatttctgacaaggatccatctcttccctctaaacaaccaatatcaccacagggaacaagcaatctagtagttacaatgttgtccttgtcaggaataagatcaagaatgcgagtttgaatatgcaacagagcttcctgagctggaaagagctcgtcatcagggccctatgtttgcatatgcataaatgaggttagaaatgaggaaagtgaaaactaacctttcttccattatcataatttcacaattacataactcatgaaaaaatttacctcctcagatgaaatgataataatctgttcatctgaaccagccaccgggtcagtaactttaacatccacaccaatttcattttgaagcagatctataatcccatcagactctccaaaaacactgtcaaccttgtcaattggacaaagtattcgaaacacaagatcctcattatagaagggctgttgcatattgtcagccatggggccagacccggattcatttgcaaaaccagatgggcggggaccataattgtttcctctgttattggaggcaggtaagcgagatccaaaaccaggcccctccataggtggccgacgacctgcattgttcatgtgtggaacaaaatcatcatcaggagaaaagaaacgttctggggaatgcatccgcccatggaaatgactacggtcacgatgctgactctccctcaaccgtgatgaaattattgctactgcattctttacagcattgacatcacctaaaatctgcaagaatgtcagaaatataatatgattaggcttttgttcaaaacaaaaagaaaaacatagctcttttcaaaactaacaaaagaacacaaacttaacatggtgattcacacaatgtcagttcatgtttgcagtccatgttattgaaagacaataagctgaccaacaaattagattttagtacatttatttttgacaagttaatagcaaaaactcgatcacaaactattaatataacatcaatgagaccttaagaaaatgcagttaccataaactacaaaacgaaacaaaaacaagccctggcacgcagttttctcttatgtaaatatcagcactttgttatccctttcttcaaatagcatatgcaataaatgtaatctccatatgcagactctgctgaaagaattgtactttaatgactctcaggtgagaaatggggtgagaaatggagctccaatctcctcctcctcctcctcatcatatattcaattatttaagaaagaaataacaccccaaatgatatattatccagtgaagattatatattataataattatctcatattttggtctcagctactaatataaacaatgtggatagataggatagtcatcatggtccatgttttcgagcactagtttagctcaaatcaaatgtaccatagttttaggcattagtacctaaaaaagttcatatgcaactcaaaaggctcaatctaccaaacatgcaacacaagattcattcagatccaattacaggtctaagatggttcaaaaaacctgaacaatctcctccgacattgaaacgcatcgaggcaagttactgtctctaggcaaaatcctaatctgagtcttagtctccatcctcatctgctcaattatcttccctccttttccaagcaaacaacccacatgcattctcgacacaaccagtctagtcgtcacccgattcccaccaccacctctaactccgccataatcctcctcctctccaccaccaaaaccaggaatatcagtctcaagaatcctttcatggatcaaaaacaaagcttcctgagcaggagaaaagttcggcattcgtccttcagggtctcgccgcctagtatcggaaatctcgatgattctctcttcatcaccaggcatcagctcgtgaacgttgatccacgccccggtatgttgtcgaatcgactttataatactaccagacttgccaattacaccaccggccttcatatcgtgacaaaggattcgataactagtggtcaccgtaagagattggtctgactgaggtggcttaggagtccttccaccacctccggcgttaccacggtgacgatgattattattattgttgttcccgtaatggtggttgtaccttggtctggttctaccaacagtctcagagtcatagtcttggtcattatagtagtacctcttagatctagacctctccattctcaacaaaaaaaatcaacggttacaaaatcaaggaaaaacctaaaaccctttcatctgagtgtgttcaatatcaagcaagcattgtttgtggtcatggaacagttcacggatcttggtagattggtcctctgtttttttttttcaaattgattttggttctttctttgat

SEQ ID NO: 296591 - DNA, 2157 bp, Cannabis indica
ttctaatttattaagttttcatatgtacaattcaaatttagattcaattcgcctttacttacaacataagcgttgaaaaatactcctcaaattcttggtcaattgttggtttcctactcgcttgttcagtctctgcattcaaaacaataacaaatataaacaaattgaatccaaaattacaataaccatttctcaatcagcagtgttctaagatctgttggggtcctatagatctttttaattaccttgatttacagtccatctcccagatgaaagcacatacacattggggtttaaaccttcagcagagagaatatcttcaagttccttatcagtacattgctcaaagctttcatctccatattctaagagctgctcttcaagattaagacatgcttgcattctctctttgtgttcggaagaataatgcccgaatacgagtttctcttcttcccaagtgacgcctttcgctgcctttaaactgttccaaagagacttgttgttttccaacatatgatcagtgccatgacttacagaagaagatgaaggcatatcagatgccttttcatattctgctgcttccattttattaactccattgtatgctgatgttgcacagtcataatcttcaccgaaactattgctgtctttcaccgattcgggaggttcagaggacttatcatcatccatgcctagtttctttgccttttccttggctaagaatatggagagctgtccatcagaagcaacctctcgatcccaacatttatgctttgatgtaggcaagcctaattgctctgcctgcaattttctcttcttgagagtgtttagagcactaatgacacggatgcttcaatagaaaattcaatacaaatttgttaaaatatcatgtgaacaaaaaaaaaaaagaagcccaaaatgaaagaaataagaaacatatgaaaatttataagaacattacacaaaatgaacacagcatagctgaaaagaacatttttacaaacatgtgtaatacttcacttccttcataagtgaaaaaattctttagagctcaaaccaaagcacacaagaaatcatcaaaaaaaaaatcaaagcacacaagatagtccataatattctttagtgtcaacaatgataattatcttaaagcgcgggatctgcaccactcgacattgtacgtacatttaataccaaaaaaacaacaattttagtaataacctttttcattaaaacgacccaatccgtttacatactatgagtacaagaacaaagaacaaaccgataataactaactaagcataaaggttagcaaataaataagaaaaaagcattgagacccagaaatctaaacctgtcgatctccgatgggcttcccttaattttctccatttgcaacaagaaaccaagaatttgagagccaaaaatttgatcggttgcagaggagaggagaatcaagaagactctcaaacacaccaaagttaaatgtctctagaaaatggactaaatcccaagaatatctctctctacacgtgtttctacagagcgtgtagctcaccttgaaaagttttgtgttatagatacttgtagttccacttgacaccttgtttggattgagtcgtggtctacacttatcttaagagcaagtagttgtgtttttagttctatcaatgccagtcccacccccacgtgaggtggtagtaattccaatctttttgctttgtggtccctaaagtcttggcataaattttgaagacctatatcttctaaatattacatgaaagctcaactctcagtggctaatttatcaataaagtccatccaagaactagaaaaggtttctcaaaaagattattctgagttgataattcattgaaaaaaagttgagaataagttcaaaaattcagactttattagtttggaccaatgacatttattggtttaataaaagaaacagaacacactacaaaaaatgtcacttttatcagcacaattcgctactgtgttggtaaaagtaacttttaccagcgcatttcgcaaactgagctggcaaagaggtcaaagttttaccagcatacatttgcagtgactaaaatctaacttttaccagcacatttacgtgctgggaaaagtcatctttgccagcgcttttcattttat

SEQ ID NO: 296592 - DNA, 2752 bp, Cannabis indica
cgcacgtagttttttgctagtaagaataaaaatgtgaatgaacataagaatatgagggctcgtttggaacgctttattaggtcgtattgtattatattgaattgtattttatgcaatatttttacgtaaaactatatatgttattaaattttatggacacctaaatgtataatattttagtataaattaaagtttaacatagtattatataaaaatataatatataatccaattcagtataataaaatacaatacaatacgacctaatacggcgttacaaacgagccgtgaataaaataaatagaataataaataaataaaatacataaaaaaaaaaaattaaattttttatcattggaatgatctttctttgcatttcaaaaataaaatagaataaaaattgtttcctgcattccatttcatttccttcaaccaaaagctactttcttcacagagtgaatggatgagtcgtcttctctgcaacttggaaccttcgaactacttctttctttcccccatggagttcgactctctctgattcaattctctaacgcttccgtcgtaaatttctgtttccaccacataaataatttctcatttcatgtttcctcctttttatcttttttggttaaatcatagtattactcacagtcttttgtttatctagggaacattaaaggtttccaacgtctgcattaacgactggaaagcttgctccaagtggaggccctccaatggtgctctcgactattttgctggtaaaacactgcgtgtgtgtttaaattttttaattttaaacttagcttagggatagtacacttgaaaatttggaatatttttagaattgttttgtattttcaatggaaacttaggaacgggtaggatcatgtgtagtggaggggcaggcttatgctatctaactctgtgcctatctctacggtgatcttaaaagccacaagatactagtttcatgttcctttcattgatgacaatgtaagctctggaatctcctcctctgggactgagatcttattagcttcacaacatttctgtaggttgctttaccattttttatttttattttattggtttttgtaagcaacttttgtaaattgctgtagatggtgccagtagtgattttgcataggaaagccatagcagtgcttatggtattttctggaaaacaataaaccattattttcttaccattgagaaacttgttcattgtagtgctttcatggcctccttctgccagtcccatgttttctcctatgcctatatatggagatgcatcaaattcacaggtaatgtattttatatattgctcgttggatctaaatttcttttgttcacatcaacttaaacaaaaaagaaaaagaaaatctactgtgattaggtgtgtgatagtaatcaggtatccattcttgcggtcttcaacgtttgattactttttcttttccaattttgctattttcgattttttggtagttttcttgcaaaagaaaatccagatttattagtttgtctgtgagtatgctgaatggagttcacagagaagattactccccatgaaggtggatggcctttcattcctaaaggatggtaaattctaattcacaactgcggaattgtttaataattttggagccttgttgttcctcttataatcttatctcctctttatgaagagttgtcactatgatctcttcctattcatgtttcacgcccattatctgccattcccgtctcatttgaaaggtttattaagttttatgttttctcgagcaacttgaattgatgtatgcatctacatatgggtactttgcaatgatctttgttatgcgagtcctttttatggtcatattcactctattttgtttcattgaataatcttttgtgagatacttttcaaattactataagttccaccaagtgattgtgatgatttgattatagctgttaacatttgatggcattacgatattatgctgggcatgtcgacatggaagcctattatcctattatttgtgaagaatatgaaaaagatagtgtttatttctttaaatggaatgattgcattagtaatgtaaaatgctaacttgattgctgctttttcttgtatgtagttccttctttcaatctaaatttacatacatggaagattggtagtagagggaaatggtatacatataaagatatatgtatatagagtacatgcatctatcgaccaacaatttctatccatatgctcctatattttatgttagcagcatatctgttgctgcaggtaagataaacaattgtcctagaccctagtgttatttggctttacatgggagtatttatacttttcccaaaattataacattagtaaaagttttaaagctttaggattataaccagacaccaattaccgcattatcctgcaattttagttgttgaacttaccacctgtttctagtaattaaaatttagccaattactatgtggatgttttatttttccttcttttgccataccaagtttccataaaatttcttaatggctagtcaactgaccctgggccaaaagtggcttacatgcacttaggttaataagtttttgaggaaatctttcacttatttattcaatttgccagctgtctaacttaatttattcttatctctgctttgtaactcagggaattagattcattgtgctttcttttgattttctgatcattaggcacacttggtgcttaattgagactaag

SEQ ID NO: 296593 - DNA, 1367 bp, Cannabis indica
atattaaaattcatataaaatcacatatattgaactatataataatataattcctcaattatacataattatctagttagggttctgctaatccattttttaattccgggaatcacacaaggattgtacatatcgcgacattacagcctagagggtttcggtctttcaacattgtgaattatattttgtagtttcctgttgtttgtaaaaaaatatatatattatgaaactatatatatagtaaatgtagttttgactgtgttttaaaacttgggatccggatctataagattgtataattgtattataataagattaaatttgaattagaaagttttcaaatacgggtgttacatggctcatctattcgatttgctctagatctgtggctgccaagtgatgagtttcctaggccaacttcagactttaccagtttttttgactaaaaggtgcaaagtttatttaaagttgggtgtagggaatgggatgaagaagtgattagggatgtgtttaattagagtgatgcagagattattttggacattcctttagcgatggaggcggttaaggattcttggtgtgttggaatagggatagacatggtagctactcggttaagaatgcttaccagatcattcaagaattattaaaagcaatgtgagaaggggtgataactcttgtttttggaagtagttgtggaatttgaaggtgcctcctactgtgaaagatgttttatggagggcggcatctaactgtcttcctactagaaagaggctccatgaaagaaaagtgcccttggaagttattgtcccttctgcaatcgctagtgaaactattgtgcgttgtctgggtttatgtgattttgcttcaggttgatggaataagttgagcttagatttttcttaaagggagtggagttcatttagggactggctccaggagttgatggatagagttgaggatgagcaaatcgcacgacctggtacgttgtgttgggcaatttggaaggcgatgaatgatctggtgtgggaccaaaagactcggacaatcgatgaggttgtgcagtttgcattaacatctcttgatcaatggaagaaggctcagttgatagaaaattatccttcattgaatccatcgtttttcaataaaggtgatgagctatagacaaaaccagtgaaaaatagtatcaagattaatgttgacgctgaaatctttgtagatttgagaatatttaaagatttaggcggaacacattaattttaaggctatttacaaaaatatggaaaaaaaaaaagaagataaattttgatatatatggttaaaaacttaattacattaaatatgacatttatttaaaaaaaaaaaaa

SEQ ID NO: 296594 - DNA, 6357 bp, Cannabis indica
ggtattttagggttaaaaaagaattaaaagtatagttaaaaaatgtatagtgaggaggaatattttaaaaccatgtgtaattttttaacattaaatgtcaaatttccaattattttcttacattggatatccaatctatacgttttattattgaataaacaatataacaacaatgagggaaaattatattttgttttgtaggacaactaccttgaggaggcaatgaaaatgagaaatcttctggaggagttccatagaaatcatggcctccggcctccaactattcttggtgtgagagagcatgtcttcacaggaaggtttgactgaattcttttcaaatgtaaattattattattattattattattattattattataatttgctaagcttcaaatgtaatgattattgtttatcgtttctcctccctgatagttgtgtgtgttacatccatgttcgtacagtgtctcatcgttagcatggttaatgtcaaatcaagaaaccagctttgttactttggggcaacgtgttttggcgagccctctcaagtatgtagtacttatttgctttcggaaaataagcattgtttttattttgtttcttgtaaaattattttatttgtatagggctttcatactatcactataattataataataataataataataataataatatttttagtaataattttttagttataacataaattttttgtgattaaatataatttttaatcacaataaaaatttacttgaaactataaatataatatttagatacaaattgtcattaatttaattttataatcacaacaaatattgtgactaaaaacatacttagtcacaaaaaattgtgatttttacaactaatatctttagtcacgaactttttagtcacaacattgaaataagaatttataattagtcacaacattctcacttttagtcacaagttttgttctaggtagagtattgaatatttgtagttttgcaaattcgaaaaatcctctccgtacgagactaaagaatgtttgtttggcatgaaatacacatttagctaatggcatttgggtttggcattcatactacttcccaacattctttgaaccttgcttctcttatgattttttctactttctttagaaaagtgatttcttctgctattcttgaccttcgatggttcgattagggcttcgagtcgttttacctcggtctcctgacccctttactagtggcggtcttctcccccactcatggtaaacctatttcgcgcttctagggacgtgagttttttggtttttgtgtgttcgattagcaacaaccttatggaaggactttttttctccagggttgctctcccttcattcttcctcgtctagatttcttctcttaccttcatttttcttcttttggattgtcacgagtcagtggttatggcctatcttttgggggtttattcaacaccttgatttttatgcctccagacacgggtttttgttttgattgctgcgacacttttcgaaatcttataaggagtgtctaaaattttttcttgtaagctttcttgtttctggtctagttttttctctcttagttttgtttggatttcttagtgtgcaggtggatctgtgtttcttctaggctggcttatggttgtgttaggacctgtttgcacaccatctctttgttttaacattgtacgaattcaggttgagtggagctttgtctctttgcccttttggggcatcatctaacaacgtttcttgagattattttgactccttttggtgagtctccctctttttctagtgggtagttaatggggctttgctccttctgatctatattactctggtatgaatattcattttttggttgaaagttgttttactgggtacctattatggaggttctggcctgaaatgttagacagaattgggaaatgaacaacacactcagattctcaaagaccatgtgtgagatttcaatctttatttggtcattctttcaaaaaccatttttaatcacaatcaactggaacttttaagtgttaaactaagattttacaataaattggtgattggcgaagcgatgaggagtggtggcttgtgcctcctttggtctgaacaagttgaattggatcttgattcttactctaactctcccattgatgtgtttgtaaagtctcatgacatcgtttgttggaaatttaaaggattatacggtcaaccttcatcttttttgtggaaagatttttggaaacatcttgttcttatttcatgtacacacagtgaaccttggctatgattatgtgaatcattttcatcttggaagaaatgatcaatggggagtgattctcacctccaaatctcttactaaaaacaattatcattcccagagttagtgtaatgacacttgccttggtaacaaagaacaaattgagcttcattgatggtgattgccctcaccctagccctaatgatgaatgcaatcgtagtcctggagcaatcgatgcaagtcaccaaaattgtacaagaaaaagttgaggaaacagagggattgacaaccatggaagacttttagggtaataatatggaaggattaaatgaagctcaaatggtggacgtttctctaaacttagtggttagattgacttcttcggaaactatgaaattaattggtagtgttcatggccaagaggtaactgttttaattgatagtggagctacccataatatagcctcttcattagctaataatctcagtctacccatctgaactaccgattcttatagagttcaattgacttgagaattcaccaactgactcggagtctaataaatattaattaatcaccaatgaaaagttgaaaatagtaaataaataaaaagaacaccaaaaattatagaggttcggtcccttaaatattagtaatgacctactctacttttagttgtattgatattgagataatgtcttgcacatcactaaggaagacaatgaattctagctacaactctcaagatgcttacagagaatattgttcacaaaagtgctcttaaagtcgagataatgatttcaagtccctcttccctgtgaatacgttcactatttataggatgtagggaagaacatttaaggccacccaacaaattatagcccatggaccatgaagtaatacctagcatagcatagccgaaatgagtggtgcacaccctttgcaccatggaccatgaagtaatacctagcatagctgctaatctttgacatgctagagtcatttaaggccacccaacaaattatagtccagcgggataaaataaaagtaccctatccggccctgcttagggttggattttagattgaaataccacctgatctcgaagggagaaggctgttaacaacccatctgatcgtacaaaacaaaaagaacagacatatatttgatccccttcagagtcaattgtgtcggacatatcccaaaatagtttgctacattctttaagtacgattggagcagcaaaatagctccttgttctgcatggggtccacaccacaccatccaattctcaagaaggccatgggcaaggtactcctcaattggcgggtcggttggaagacccccaaccaagtttttagccttaagtttcctgaacctcctaggggtaagcgtggacggaggagctcccaagcaccgtccaactccccttttgaggcgaaggctccagaaccgctagctcttccactacatgatgaatcctaacgcaagaaggctcaccatcttcattgaaaggctcaatgggctcattgtatccccctaagcggttgtttgtgatgaaatcactgtctgtgactcgcctctaagcaggccattcccttacttcaggctcaacatgcctctcggtctggccgacctgtgtagcccatccccttgctatcagttcggtaatatagggatcaaatgaaggtactgtgcggtgggtttgtttttcttagccatgtttggatcctgaccggcataacgcgcaacaatgactacaacttcagcttgtaaaggatttttctttgaaggtgacgcacgtccttctggaatcgtgttcgggactcctagccagataatgtatgtccaagaagttggaaggaacttcctctaacctcggttcagtttccaaatgaactaactatagatctttcctctaatctgttcagagtagtgatgatgttgtgtctctggtacaggacaaccactattaacctcaaaatcaaaactagacgaagtgctatccggagaatctttagatgaggaactacctgctcaaagtgcaagctgatcctcaaaaagaagactaagaaagtccgcgttgatccggtattcacctccccagtaatcatgcgggtttatctgtgcaaaaggcaagagggaggtgaacatctggatagcttaaaaccactcgaatgacatctaactaggccgtcagggtaaaacaggccatatataccggctacgatgattaacaaatgtaaacatcctaatctacaacgagaaatttgtttttgagtttctaggttattactaaacttaaaatctcaagaatgtcgaacaaaaagaaaaaggaacctcctttccttttcaaaatagcaatattcatctagactaaggagatttcaagaaacccactacatttaagggtttttctaatgccccaatatgggggtgtctagttttatcaatggtggaatataatagagttgtagaaaatttgaatgaaataaagagagaaaggggtctcaaggaacaaactcactagaaagagcttggacgacaccgaagcgatgaagaagagacctccggattgctattgtatggtgaaaagtcgacagtggaatgaagaacaacatcgagtttcaagttcctgggaattttcttgagtttttctctctgaaaaatttctaagaaccatgatgaatgaaaaggttttaaagagtagaggaggctttatatagggttttcataaatgattttcccaaaaaaaagtaaattggaaaatcaattctcacaaaaagtgcatggggaagttgagaaagctagaaagtgtaatcataggggaatgtagccgtcagcacaaacccccacaatgtatgatttaaagccgtcataatgatggctaacatggatgggtgacccgtcaatcctgcacggaacattcggcaaagtctatcacgtgggactcacgcgtgtcagtatccaggtgaataccaaaagtccccatccaaataggtgttcacacaaggacttgtggggctaatattatcccaatttttttctacccagcacattcaatcggccagtacctatcctgagacttagggatagagctaaccatatcctttctttactggcctcaaaataaaatatttctaagtttgcaacgaaagagaacttcatcaagtacgacctctatccttctgcgggcaaaccttcaggttcctttgataaactttctaagaagaagaaatggaccaagaggaaagaacccaaggttgatttcccctctaataagctttctgagaagaagaaagaaaccaaaagagaaagggctgcctggaagaggcttgagcgaggcgaacccttggggaaggttctcattcttataagaccttaagaacaagaaatcgtccgatcttcccgcccagctatcgttgagggaaaaagcaaaggagtagccaatgaggaaagtgaggaggagtctcttcaaatgatgagggttttctagacaaccttttttggaatgatatattcttgatttgggggagggtacaaatttctccaatttatacttaaatatattttttctttagaataggtcttctaacttgtgtgcctttttgcatatatgtcaggggttttaaaatggggacgacatttttggaataagggaaaaattgacctttccttccaatattgatatacataggtttagaaaaaataatttcccttaagcataaataatcaaatttcccttttatattcaagcttatgatatctaaattatcttcccataaatcattccgacaatgcttttaatatttttcccattttacattggggatggtaacataaacttgtactttcattattaacaccttgttttgacaacatttatttgctagagtaaaacctacaattttcattcttagcgtatttcatttccataacaacacgatgtattctcttttttaatgatctaactttatttgatttgtgtagcctgaatgttagaaaatgtgttttgactattaaatactactaaaaataagtatagtgtgggagtttttgttaattttttttttt

SEQ ID NO: 296595 - DNA, 1808 bp, Cannabis indica
taaactactaatataacaacaatttaatccagatgggtgtttcctgatttagtttcttttgaaaaaactctaggcaggtgttaaaattatacaactctacatggaaggatacaggcaagactggaagctttcatttcaaaaggacacagtgtctagaggtggctggtatgtgcctttttttattaataaagaagcaaatatgtagaagtcaaatttgatgcccttttaactcttaccgttaatcaagtcagaaaattctgccaagaaatactatacggatgttgaatactagtttagccaatgaagctcactgcataatgctatgacatcctagcaatttatgaacttgacttaaacattctttgtcatatgcgaaattcgaaccactttcattgattatatcctaacttgatttagttccttgtttgatttcggtatgaagatgtgaaataaattgccttttgtctaaggcaacaaagtttaatgcccttttaagctttaccactaatctactgagaaagtactgtttacactactagtaattttagttcgggagtttgtctttttattcgggctatagtgatattttatatagtttaagaaaaaaaaaatcaggggggcctgctcccaaactgcaaagattggctctgttgcgatgacaagcaatagtaattcggaatacgaattgaccttgacagagaaaatcaaacttgtctttcaatgtttgtatgctatcttgattttgttttcaatacaaagattttaaaaaagttattttctcaggcaacaaggcgggattatagttgcaggtcctggcaaaactaacatctcgtacattcacaaggttagtaactttttattcttatatcattagggtgcatttttgattggggattggggtaatgaaattgaaatttcgttactttggttaaaaatattggaatgacattcaattatttcttcactaatttgttgaaataactattacttctaaaactagaaagaaacatcatttcaatacaaaatgaatataaattttttatttagtaaattttatttcattttttatatcctattcccatttccattctttgtttttattaccccagaaaagcaattaaagttcttcgtttgtgcactttctgattgatataagagccatttaattcattttaggacaaagaagctggggatgatcctgatattgaagacattctcaaagcatgttgctcatgaaagtagtaaaaaattctcttcttctgtttagctctaagtctagctctgcctggtttggccaatactaaatatagactcaagagctacagacatatcccagtaaaaagttgaagcattactgattcaataggatttgatatatttattatgtatagataaataaacattttgtaaaatgtcgtttttaaaacgtacaacgaaattcaaatctacttcattgaaagaaataatgctacattcgaaactgtttctagaatgaaaagagaaaataacgaaaaaaaaaaaaatagagaagctgggtcatcattcaagagaaactttaacctctttcttaaaaactaattgaaagaaaaacaacaacaaaaaaatagggaaactttaacctgcacatataattgatggcacttcaatagagtccatcgaccaatagatagatatacttcattgacactaataatatatatagtgtcattcctcttaagtaaaagttatgtaaaggaaaaaggggtaagttgaaaaatgactcttttattgatcaattaattaaatttacctctaattttatatttatt

SEQ ID NO: 296596 - DNA, 6461 bp, Cannabis indica
acctagtagcgaaaagtagtctttgaaatgtcctctctcagattctcaaatgatgatagcctaatcgtagatcaaacttagaaaaaactgtcttgctctgaagctaatcaaataagtcatcgatcctaggtatagggtacttattcttaatagtcaatttgtttagttcccggtaatcaatgcacacgcatagggatccatctttcttcgaagcaaataacacgggagctcccatggatgacacactatgtcgtgaaaaccctaggtcaagcatcccctaaagctgaatttttaattctttaagttctagcagagcaattatgtaaggtgccttagtaactggttctactctagctgttagatcgataacgaaatctatttcttgctgtggtggtaaacctagaacttcattaggaaaaacatttaaaaattcctgaaccacgctaatatcctctggccgaattgtctcaggccctgtgctatccaataccactgctagaaaccctaagcatccatcttgtaataaatctctagtgtcaaataaggagatcactggaatctgggatcccttaaattatcccaaaaataaaaatggttcctaaccctcaggttggaagatcaccatcttccatttacaatcaatactagctaagtacttggacaggatatccattccaagtataatgtcgaaatctgctaagcctaattctaccaaatcagcactcaactcgatatcctcaattttgtttgacatatacctaacccaccttttagagataactaattctctgtcaggaagtagggttccaaaccctttatcataactatcatatggtttaccctattaatcaaaatttttggccgcaacataggaatgagtagccccatagtcaaacaacatagagaagtaagagttgttgaccgagatcttacctgtaacacatgaggagctgacttctgcatcagcctgagtaagagcaaacacccttgctagagcaggatttactactatctttcgttcttctttcataagctgtggacaatttctctcatagtgtccaggaaaaccatatcgaaaacatcctcaccctctacactcacccagatgatgcttcttacaacttggacaatctgggtaagtatatcgggtttcgaaaccaccctgacggttgcctcgagcatggttccctcggaatctcttgttctgatttgagccacgaggtgtagatggtgcctttccaatctggccaatggttgagtcactataccactaccataagcagaggtaggagaagtaggggctccaccaacaacctgagccctttgggactcctaggtgcactcagctgcaccctcaactcatagtgcctttcccaccatgtcagtataggtggtattatcattggtggtaatcataaggttgtgttttacttttggattcaatccatccacgtacttttgtttctaactgaaatcggtaggcaaaattctcgaggccaacctagccaatcgattaaactgagttgtgtattcggtaactgtcatattctcattctgagtcagctaggtaaattcttttattttttcacttctaactgcctcgttgtagtacttggcattgaaaaattgttggaactcttcccaggtaatggtagtaacatgtcgagtcagggccaccatgtcccacaagaccagggcatcctccctgaactagaatgtggcataggccattctgtcattaccaatgacacccataaagtaagattgtaataactgtcaaccactgctcaactttcatcacatcgggaccacccaaaaagactggaggtgccagattgtggaacctttcatacaacggttccatttgattcactgtagcaattggcattgcctgcatagcagggacaggagctacctgcatctctggagcaggcattgcaagagcaccctgctgcctcatgcatttgatttcttcatcttgatcaaggatcctggcttgcattgctgaaaacctatcttcccaatcctaggcagcctgcggcgtgccatgcctctaaggcctctaccttggcaacgtatgtttgagggaatctgaactccctaactgccactagatacgaccgagttaccttggctcctcgtgtttttcctgagatccattctaaaagaatagcctgctaaactaagagctagcttggtcagatttcgatcaagaataatttactaattaccgcttattttagaaattaaaacatgcgtctattcaactatcaggctactaacatgcttcctatcaggcttttcttatatcatactaataaaataaactagtaaagcaacaaagacttactaaaccgtgagtcgagcttattgctaatgatgattgtacatgtcgtgatgatctttggaagacaacctagtggctctgataccaaattgtaacaccctactagtttaggcgtgttagcgtgattttaacttaattgtgcaactcgttgctaatcaacgagtttattaaaaattgtaaatcaagcaaatcaaatctgcctagtcaacaaatcctctactttgtggggtggacttatcgagacagtccaagtgtgttattcactataaactccccaacagaagaaaaagggaaactaaatgtgaatcttaaactactataaatacccatcaaatcctagggatatagggttgaattctcttacaaaactttcttaggcaaacttgagaacatatatgctttgtattcctaaaggcttttcaagctaagaactaacgaataacactaactcatggagtaaggctaattaatgccccaaccacgtaaaactatttgtccctttttactctttcttttttaattaaatatttctacagttcttatcgtttataattagttttcaaaattctcgataaatattttggtgctttcattgagagttgaatgaagtacggtgaccacttatatattacgttcaagtaatcatggaactcacacgaacaatgtctggtcttcatattattggtcccaacaccaaattagggaattctaatgatccacatgagatgactagccatgagaatggttaccaagataaagatcaaaatcaatatgatcttatcatcaagatgccaaatcctaagaaagcagttctaaggatgctaatgataacactcttgaaatacttgaggatatgcatgaagacgaccctaaggataaggctgctgatgataacattggagagaagaaccaacttgacaattcagacattgttctcatcttcgctagacaacttcaactgggagaaagcacgttaactcaacaagattaatttaatgagaattgctcacaaagatgaccagaatggaggctgtaatgagtgccctgaccaaaggggctcttcacgtacaagcatctccaagaactgatgcccttgacaaaatagatccaaaagatcctagaacttcaggtgtccgcatagacaaataaaaagggatagacgtcgaagaactgaggaagactccttccaccaagcagcacaaaaagtctaaagctgctgacctacctcaataaaggaggaaaggaaaccatgattcagggcatggtgaccagacaaactctagaggcagagtcacacaagaaaataagactgatgtcagattccagaagccagagtccccaaatggataaggatccttttacagggattccaataatcgtgatgaggatgttgatgaagtacatcaagtatcagatgatagcagtggaagcctttccatgaacaatcttcaaagaagattgaatgctaagaaagagagagccaaagcagaaaaagctagaccccgtgggagaatctgagagaccacaacaacgattgcatttgtggaagagagtcttcaattgacaagactcaatgcctggaacgcaaagttaaggagttgatgaagatcacagacaagatttctacgaaacaaagtggcatcgtgttagattctaaggaagaggataaagagccctgtctgaagagaaccattaaagcgccactactggaacatttcaaaatgcaacaaatggatttgtatgaagggcggatgtacccaagggacaacttcaccaagtacaaaaaaattatgcatgttaacaagagcgtttatgttttcaactaacattgagtaagttcgcgaagaactgctggaagaggttgtctccgagattgatccacaactggatagacctacaagcaatgttcagaaagcaatttacaccagccaaaaattatgacttaaaagctagttccctgaccagcgtccaacaacaattgggagaaagtttgaagaaattcattttgtgcatgatggatatggttgctaaaaatatagttaccgatgacatgaaaatggtagccttaaaattaggactggcaactggatccttgttgtggggagatctccaacataagagggcagacactttgactgaattctagataaggggctagggaatcataaacttggaagaagattatgcccaagcttacagagtacttcaagcaccttccatcaatgtagcaaattcctaaactttgcatatgacaactttatccatttaccctccaccagctgcttatactactccaacaatatatgaataaagtacttctgtgcagccagctgtacaggctagtctttctgggtttagagctacacaaatcagatatagtgccgttactggataaacgaactaaaaagtagaagttctagactccaatataatccaatctcattgtaaaaggagtttaaagggtccaaactgtagtgattctgtgaaaaagggaaagacccatgaatcaaggtacattgagtatacaagtcttgtagatggttgagaaaatatgtacaaggccacttgtaacatggtaattacaagaagcctctaccaatgtataaacatggaaaataaagaagatatccaagtaagaggagtgaatatcacagtgatataggtcacaccacaaatgaatgtgactctttaagagatgaaattgaaggactaatacagaatggacacttatccaattgggtaaggatccttgacatatatccatgacaggtagttgtagacaaatagcttttcattccagtgtagcacggagccaaaaatccttgttagggagtaggccttccacaagctcttagaatgcaagctctaaatgcacaagccttttaaggggcacaaaatgctttggtagtagtaatagctattgccctcggtcctaaaaatctgcaccctctaggagtttctttaccaatcttagatggtcatgcagaaactatttctgggtgacctcatattattggaagcacccataatgtgcaaaaaaggtacttaaatgaattgaaccaaggcaaagcttgccacctggtacagtcacttgcccagcctctgaggatgatgaatttaccaatgacctttacagaagatgacatcaggcatgtacacttccctcacaatgaccctttagtgatagaggctcacataacaaatgaaagagtttccagaatcctcgtagataatggaagccctatgaaaatcatttttaatggagccttctaagccattagtttggtggaagccaatctgttgccatgtccaatacaactgcaaggtcttaaaggagacacactgatccccatgggaaaaatataacttccgatgaaaataaatgggaaagttaccaaaagcaatgtagtatcattattcaagtacaacacatttgtaatagttgatcgccctattgctaataatgccatcctaggaagaccattttaaattgattttgaagcggtaacatccatccgacatttgtgcttaaagttcccaagtgatatccaaagaattgggacaatatgaaaagatcaaagaagtgcacgaggtggttacaacatttcaaccatgaccattctaagggtccaagaaggagagatatttgaagccagaacatcttcctagccagcattgggggtggtccaagaagatgagctagatccacaagttggcatggaacatataatagaaccaatggaagaagtggaagaagtatgcatagatgatagagatcctaccaaggttatccgagtggggaagaacttacctctagcggtgaaggaaaatattgtttccacgttcaaggataatattgacgtgttagcctagagtcattatgacatgagtggaatcaatcctcatgttatttttcatgcattaacatagatcccaacatagatcaagattgacaaaagacgagacctctagatctagtgaggtcaaaagcaaaaaaaacagaggtggacaagctaacaaacattgacttcctcaaggaagctatgtatcccatatggctcgccaatctagttttggtcccaaagactaatgggacatggaggatgtgtataga

SEQ ID NO: 296597 - DNA, 4776 bp, Cannabis indica
cacaagcaagcaacatcagtagagtattaaatcccgaaagagaatcgaaaacttagaactaacaaaagttaaaatgaccggaaattcatcactcaatttatttgtttatttatttcggtttcatactcttaactgtaacacaatcacattgacatcataatcatcctaacaggcaccgtacaatctccgaattgcattccagtccgaaattcaggatgcaacaaaccaggctgcagaattaatcagagtattaggcaaagacatatgcaacatgaatcgaagcatcaaaacttccttactcaagaaagtacacagctcggccgtgacactgcagcgtgcagtagacttgcactcgtatctcctcacatccccctcctgctctggtgtccttccttcagtatctgacaacgcttcaaagccgctccccaagctctctcccaccatgtcgtccactcccgtcgacataaaccagttactggcctgtagtgaatttgatagcaacaacaacaacaatgaaatgaactcaaataatcagatgctgcagacacaaaactcaacagtagttcaggctgaatcttaccacgagctgatgagaaagcaatcgagaaggctgcattcctggccttcgagacaattagatactttttatgaagaagacggggccttgaatacagactttttaccaagaatgaaagctttagagagcactgcatcactgtcactggtgaacttcacttctttgcttattgagtttgtggcaaggcttgaccacttagttgaagcagttgatgagctttctaagttagctaagttcaaacatgacggattacactaacaaattttttccttatttaaaacatgaaaaatcatgtattaattatgatcaagatagaaaagaaaagaagacaaaacaataaaatgtaaaattactaaagcaaggtttttgcctcttgttgatgttggttggttctttttcttattctacataatatttctatacatatatacacgtgtcacaattggtagtcaccaaacttattgttctcataatcagtggtggacataattattagtgttatacatcccaaaaagtcaagattgtaagttcttattgatgacttcaaaatgcagcagcacagtatattcagttttttgcagacttttaacaattatataacaaccactaaattatattttatatttccattttatttaatttaattttcttttcaaacctaagcacctattccatcaacactactagtgtataaggtaaaaaaaagctcatcattcctgcagtagaaatttagaatttcacttttttttcaactctttcaaatagtaatttctagttggtatcaaacttgaatacgactctcattatcacccaaccaagaaatataggcaaagaattatgacacttcttttttaacaaaaataagattaccattaagtaataatcatattagcagaatagaaagagaattatagcaccgaaagataggctttattattaatataaccagaatgtctgacaaactgaccgaccttacaggtgaggatgcaacaacctgtattcacaacaaacttgactgtggatttcttttttataaatatttacaagaaagaaggaaatccaaagacccaaccaactaccttttgattttattcactgtcactctagactgtgaaagcataaatggttctgcccactacgaaccaatgaattgacaacttagaagaactttaactaatatacgaagacgccaggctgactaaaaagaaaatgacacggacatgccaggaaaccaccctgtcatacatactatggaaaaacctaacagaataaagatgagagaaggagcagagatttacattacatccaattctgaggaataatgtatgatttcattggctcgatggaagcgtccttgacacctacgttgctgctgctgctgctagctccgagaacagagctcaccttgatgaagtgacttccgccatgcactctaccttccccgactgggaaattacttggaccaccaaattgattcaagccaaaacctgtgctgcctgctgaagtcagctttgaaacatctatgttcatgtcctctgggacaacctctttcaccttgtcgagtttggtttcttgaactaaagatcctatggttgcacctccatgaactctcttgtcctgtaccaggccgctgtggagtgcacataggcctgtttttccccttgcaaatgagttgcaaggactagcacagctgccgaattctgatcctggatggccccaagagcatcgctttcctccaccatgagccttgcaataatcagtgctgccttgtgcactcttgccacacccatcaaacttgcaccgcttaccccctccatggcgaacacagaagtcagtccgtcccctagcacttttagtgcactcaggcatggcacaccttttacctcctccatgtgccacacagaaattagtacccccatggacactctttgtacaaaccccgccaccttgaaaagcacatcttttgcccccaccatggcccttgcaaaaaggagtgcttccttcagctcctttggtgcatcctgcagcagtgcacctttttcctccaccatgagccttacaatacatggtgcttccttgtgctccttttgtgcatcctgtagcttggcagcgtcggccacctccatgtgagatgcaaaggcccgataagccttctgcactctttgtgcagttttctttttgacatcttttgccaccaccgtgcctaatacacagtcccgatttgcctctggcagctcgagtgcaaccaccctcataactgcatctccgaccaccaccatgagcaatacaataatctgtacgtccctctgcactctttgtgcaaccaagaaattcacaccgccgaccacccccatgggccttgcagtacacagtcctgccctcagcacccttgtgacaaccttgtttctgacacctacgacctccaccatgagatatacagcggccagaagcacctctggctccctttccacatccctcaatctgacatgtcttcgaactagtgctgcgatgttgagataattgctgctgtattgttgacccagaagtacaggtgactgagctttttggtgtgcttaatacacttgatgagaggtccagaacaatgggagttggatcaactttttggggaacctgtttaaataagatggcatcccctgcaatggaagatgttggcaatggtggcacaataatcccttctttccaatgacatgatgttgatccttcatctgcactattacccatgaaagctgatagtggtatctctactccagactgaagtgaactggaactcggatgaacactagtgatttcagattcacagaagccagtagagagacttaactccaagtcaactttgggctgcacctccactgctttcaaaattgaactagcatgtttctttgggctgggcaacttttcattgccaagatgtagagaaaagtccaattcaagatccattgaggattcctcatcagtttccttagctgaagacattgtagtgcaagcagttcctgaacttcccttgctgtccgaggaacttggagaacggccaagcccaagagacagtgacgagccaacttgctggcaggcagatggatcaatcgaactccacttccgtttagttccctttgagtttgacataaaaggaatggagccaggggaattaagacacaagatagtatctgcatgagactcggctccaactaccctaaattgcttagaacccaaaatcccaaatgcatttgaagaataattagcagcaaatcccatgttctggaacctatcatccatttttataacttaaattcaatattacactaacctaaaattaattgcaacagaacagtctacctgacttccgggctagaaaaataatatttacaaaactagagttagattgtctctaaaagagtacatcccacccccgctaacaaatcctgaggtatcccgacgatccattttctgtaataaaatccaaaaccagactttcacggattattagcgagtgcacataaattcaatgtaacttgatgtcttcacagcaagaaggcagacaaacatcctgttacacccaaaaaaaaaagcacattatcagagataaactaaagaaaatgatgaaaacataatggaagaaaatcacggtaaaaaaaaaatcttcttttaacgacagcaaaaggagagctcagctgctcaacaaaaggagaaagtggaagcattattcacatcaataaactaaaaaaattgctttgcaagacaacgcaaaattggctttaattaaactgattacgctgcgaaagctaaatgtcacacattcttccctatctcatttgctcacacatgacacaaaattaattggtttacgaactcaacagccccaattaattatcacagttaagaaacaaatattaagagattgtcctcaaaacaagtgaaaagtgaactaaggtgggaagattatttcaacctccatccccttccaaaaaaactaatttagtccataaaacagcatacagtctttaaatgtcctcactttctctttctcctttatttatgacggccaccaacaactgaaaaaggaccatgtacatctaaacacaaaagacatagcaagcacacatccatatgtataaatatattaacagatgtcgtcagaaataaagaagcaaattaatacatctttagagagagagagagagaga

SEQ ID NO: 296598 - DNA, 4685 bp, Cannabis indica
tttttaaaattgaattttaaaaacttttgccaaacgacccatattagtttttaaaaactatttttaattttgaaaaacaaaaaatagttttaagttatgaagccaaatagcctctttgcttttcgttaaaaaaaaaaagaaaacattttactcaaacatattatcataaaaatgttggaaaaaataataataatcttttcaaaataatagtaataaaacaacatattaatataaaattatcaaattgagccacattaatatcaaactttacaaattgaccccgcattttaattgtttttacagcatacgccaagagagccaacctcaagttttcaactaacttaaaccttaaatataagtttccaaaattctcccaatctttttcctttccacatttccaactcgccggagaacctgagcaccgtccgtaccgtcaaattctccgacacccggcggctaatctcacaaagttctccactttctccacgttacctcgatcgattatggcgacacctgagtcgatgttgttttcttcgtctgattcgtaacggtttgttttttcttttttccgactttgaatctgaatccagtcaaaatccatggcggcgaggaatcaaacctcgtcgttcgggaattttagggatgcttcgaagatcttccaagctccgacgagttcatcggcttctacaagctccggcggtggcggaccggcgattgggttgacgaatacgtcgctcctgaatccgaatcggtcttatgctccgctcagtactgacgatcccggtaattcaaggtctcgttctctttcactttttctctccaatttgtggaaattttgtgttgaaatagaatgcaagtaaattagagacaattttagaaattagctacactggaattgaagggagcaaaacttgtttaaactcaattcatgggttcgtttactaatagattaaataaatgaagcaatggcaaggtagaaagcattgtgtttcactaagtagagactcgttaaggcttgctttctaatttaatacatgaataaatcgagaagggaaaatcaaaacaagtcgggaatttggtagaactttttttcgtatagtgtctatgtgcaatttcggtcatttctattgttttgctatgcatgcccaagaatgtagaacataaaaaactgattttgggagtggtgcattaggttttagacccttatattgtttcaatgatcattcagacaattcgatttagtaacgacatgtccaatggcagcaggaaaatctcatttggaacttttcccttcactggtcatgggtcatttacttcctaagtcctatatgaaaattttcattaagagaataagggccaaaaccaaatagtttgtagcttctaaaaaccctttctgcatcagtatagtcaggtgccagatgctaagctggagaatgatgtgtgaacttgactgatgatattctatcatcagggtaatatttcctatatgagtattaactggattattgagaagcacaatgcaagtatatagtgctttaaattatcaaaacaaagtatatagtgctgtaagttgagaagttcctttcatggggtgacttatgtttttattactacagtaggggtgcgttcactgttgatccatctccaacttgggtggatgtatctgatgaaatatcagcaaatgtgcaacatgcgcatgtgaaagtgtctgagctaacaaaagcccatgaaaaggccttaatgccatgttttagaggtggaagaaaagataaacacttaattgaagcccttacacaagagataattggtttgataaggaaaacagagaaaagactacaaagactttctgcagctgggtcatctgaagattcgaatgtcagaaaaaatgtgcaggtataactttgttttaatcttttttagtaattcaatttgctttattagtttctgcaaaacaatattgatatttgtttgcctgtcgtctaaattttatatttagtggaggttaatctgtatgctttatccacactgttgaacggtcctaatacctatggtcattagtagcttgcaaggttcttaaagtttgtttccctttcataattgtttcaaattgcattaataatttagggccaacttgtctaatttgacattaaacaaaactgtatgctctttaggttataggtatcttttgaatctctctcaaactaatagtcaataaagtgccctagttacactattatcaaggaaaaaactattattaagagtgacatgtaccttcatagctagctatataatgtatctagaggttgctgaataattatagattactttagtaataagtgctctagagattgctcattattcttcactctttttgtgtacttgtaagcactgtttctttgtcttttcatgttgagaaaaagtacatgtaatattgcatccttccacaatagtggtgagaaataaggcaggctgtgttatacctacaatccagcaactgttagaaattcacattttggttaacacaagcaaacacataaatcaaattaaactgtctgaaaaatagtgagataaagatggactatggttttgtgtgcatgtttcgactacagcgttctcttgcaaccgacctcaagaatctctcagtggagctaagagagaaactgtctgcttatttagagggcctcaggtggcaaaaagaggtcagtaaagaatatatttatttatctatgtatatgattatgtaagagctattgtttcaaatggattgaccatggacattgcatgttatggaagtttatatctgatttttcaagcatggaattgtttttatttataaaaagcaagtacatgagcctcttatatctgctcctgcattaaaattctggtgaacttttctcttattgttaggaattactgaattgtaaattgcttttaaagctcacaaagtacgctgcattccttttgatgtagggtgatgaagtatatatagatatgaatcttaatggaagtagatctagagtggaagatgaagatttggataacatggtatgctggaattttcttctgtatctgttgtatttctttcagatcttgttaaccatttcaaatatggggatcaaattccattgacaaggtcaatatttgttgatcaatctctgagtatactgactggataactgaaatttttttaaccaatattttatttgagttaaaagctagtagtgatacaaatgtgtggacaggtgtttgatgagcaccagcttgcaaaactcaaaaacagtgaggcattctcagtagaaagaaagcaagagatccaacaggcaattgaacttctctgcactaagtattttcgttgatattgattcagtgcttagttaataattggctatgctttttgccttgtttacaggttgtagaatctgtaaatgagctttctcagattatgaaggatctgtcagtacttgtgatagaacaggttagataaatccaaatttaagcacatttattttttttcaagaaaaatatggcatgctattttcaaacggattttccatgtcctaaatttaatctcttttcaaacagggtactgttggggataggatagactacacacagaatgctgcaacaacagttgaggagggccccaagcaactaaaaaaggtcttttgttgaataattttggaaatggcaatatatttgtatataaatctgtgatcctctcttaccatttctaggcttttccattttagatttatttgatctccaagtggtaattttttttgaaaatatattaagaaaaaaaaacaaaaaactttgaagattgcttggtctttggattttaaataaattcaaactctacaaggaatgttcaaaatttattaaaatttgttttgtaacgtatttcctatgaatattgtaatttgattactttttatttagacaaggaaatatatgtttctttttaaaataataataataacgcagttaggaaatgtgtttttttttttttgataacagttaggaaatgattgattagcaactatttgcattttgattttgagggtcttgtattaacatatttaatagagcctaaaaaacaaacataggctaacctcaaatctgttatttagttttttcttttctttttaagtttcagaattaaattagatttgaattttgatgtatggatttcggttggtgaatacattaatatttacatttaattatgagttttaatataacttgaaacgttagttttgaccattaatattagtttcaatggaatttgagacttttttttttgatttttgaataatttttacgttaactttataacttcaccttgttttgttgtgaaaaacagatggttagaggtgggaagttgagtagcaaacataaattaagaaagagagctatgttgatggacaaaggttctgatgattcagatgaggattatgttgtgtcagatgaggataatgaagtctctggtaattcagatgaggattatccctttttagtggatgaatttgcatcagaagatgatagttttgttaaggaagaagaggagaggaaagtgaaaagagtgaataaggttggcagatcaaaatccagatgccgccctagaagatctattgtagaagaggaagatgaggaaagagaagaagccgaagaagaagaagaagaag

SEQ ID NO: 296599 - DNA, 3884 bp, Cannabis indica
ctgaaccgaagctagagagagagagaggcaataattggattttctattttttatcttttctttggttaagtcctaatttccaaactaaagataattctaaataatcttatttcttttagtggccagctgctaacaagagagaaaaccacctaaacttcaaaaccaaaatgactaaaatactctcatttgagtgcttaaattgtaaaatggcttaggggtcaaatggtccaacaccataaccccgcctaaacccgatgttctaaatatcaacttataaataccctgttaaataaaaagattctaaaataatccatgtgactaaattggacatctgtcacattttctatcatcaccgagcaaagatcataaaaattataaattttccatataacataaatcgtacacttagattttaataaaatctctaaaattgagaaattacaaatataatgcccatttttgaagataggactcgtaataaatataaactcatgtatagtcattaaatattaataattaatgctaattgcctttagtaatctaaaatccaatcatgcggtcattacagaaaggacatggttgcgaaaggatccaccttaatagagtctggagataactctggattgctagggctcctaaagatctcatctaccttatttatgaattcatcatggggtacttagtgcgatctaaatttaaaaagtatgtatgaaatcccccttggtccatttaagatatgcaatgaagactgggggtgtgatacacacagaagggtctgttacctcttccaaaaatgttggctcccaatgcgccctcatccggatatgctacaacatacctctcctggatctcctcaacttctatcaaaggatttggaagacggagcatccaactagcttccaggagctagtcctctttagtagcctccgcgaggattttagctaaatcacaagaaatctcctccttggcctcttttggagcccgactttggccccaattgctgacaatgtcgatactatgaaagtttacaataagcccatgctcgaggagcagtggtgtagtcaccaagccttcaactttcaattgggcttcaatgaaagccttgtattgggccaccttcttggccagctcctcagtctcaacactctgaggtataggctttgccaatagaaacaaagaaacacaactgctcagtcagcactttatgtcatatcaaaggagagattgaaaaagaaacatacccaaaaagcaactgtaagagtttttatctagaacttggaagctgagttggaaggtaggaaccctcttcactgggaaactagtaaagaagaacagatactccttaaggtcgtgggaatgcttggtctgactggtggggcaatgagcatctaaatacttctcaagcttgtaagatcccaacttcttacagtttgtcctcatcgattgaggcttcaccccgtagaagtacaaaatttcctccagagtaggcgccttgaacttattaattttatagaaaatgtaccatccggctaagagcttataagccagaggtatcagttgaaacagagcaatcccattgcgtgcaataaactttgctaagtaagttgtcagtgggaggtgtgcttcccttgagatataggattaactctaggtgctgaacacatccgtgctcacagatgcagactcctccgggatagccatcctatgccacattagttccagtacgttgaacaatctggcttcaatgggatatgtttctagcatcccatatgaacggaagcaattttccttttggtccacctcccaaatgaagtcattgaatttttcctttcccttaggaatttttggatgtcctggacggagcgactttcgggatagtttctagggcaacctccaggagggcctcaagggtaacatctaagtgaaaatcccctgtaggaacctctaccggagttcccccagtgactattttcttgacatggacaactaatgtgtcctctccaatttccaccgcatcaatacatcactggaaagatgaaaagaaaagaaaggccaagcaataacacccactacccaaatgacaaaatggctatcaaagaaggcctcccctaaattgcttggagaggtccctgctggacccaatgctgtcaaaaacttatttttcccagacaactcaaaatgattggtccggaacccataagaaagttaacagaacaaagcttaaaagaaaaaatccagaaagtaaaaatcccccagagtcctaataactccgagtgcgtattacaaaacaaactggtctaatattcatttaagagttcatcttgcctggttttgccctaattctagaatcctacaagcatgaaaatatctatgggagtgcaaacaaccatactcaaactattcaaaaaaaaaatcaacacttccagggcacaaaaaaattccacataatcccattctagaaataaaactctacaggcgacactttaccattcaaacatgcaaggtatcctaaacctagcttgaactaagcatttctatcttagacacgaaatagcaaatagtcaacaaaatatcaggatacttacttgttgtgcgaatcgagaaagtgaggttgtcgtggtaatcttcccaagaatgctaaacccagtcgattacaggattgttgccgacctgggcattgaagcttttgtcggtctaggggtggaacaattcgaggttcaacgactctattttttggaaaataggcttaatggaagtttagaaagatttgaatcaagcagtcaaagacttcttgcattcactattagagacaacgatgagaagtaaattttctggaaaataagggattttggtttgaaagtttaaaatgaggggctttaaaaatctgaagcaatgaaaaagaagaaatgaggtgggaaaatcaatttatacctcaatcgagatcctcacgattttaataaacgacccagattccatcttctaaaagcacattttgatatgatagataagttaaaaagatggcatttaaaattttcctctagcatttattattcatcattatacacctcaagtaccgtacacattaaaggagggttcattacaatcgtcctgccatcattgcaagtcctcccaagaaatgtgccctcaatgcgcttgtgttatcaacaaatacattaaaggtgtcacatgtgagccacgcccgtggtaccttcaatttatggtccgtacttgatgacagctcacgggatgcatccgcgactccagtagttaccacatgctaagaattcatcccaaagaaacagaggagtactacaagctcctagatctcatagagtcccaaaagcttaggggtaaatgttatctatgtttttgagcatgtgacacgtgacatttaggagaaggaataattttcataatttccctaataaaaattccctactatgatcctgtcacggagaagcctcatagaaccaggaataagtcaaaactgggaagatacacagaaatccatttggccctaccttagcttcctggacatggaaggtgtgttacctttctcgaacccaaaggggtccaatattggcagtctgcccaacttatacctggatgggtactctaagggcctaatgcggatgtcgattgccttggagtgtcgcggacgtctacctctaatacaagccaggtcaccaagtgacaattatgcctttcctgtcgcaggatcaaatcttgtccctgttgtcctcaaaagtgagtgttttaatatttatactcgcaagtgcacgaatcgtttcggaatatagtgttcatgtaagtgcaaggtcgaacccatgggagttgactaacatcaaaagaaactatttcaaacaaaataagaatattctaac

SEQ ID NO: 296600 - DNA, 9204 bp, Cannabis indica
ttaattaaaaaatgaaaaaagaaacacaacaccgccaagaaaaaagcttatgctaccttgcaaaaagtatgagcaatctggcattctttctggaataacctgcatatattaataaaattcatgttaaaaatagttgagttttgcaaagacagcagcaaagttcttgcagaagagaaaggggaggggagcactgcatcaaatttctttgagtgcaattatggaatgataaaccttgtgggtcaatttgcagttgtcattagaacataaaccattcaaaaactttgtacaaactgcaattttggatggatcatgaatgaagtgacatctcccattatccttgttgcacttcccaaatcttgtaaagaactgacaatactttctctttttagccagccggaccctggcagtgtgcaaactccaacggaccttctcacttgccaatatccttgttcgtttctttggatctctaacaagctggttaccgtttccaatccgaacatatctgccaaaatttgaataaaaaaaatttgtatcaaactaaagttaccatcaatcagaaagattaacaaatactgataaaacataaaaatacacaacaacctataaaaaacaagcaacttactcattattgccaatcactagtctcctggggatgtaggatctctttgcatccttatcaggatgaactgtagcagcaaatgatgaatcatcatctaccacaggacatgtgaagttttatgatcaattaacaataagataccagaacttatcaaaatatgataaaggataaaagaagccccaatcagaaacactagacactaaagaatagaattcatttatcctgcataacaaaagtgatcacctgatatcctctgaagtgttcgtcttgatgggtccattttataacggcacgagccaacacggaatatcctctcacctgcgtcattgcacaaaatagagaataaaaaatagggataaattagcataaacatctgcaaacagaaagataattgaatgagccaagatgggaaagaactctactgttaactggcttacgtgaagaatgacttctgtccttggaaccagaactattgcgtgtagatcctttctgttctcttttcttcttctcaacctcagcaacagcaagtgtagcttcctatgtgaaaaaataatagcattgatatattatacagtataaaagctattattgataaaatccatcgtgtatgtacagtttattagagtagcagcaactaacctcatgagctttctttgagtgtttgtcaatggattttgaccattttaaacttgatccaccaacacttaacacctttgattttcgtagtgaaaatccattggttgaccttgtgtaaactgtatctcgctttcttgataacagcaatttcccactaaaagcagaaaaatcaatcactattttcttacacaacataaacaagtacgatagaaactgcacaaccttcataatttgataaatagtccatacctgattgctaaggaattacttttggaaatcgaattccagttttgcatggaatttctccagtatgttgtacgcttccaagggaaaaggtgaggataaaccttctgatggcttattgtaccactatcattatttgatgactgtgagttacgcagtgtccagaccagagagtttgatgagcgtttaaatgtctttgcaacagctgcacatgaataaagctcatgttttatgtgccatgaaaattgatgagtcattcagcacatatttgtcttacacaactattagctatatgagaacatcaaggtccgtccatgctgagagtatatttactatgacagaaaaagccaaaaacatctaacacaattaaaccagcagttttatctttattcattattacaaacttgtaaacagagggcttagcaactcatattcagaaatttcaagaaaaacaagaagaaattataaacatttgtcagaactatacattctcattttatgcaacccacaaaagacacatatcctaatatcaaagagtagaaaataaagtgttcaacactaaacgtacggtccaccatagctacttcatctatcattttatagcatgcatgatgcatatgtgtgcatatacaaatcaaataaaaaaaaatataaaggtttataatagactgccacatttattaagttcttcaacgtacccttttgtgaacgcttcttattcgatcttctgcttgagatagctttgagagttatttggacatccagactcaaattgtcatcaggcataaccatgggctgtttggtgtggctttccagtgaagtccttacgagctgattttttctcttcttgaagtacccatcaaaggatgacgattgcgtcaaatcagtagaatttgaagttgcaaccaactgattcaatttgcgctttacatacactattctctttgggtctacagatgccgaattcccatcatctaattcagactggttatccaaactagtaagtatgccattttggttttcagaagtcagtgaatccttcacaaatttagttgtgacagtgttctctgttgaacttataggatctgatgtagtttcaaagcaaccactaagatggggccctgctgttggggaagacgtacaatcccttgatgatatagggacattaggcaatttagtcccactatgtactaatgatgttctggacttttcacaagaagtctttgtttcccccttcctcaagaaaccatttgacatcccaacatcaacttttttgatgctactctttgattcatctaaaccagttgagctcaaccggttaacaggacaaaaaccaggagaacgctgaggtaaagaagcagctggagaaggctttcgaacaaggctattgccctttcgtacataagaagtgctttgaatctttctatctttaactgttaactgcgattgagaaagatcagtcctcgagaaaggcttacttccaggaagagatgcagaagaaacattatttcgatgccaagttcgtgggttggcatgtgttgatgtggttttcctttttatgttggtgacagcaaaagatgtactaccaggaaaggttctaggagggggatgacccagctggttcttctgcccattgtagtgatcatcactactgatattcacaccttttggagaactttcagaatcttgcaaaggcaatgatatcaacttctcctcaattgcttggtccgtttcagttgcacaatctgactttagattagcatcagtacactgcaaaagtgatttttcagcagctacgatagaaccatctgtatccacaaacgtttttatcagctctccatcttcgctacaagtttcattagatatttgacagccagacatggcatctaatatgcatgcattggatgcagtaatcagggagtgctgagaatcaatgtttcttagagcatcaggcaccaactccatagcttcatcactggaggtagcagcggacactccattttgatcaacaggcaaagagagatcattagacaagctgcgaaattcatttttcacaagaagattatcagattccacacctgtaaaagaaaatctcagatttatatctagagcctggacatttgaaagaattgtgcaatgaggaggctcttcttgagcaataacttcaggaggttcttcttgaccaataacttgctctctagatgcagacacacccagcctttctactcctcttctttccatattacaagcctcagcatgctgatcaaaagcagccactactgcagcatcaatattttttgttcctgtcttgatcctctggacaaatcgattccacagttggaattattgacttctcaagagttagatcacaacaaagttggttttcagatttcaaggtatcgtcattaaagacactccttacagcaaccacagtgttagaagatcctttgggtaattcagtgatctcatgtacacagtgcgtcaaattagttgcagtagatggagtatctgcaatagatctgttcatatccgtgttttgttgcattgcaacctcatttgaagtaaatagttctgcacaagaagtagatgaaggctgttcatcagtctctgaagttgttagactaggcatagccatatgaggattcagagttttcctcttctttctacaatgtggagtaaagtggaaatcatctttgacattatctctagctatcaagttagagtcgaaaatcccatcagatgaactattttgatgcagaacaatggcttggtcttcacctggtggtaaggcaacatccaaactccccatacaagaaacaacagcattattttcattgtcagcagaaaaacttaacattgtatctacagcggtagtagggttagaaacattaacagcatctaaagcagtgtcagttgtacttgaaaagtctaactgacttctaactgttctcttcttactattcaaagatttatctcctttattatttccaaatgatttcgtattagggaagtttttcatggcaccattttcagacaattcagcaccaccatctgtagatggttgcatgtggtccacagtgcaactgctggaaatggtagtgttcttttcactatttcttaagttgcctcccagagaggtagtttcatcaatgtgcaagctgctgtcttcatccatggtggtcttccctaaatctaacaaaccaacttttgcacagttttctgctgacaaagtagcatctttttggacactattatcatgcaatgcagcgacctcaatactacaaggtagcttgctcaaagcatcattagtaccaacatcacaaactttgctttcctcatttgacaatgtgaggccactgacaacatccgatgtgccactgttgtaacaatatgtattcacaagcttgttgtgcatttggatttcccctggattcaagagtgcagaatcaacattgtctccaataggcaacgtgactggtattgggtccttttctaatgcaccttcaaataataatgagtcaccacttggatgatactctttaatatttaccacatctgcaatttcaggaatatcaatagtacttacactgagtgacctaactaaatccttgttactatttgacatggtagggaagccctcgactgataactctggacatttgtcaatcctgatatcttcagaacttgaaaggctgttgccaattttgtctatgttgtttatgctttgcctactagaattgtcattaacgccaagttcctcagactctatagctgcagcaaacccttctaactttttcccttcatgcttcattttaacttcattggggcaaagacaagagactgattcacccttgtcatttccggaggcttcagatggactagggacggacacatctgctttcgcaagttcatcacgctttctcttttgttgtgaattcacctgtggacgagggcgtagcactttctttataactttcctcaccacttttttcttcttagcaaccttgcgagagccattatcagagccaactttagtatcatgtttattattaatttcagcacattcggaagactttttcaattcggtctttttaaccaatcgattggacacacttgaatgagcttgtgtgctagtatcacgcgtattcttaacaccagaagaagccactccttctgactgtgtcgtgtccttcttgtgagaagatctatcgttcccaacatccatatttgcagtagtatcacagaatttactaagctctggatttgaacaatccttatcagataaagaatctttcctaaatttcaaatctctactggtcaaatcggcaccagtaacattggaagagctcgatggtaccacaattgccttagctaccagtgaattagatttaaaagaaacgtcaagctctactgggcttccctctctttcttcttcttcttcttcttcttcatacacatattgatctttgcgcctgaaagaactggagttagaattgtcatgataaccagtataatgcgattgctcactatccacattcctgtgattagactttccttttgaagacgaagtaaagcactcttcttctgtaactgcttcctcggagtacgattaaattcatgggcatcttccctgcttcccctactattgtaccttcccaattctggaccaaaatactcacgtttcacggagccaacatgagccccttcgccattattaacctcagagtttcctttctcaaaagaggaattatgggattctctggaaaattttcgatcgtgaacccttctttggttgtcatgacaaacaccctctcttctactaccactcctgtatatatcattactataagaagagccgtaccggggattataactctccgattccaaatccatatccctcactgacaaactaggattagacgcgaaccctacatcgcgaaaagaaggaccaggactcgacaaaaagctacctcggcgagaatattcatcctcttctaaaccccttgaaagttcatctctatgctttgattcaaatccatcaacatattctgctctaaacctagaaatgccctcagaagcatgtctcaatttgctgttcatattatacggagacaaaggtttgtggtcgagctgaaacttctgagaaccgcggtcgaaatccagtggcgtgtgtggcctctcagtcatagtttcggccaaaaccctcggttgctcccataattcttgccggatttccggttcaaattcggccaaacgatgcctagggcggtcatcctcaaagtctaattgcctcgaaacgttagccgagatggagtaatcgcgatgaaggtacggtgatctggctaagtcgtcttcaaaacaagtacgatcatgattaggattagcgaaagatgattgagattgtccaggactgtaaggatgcatctgcggagggtgataggccgcagacgatgattgtggcggcggcggaggcggaggtaggggttgaaacgaaggcatttggtgtcgtggtggtggtggtggtggtggtggcagaggctgagactgagggtgaggtcgtggaatatggtgatgacgttgttgataacgagggttgttgaaattggggtcgtcggggtagtgagaacgagaagagttgggaactgaaacgtacctggacttttgctggtggttgtgatgatggtggttctggtagtgatggtgagagttcggaagatccattgcaccagatcttgattgttgagcagtggtttctgttttgggttttagcagtagccagaagaagaagaaagaagaagaagaagaagaagttgtttcgtttcttctttcttagaagttattattagtggtagtatttggtcttcctttctttattgataagtcaataatgttccattctttctctcttttatttcttcttctttttttttttttttattctttttaattaaataagtcctttttttttcactttttcaattattattaattcttgcttgcttaattatgattcttgtctctaaattttgatgctgttaaaaatttaaactatttagattaacacaaattttaattatcatattaattttagctacaatatcttttcactaaaaataaaactactattttacctaattttgtagaggtaatcattctttaacttttaaattaaactcacttcctaataaaaatattattcgggacttatttaatgccacttcaataaatgtaacaatttttaaaaagctagtgcatattataatgtttaatatctttttaccctaaatattattttagattctaaattttgtaaaagctataaattagactctattaatgacaatttaaatcttatattttataaaataatacaaaataaacattgaacttaaattttccttatttttttaatataactaatctaaaactagtttttagtacaaataaatacaaaaatatataactatttttgtcataacacttttagattaggttgttattaaattttaatttgacaaaaattgagatcagtgtctatttcatacaattttaataaatataggattcgagttgtcatttaacaaaacagaataacaaatcggttggagatgcaaaaattgatctatatttggtccaaataaaataatagtcttgtgacattttttgcatcaacttttattattatgctccaatacataattgtcaatcttgatgcaaaatttaatgtcatttaatgttcatctaataatttattaaaaatataaaatattaataatcatacaaaattaaatataaatttaatattaattatgaaagttatttaatgtaaatgagcatgctaactaaattttaataataaaatattaaaatagtataatagtaaatataaaatcatagataatcatagtatttattgtgatgtaaataattttgtatcatgctatattgtgatctaaatttagatcactttttattatgtgagatatatgcattaaaatttgacgcactattggagtagactttaaaaagtgaactatattttgcatttgtatcaattatttgcattttcattaaaaatgctctaacatttactaaatacatagtttaaaatagtatttgtttttttaatgtaacattgtatattatacttataacaaatatacttccaaaaatttggattaaactcattgtttaaataatttattttagacatatatataaaatataaataattaatcatcttattttatataatttgaatagggataatttagggaattttttcaaaatacatttttattatgttttatttacattgttacattataacatttttatttacaaaaatatatttataaagctttagaattataaaatagggatatttacggcataaataccatacgttttcagttttatacacttaaataccacatgttttttttcgacggattaaataccttaagttacatttccgttacttccgtcactacttttctgttaaatcatattcaaacatagagtatttgcggcataaatacttgatgttttaaatttcatacacttatataccacatgttttttcttttagcgtattaaatacctaaagttacgtttatgctacttttgtcattatcaattcgttaaattctattaaaatagactaagttgacacctgtcaacatattagtggtccactaatatat

SEQ ID NO: 296601 - DNA, 5563 bp, Cannabis indica
tattattattattaaattttatgcttttcagaatataatagtaaaattcttttaaaaacaaagaactgaaaagaacctttgctctttcggtgtgacgaaactctcattttctttatttctaactagaaacctagtgattcaaacgccagtagtaactggatagtaatccattcaagagggacaacttaaggtaaggattagttttcgttttaagttgaaaagattagttttgtaagttcactttgtggtatagagtagttatgggaattgtgacttcatgaaactatttctgattgatatggatttagttttgatgtttacttattgaatttgagatggttttgaggtagaaattgagtttgattttttaaatctcaaacttaagctttaatggcactttccatttaaggaatcattttttattttggtcacgttgggactattgtatgggtgatatatttgtgtgctatgaagtttggaataatttggataggtttcggtggtgttttagagagtgtaaaacttaggatatacgtttgttgtagaaaatagtctgccgtttgggggaaaacggctagccgtttcctgctaggagacctagagaaaatgattagttgtttgctaaaacggcaggtcatttctgatagtgttttttaaccccattttttgtattttctcggaattttaagtagggataccgtagtgacctgtagggaattcttgggaatgaatttttagacctggaataaggttagattacttggttaatcattcttttattgttatgatatagggtccaggactgtcgatcgttctccaagtaggtcaaccaacatacctaaactgaaacttcatgtaagaatagtataatgtacgacatggcatgaaatatctcttgattgttaattgtcgatcaggcaatgacaatgtgattcatgggctcacctaattaggtgatgcgatatattggtgctaggttagggcacaaactcgcttgattaggcaatgtgatatattggtgttaggttatgtcacgtgctcacttgattaggtgatgcaatatattaatgccaggttagggcacatgctcgcttgattaggagatgcgatatattggtaccaggttattacatgggctcacctgcttaggtgatgcgataatgtgatatatggtgctagactatggtatgggtttgtctaattagacaatgcaatatatgattacttcattttttctatatatgtgattatttatattatataatcgttagaatgttattaattattttatgacggtaaaatggataatgaatgattacatgtacttcttttattacttttcttgtggagtccttgtgactcacgggtgctctgtggtgcaggtaaggacaagaaaaagttagagcagccatgaggcgacagttttcttcgacgaatgtacatattgatcctattggcttatgtaccaagtttccaacagttattttgggttgtatgtgctctgtattttaacttgttgttgtatatagtccttttgtcaaactttcataacaggaatccccggaacaaagttttagtgttgttgtgttgtttattacttgggtttaataattaattaatctattatcactaaaataattataaaatcacacacattgcgtccttatagattagggtgctataacttagtatcagagcagccatggttttaaaggtccttaagactggtggaatatgtacacttgctacaaagataggtcaaatcattgtatagtaagtgtttatattaattgatattgaatcacctacctagactattataaagcatgttgggaaagtaatataaccaagattgtgataagaatatgtgtgtgacatatgcatattgatatgatatctagttgaattctgaatggtttgaagttttagatcgcaagtgcattagatcatgcagcagggatctagccattttaatagtgagctggggttcaaggtaggtggggagggagagcatcctccacctccttagaattggagacaaatgtttgcttccaagcatgagataattaggtagaaagggagcagatttgagacttgagagaggaacaagctcatcctccaccaatattggcacctctggtagtgcagccaaaaatgggatattgtatggagctgatatataagcagtttaggaaacaaaatcctcctgtctttgaggatggtccagacccactaaaggtagaacagtgaatgagttacctatatctttgactttatgtgagtcgaggataatgaccaagtacgatgtgatatttacatgttatgtgatgatgctcggatatggtgggagaatgtttctcaagctcataacttgaataccatgacttcggatgaattttgggtattttatgagaagtattataacgattctatttatgctacctaagcaaaagagtttgcatggttagtttagggtagcatgactgcaactgaatatgctaccaaatttgacaggctggccaagtttacttctaatgaactggccactaaagctgcatgaaaagccaagtttattataggcctggaagagtatatttccagggatcatgttatgacagctaaacaatcaagggttgtgaagacctatcctcaaattgtgtatttagctctcactgatgagggggttgaaggcttaatttgtaaaaagagtaatcagaggaaggatgcatggaagataccctctagtactggaatgagcgagggctccaacccttatgatcgaaaaaggaaaccaaataaaccatcgattatgggttcaaacagaagattttagggtaaccaaggtttctgtcgaggcaaaaacgaagcttggccttcataccctgaatgtccaaggtgcaagaaatgctaattgtgaatttcggtccatagcttgcttcttatgtggagtagtaggtcattttagaaataatttcctacggttatagaagcatgagacgaagaaagagagccatatggttcttcctagggtatttgctttgacccaggtagatccagaggctggtccttcgactgttacaggtgagatttctattgggggtattatgttcactattttgatagatttggatgccacatattcgtatatatctagtagaattattgagaaattgagtagaccttgtaatatcatgtctattggatttggtaccttgttacctactagggaagtggtaatctccaggaggtgggtaagatctcttccagtgttaggttaaggaagagaattttcagtggatctgattgaactagatttagaggattttgatgcaatcctgggaatggattggttaaccaagtacaatgctaccatatattgtaagagaaagatggtgacatttgaactagagggttaaaccccttttgtttttatgagaaagattttgggatctcgaattccaatgatatcggcactcaagacaagggaattattgggagaaggatgtatgggatacctagttattgtaatagatatcacagaggatacaccagagggaccggagaaggttcaggtagtatgtgaatttctggatgtatttctggaagatttactggaattaccacccaagagagagattgatttgagattgaatttgtaccagaggttgaacaagtttctaaggcttcgtatagaatgccaccggtagaattgaagtaattgaaagttcaattacataacttgatttgtggtttacgaggccgagtacttctccttagggttcactagttttatatatcaagaagaaggaaagatcattgtgtatgtgcactaattgtcgagagttgaaaaagttgataataaagaacaaatatcctttgccgaggatagatgatttgtttgatcagttacatggaaagaccatcttctccaagattgaccttcgatctagttatcactagttgaggattcgggaagaggatgttcccaaagctgctttttatactcgatatgttcactacgagtttttagtaatgtcctttggcttgattaatgcaccaacaaaattcatggacttgatgaattgagtgttgaaggactttctcaataactttgtgattgtgtttatcaatgatattcttgtttattctaaatcagaggaagtgcctgagcaacacctttgcatggtactaaaacatctctgagagcacaagctttactcaaagtttaagaagtttgaattctagtggtcccaagtgagtttcttaggacatgtggtaaggaagagattttaatagattgggtaaagattgaagctgttcaggattggccacgacctaagacaacaactgaagtcaaaagtttctttgggttggctgtgtattattgaagatttgtggaatattttgccaagattgctactcttttgacagagatgacctaagagaattgtaagtttgtgcggattgataaatgtgaaaacaacttccaggagttacagaagagattaattaccgcaccaattctgagtttgtcaatcagcgacaagaagtttgtgatatactgtgatgccttaagacaaggcttgtgttgcgtgttaatgcaatgagggaaggtcattgcctatgcctctaactagttgaaagattttgagcaatgctaccccactcatgacctagaactgacagcagtagtttttgccatgaaaatttagcgtcactacttatatggtgaaaagtgtgagatttataccgatcataaaagtttgaagtacttcttcactcaaaaggatctgaatatgagacaatgaagatggtttgagttggtcaaggattatgattgtaaaatcctctatcatcctagtgaagcaaatatagtggcagattggcttagtctgaaagggcaagggtagatctatgaattgaagaaaatttctacaaatctggttgaagatatggctagggcagagattaagtttgtggtcaggaaattggaaaatattacactacaatctgatctactagaaaggaaaaagattggcaaacagagtgatcctaaattaaatgaactcaaaaagaaagttgcgactagtactataaaggatttcactgtaactctaagttgactattgaagtatgaggatagagtttgtattatgataaatgatcagatcaggaaggaaatccttgattagtttcatactactccgtattccctacacctgggaacaacaaaaatgtatcatgatgtcaatattggtggctgagagtgaagagtgatatcgttggatttttctcgaagtgtttactgtcaatagatgaaagttgaacatcaaaggctagcaagtttacttcagcctttgagaatacctgaatgaaagtgggaagacataatcatggaatttatagtagggttacctaagactactagactacatgattccatatgggtggtgatggacagattgaccatgtcagcgcacttcttgcctctacgagtgacctatattgtggactagtatgtggatttgtacattaaggaaatagtaagactccatggtgcttc

SEQ ID NO: 296602 - DNA, 2211 bp, Cannabis indica
attaataaaattatttttcctaaattcttccccgaatttattttttaattaaataatattatgtagatatttcttttattaaacataaatagtaattctttttaactttttggtgtaattgtattcttggtgtaacatgtaattaaatttaacccttttttaatgtataagatctataatgcaattagacagagatattttagtaaatattaaaaaataatcgaaattatactcaaataagtatgtttaattttatgctggtttatgagatagaagataatattttggtgttactcatggtggttaagtgtatgcgtgtggggtggggacaaagttcaattcttgattgttaattttttttttttttgaaaatggcattagttaaactggacgaatataaatttaaacagaatcaaaataatataacattccctcactattataattagttaggattgttcttttttatatataagtcaaaagctaatcaaagtcatttccaaatcagtaagttttgttaagaggtagcaaatattttcctaatcatgactaagttggcatgaaaattggattttagccagcaaaaccataagatgacatgacagaagaaaagggaagataaatatcataaagctaataatgaaaatatcttcttattgccctttcaattggccaaaacttttgggtcacgcagcttaggggggctactcatgaaaaataaaaatgttaaaagaagctcaagggcctagcaagctgagtgtaaagttggcaaacaccaaacacaatatacacaactcatataaacatatataaagctaaattgtatgatcatattggtggtggggtatcctattgtttagtattagacattgtagggttcgatgaagatgatggaagaaagtatttacatcttaaagtagtgcttcattcattcatccatcgaaagagacctatatagattatatatcttttctttttgctatataatttcttgattttaaaacaaatctcaaccacatcttaattgagtcctactaaataaacaaaaattatttgttttggtaaaagaaaaaaaaagagagagcacatgttcaatagcacaaggattcctcctattattagcggtggcaacccaactcacttatattatattcgtagtagaaatatttatacacaaaatttttgtagcgtcaatttttcaatgttacaaaccaaattaaccattaacatcagttttagaatatgttaattcattaaccaaactcattttaaactgacgttaatggtcttctatatttatttttattttttaaaaaaagacaatgttagataaattctcatataagctgttgatcaattacactaactaaagctctcagattctttccagatcagcaaaagattacatcagcgtctttttcaaccaactctcactaactaattacaacaaaaaacagttacagactactcaagctcagatcgagcttgctactactgcagaagctttataaagacctaaactccaagttctgagacttacgaatccaatattctgtatcaacaagagagagtagagagataaggcctccgtgccattgttgttcatgtaaaagagagaacataaaaagtattaagattgataaggtgaagtgtgtgttagttagagttagttagtgagctgtctaatttagttaggagttagttatgtaacaaacttctttctcttagcttcacactctgttttctggtgtatataaataatgtattgttcttcaatggagttaatgagaattcattcatttttcatgtctcaattgttccatttatgttatggtatcaaagccacgtgattcgtgagctcattgttctttgttcttccgcttctacttctaaatttttctcttcattctgtcctctgatctgccatggcaagggcaagaagtactcgaactcgaagcactactcgtggagcttcagatcatggaaattgttattctgttcttgatcaagaagatagattacgtcctaatattgatcctcgcagtccatattttctttctaatgctgataatccatcagctacactggtgccaaaaattctcacaggagtagagaattatagctcgtagagatgttcaatgatagttgttcttctggccagaaataaagttgaaaaaccgtgtttttgcaaatgtcagttgtatataagaa

SEQ ID NO: 296603 - DNA, 2508 bp, Cannabis indica
aacaacatttaaatgatagttgtaattatgatcaccaattcaacattgatattttataaaaggagcccgaatgctattttcttccaaatactttcgagatatattttgtgtaaataatttaaaagacaattttaaaattaaattcgagagaaatccctgtacaaaatattcagacattttcatacacgcccattaaaaaagggaaatatctttttacaaagtgagaatacatgacgatctcatcagttatataatgaaagacaagtaatacgatcactgatcatataatagcacgcattattagcacatatagtagtgtttagtcacaaaattacaaaaacaaacgatatatcaacactaagacatttacacatatatctagtattcatgtatataggcagtacggttatatgttttcatatatcacaatgcatgatccatatgcaaagataccaacaaaaccaaccagtagatcggttagaatcaatagtactatatatggtaaccaatgcacataccaagagataagaatggaagccatattaatcagaacagagatagcataaagatgatgagtatggtggtgataaccaaccagaacacattgatgaagaaagcctccggagcagcacatgggtggggagttgaacgagggtctgcgccacgggggtggactaggacatggagcttcaggcccattcggcagtgtccttggcggccacacacgaagtacctccttccttgttggttgagcttcaccactgtgttcccatcgttgtgggttttgattgggtgtgagatcacacatgcatcgtaatcctctcgcttcacttccaccacgtcgtggaccggagtgtacgagaatactaccccatacattatataaatatgtgtatatatatatataaatggtaacaattcagaactcactaagatattaattggacgatattttcatcggttaaattttctcacaagcaggtgatgaagtataatttgaagacttcatctaaaaatttctcgagaaccaaacactaggcataagttcataaagcgctatgaatattacaataatatatatatacgcgtacctagagaatcgccgacgtgaaatatagtgttggcagtccaagcttcgaggtttgagttaaggtcccaatcgatggagtgatttgcagttgcagcagccgatacacaacggaacagaatcgatccgagtagtatgaagacaatcgccgccttcacagtcgattgcggtctcaatccctccattctatgtattgatctgtatatatacattatattaaccaataatcaattgaataattaaagtaactttctgccacattctcaagaaaaattaagtatcacctgattgaagactaaggtggctgaacccaattagcagtctagcagagtaacacttgaaattagaagaagctagaatatttgtatacataagaagagaggagagagagagaccatcaatgcgcatgagacgcgtgcttttcacaatccgagttcatctcagcgttgcctatttcgttcgcgcgcactcctcttagtaacgggctagtgccagctcaacttaaatcaactaaatgttatgggtcaccttcaaaaactactccatgtattgccattggcttaattcaataataagtcctatacattttcgtttaataaataactaaaaaataataaatattaattaaataataaattagtatcaaataattttaaatttatttttatgtatatttttttttaatttatttaaaaaatatacacttattgagaaaatgataaatttatataaaacactttattaaaaaaaatatatatcatacaacttcttatataaataaaaaatcacctttggtcaaaaagtttattagaaaaagcaaggatgaggtagatttaatgtccctaaatatagcttcatctttgggttagctatccaagataagctaaaaaaaaaaagattgcatcgttttaatgtaattgatgacccacattatgttttctgtaaggtgcaaattgaaaatttggaacatttgttctttacttgttcgttagccaacattgcctataggaattgaagtcttggctcgactggaaagccaactctcaatcgttacaaaatcttattcgatagattgacagagctaaattttctaagtttaagaaatgggttttctcagctgccttagcatctttggtatatcatatttggcgagttagaaatgagaaaatttggtttgatgtttcattatatatagaaggaatcaatcatagaataaagtcggatgttaaaactaaaatttgttgcatttggcctaggaaggttgggcatagtgatacaaaatggtattctttttgtaaacggtgaatgtttatgtatagagaaagtgatatttagatcttcttgtgaagatgctattaggttgtaatgtatatgctttggagtaataaatatactgctgattcataaaaaaaaaataaaaa

SEQ ID NO: 296604 - DNA, 5069 bp, Cannabis indica
agagagagagaggtgtggacccatccaccgcccatgagcacgcagtcctaccgaaacaaaacccatcctcgatctatttttctcaaatctaaccctaacccaacacttaacagctaatagaagacaaaggaaaaggtagagaaaaaataagaagaagaagaagaaacccccaaaatcatcatcatatttttcttctccaaataccagaaaagaaattaacatcaagatccaatcatgatgatgattatagtactggtggtggaagatcggtcatgacacatcaaaatctgctacctcaactatctctccttctttattaattttactactactacctagctatagttgattttgttcttgatcaaattaatcattcatatatatataaaaatggatgcccattctcttccaccaccattccacacaagagattttcacttccaccaacaacaattccagcaacaacacaactctgaagatgaacaaacaggaagcagcataaacaacctcatggccaaaaccccaaagagagatcgcggaggagaagaagacaacgacagtggcggagaccactccggaggcaaagacctagtctccggctcaggagacgaccaagacaagatgatgtcaaggaggccaagaggaagaccagccggatccaaaaacaagcccaaacctccaatcatcatcacccgcgacagcgccaacgctctccgcactcacgtcatggagatcgccgacggctgcgacatagtcgacagtgtcgccaccttcgcccgccgccgccaacgcggagtctgcattatgagcggcaccggcactgtcaccaacgtcactcttcgccagcctgcttctccgggtgctattgtcaccttgcacggtcgttttgagatcttgtctcttgcagggagttttcttccgccaccggctccgcctgcggctaccggactgactatttacttggctggtggacaaggtcaggtagttgggggaagcgttgtggggactcttattgcttctgggccggtggttgttatggctgcttcgtttagtaacgcagcctatgaaaggttgccgttggaggacgaagaagctgctatgccaatgccaggtggcggcggcggaggagggagtcttgggtctcctacaggtggcggagttgggcagaatccgcagttaatgacgggggcggatcagcaggcgaactctagtggtggtggtggtggtggaccaccaggtatgtttcatgggctgccccctaatctactcaattctattcaaatgccatctgaggcttattgggccactggtagaccacctttctaatttagtaactcacaacttcaactactacaactatatatatacatacatatggatagatagattatctatatatatacatatatgagttgatctcatcctcttcttctactccattttttcatcatcatatcatatatggccttcttctttccaagagtaaaattatgcatatatctagctatatatatgtgtatgtgtatgtaagaagtagtagtagagaggagtttcattgggaatgtcgagcgcgcgatcgagaaagttgaagcttaatatgattattattattatttcaggtttttaaaaaacaaaaacaagatttttgtactctttttcattttgttttttggggtttagtttcgtttctcattttgatgacaagtttcagcttgttgattgatgaaggactttttgtatatttcatgatgaatttattatatatgtcgaattagattatttagagtactactattctctcaaactttattgtatgttaattagctttgctacctccaatgaattattgtttatttcttttacttcttgttggattatatttatacgtgccatagtttatatgagaatattaactagttgataatcatcttcatgtcataaaataaaactcgtgtctaattattataacagataataattggttaaattgttctccttaattcgatcgacaaggctaagcgctataaatatatatttctatatattcaaatacataatgatgtgccgaactaattatatactcatccatgtatatacattcacggagactgaaaaaattaacttatgtgtaattaatacttttggctctcaattaattaatgtatataattttattgaagaacggagttaaattactttacatttctgttcattttattttctgataaattcattacttttatggcgccattgtcatgttttatatatcatatgcaattgtctctatctattatgaaccatttttaattgttgaccatgataattattgtagttatttatatatgtatttgtctagtacagtgatttattaatgacatataatgcatagtaagaactaggtaaatgtaagtatatatcatatatatcataaacgtgatgtaattataattagtttacatatataattttaacattcatatagtttttgatatatccacattattgggatgtttatgtgtgtataatatatgatccttaatataatgtgataattatctatatatatatttgaactggtgaattcatctaatggtggttatattgcctatggtatatattacgtggaagaacagtgattatttgattattgtgtgtgtgcatatagagagaaaaagcaacgagatatgggcttgattagatgttctccatatgtaggtgttttgttgtgcaataagagaaggaagaagagagattttgaactacgtgaaatgtgtatgtatatatataaatatataagagtgtatgtatgcatatgtaggatatatatggagacatgaaaatatttgggtactggtatacacgtgcactgctctgatgaaagctcctttacgaggcaaacaacatctaacaacaacacttccattaaaagcccacaacacatgtatatatgtatatatgtatgtatatatatatgtgtatataatgtgtttctttcgatctcagaagcttttgaagaagtatcatgaatgaattaagtcccttatctaactacgtgtgtatctttatttagatcttgggttcagagaatcaagctattgggcagctgtatctcaaattagctagtcccactcgatcccacacacacagcttactcatattcatttcatacatctattcttaaattctcttacttcctttttttatcttcttttattttttggaaaaggattatatattctcttactttaacgaaatatatttatatatattattacttaatatatgtggtgtgtacaaccttatataatgtgaacttatctattattcttgtgtggggacagatatatatatatatatatactatataaatatatatctagaaaataaatattttgtacaaatttggtataagacaaagattgatgtaatctatagtatataacaatttttttcactcgtttacaaacaataaagaaataagacatcaccaactcatcatgtaaaataataaataatatatttttcagtgtagaactcttgcaatgtatgtatatgtacataaatttattattgttattgtttttactttatttgattcgtggtcactcaacaaaaaaaatattaattcaaatatatatatatataaataaatattactgcatcgcaatgtatcgcaaatgcgattagaagtacgtaggaaaatgtaattataataacattacattttcccacaatgttgtgtttttgtggtagttttagagcttttattattggtaataattggctaactaattattaataataattaattagaatactatttttgaaacccaacggttttattttaaaaaaggtttagttatacatacattaatgattgatctagctactatatatgttgtcattattttagcatcattattaatttctttgtcaacttgctgctttttatatcaatatttttattattattactactactaataatcattgaatggcatcaagaatgtatatagtacagacttatcataattatgaaaataacgaataataacactttatagatataaacagaaatttatataaaaataaattaagcccaacaagttaataacaactgcttcatgactaatgagtaactagaataataataataaaaaaaaattaaaagaaaaaaataaaaaacacaaactagatatttatctattttcaatttcctatgtttttctttttctctatacagataaatatacaaactgaatagaagctaccacgagaaagggtcacacctagttgaaaatctacaccacgagacaataatcatagtaatttcatcaacaagaagttttggcttgcggtgtgtaaaacaatcaaaactaataaatataatcactactataaaacggaaatggactagctgataaagacaaagctaggtaagaactacagctgatcaataatcaataatcgattcgtaggcgtatcagctcggcgatgaaagtggggctggaagacagtgttctttgtgcaagattcctaatgtcttctcgtggacaatctcgtgaaatgcgcaccaactcccacagagctcctccaattatcatgtctttagagtttacttctgtagagaaaaacgcagaggtgcaactagtttcagcaaagatggtggcttttagttcatagtgaaataagtaaaaaagaagaaaactttaccatgttgtgccaagtgacatagtgcaagttcaatatggcgcctaatggccgaggcttcattgtttgcgttttgtacaatccatggcagcgctccatcctcgattagaagagactttccagtcttggttcctgaatgattttaaaacaagcataattcattcattagaatctgacttttttttttgttttgtttttatcaaaatggcatttaggtggcgtttggttggaggtaatgaaatggaatgaaagcgatctcccttccattcctttgttttgttgcatattaaagtgttaaaatgtcattctaatgaaattgcctttccactattttggtggaatgacaattccattttgaa

SEQ ID NO: 296605 - DNA, 1964 bp, Cannabis indica
taccatttcataaaaataataataactacaaacacttaagattgtatcatcaatataatgtcaaagctgtactaaaaacaaatctaaaataataattaaaaaaatatataaaactgataaaatacatatttgtgttttctagtatctttcttattctcttcattcttcatcttcaaaatgattagtgttgaatcttagaagcttctttgttctacaaaacttgatgagaaaataccaaccaattccaccaattgtcataacaccactaattaaataaacaatttttgtagctatggccataaccaatatcaaaaatgctgaaggaaccaaacacatcacaatcaatccaaacaaccccattggaaccttaaatggtctacctaattgaggaaactttctccttagccaaacaaaagaagcaaattcaagcaacattcccaaactatacaagaaatttgctgcagcaattattacctcaaaatccatatatgccattcccaaaactatcccaactgagaccaatattccaaatagaggagtgttgaatttcttcgaacggtactcgaaaatcttgggtaaaactccaatttccgccataccaagtatttggtatgagctactacttaattgggcttggaagagcccaattgctgacaacactgctccaatttctatccatattttgagccaattcccggctataatgtttgcagcctcagcatgaaaaccagttgtccataaattttgatcgaccgaaactgagcctgttactgcgaaaagagggattaagtaggataaacatgtcaataacaccgctacgaatagtgctttcggaaaagtcttgtgagggttttcaacttcgccggctaaagttgaaacactgtcaaaaaaattaaggttccaaaataatgtattgatgtataaaccccaatctttcttcacacccttttgccctaaactaatccaccttacgggcttgattttgggaatggcaaaacatattattagcacaaatggtgctattgatactaaggctaagatcacagctacatagccaactattgtgataccaatatagttaattagggctagaattataatcatgccgaaaatcactacatagcgaggccaacccgaatccaaaataggaaaaagcctttctaaataatccacacataaaattggaaaggcggcgatattaatgacaacacttaagaacttccaagttcccatcatagaaccccagaagggtccaaaggcttgttgagcccatataacaaaccctccattacctggataggcagtggagagttcagccgttactagggcttcggggatgctccatatgaaaggaaacactaaaaagcctattagggcaaatagtgggcccgctgcctgcacagcgggctcttcaccgaagggccctccggccacttcgaagtagatgaggaatatgagagggagtagagtgagtttcttttggggtggttcggttatagttgttgttggtaaaagatcattaattgatgatgacattgatattgatgatgttgttttgatctttgcattgttggattcgtttgttggtgtaacaatctccattgtttggttttttgagagaacaattaataattaataatgactaatgactaataagaattttagcttcgaaaagtatgtatttatagaattaagtagatgatagagtttgagtaggattaggtttaggaatatttaatttgatttttttaattttatctttttttaataattaagttaataataaaatattattttgaccttatttaattcaaaatagctccatatataatcggataaattaaccattaaatatattaatagaaataatattaacaaatcaaactatataaaactcttcactgatattaatttcaaaaaaaaaaaactacttcggtcgataagaaactgataataacaaatta

SEQ ID NO: 296606 - DNA, 8916 bp, Cannabis indica
aacacctaaaaatggatggaaagggctaagtgctaacagaacttggatttaggaggttttaccacccaaattttagaattgggggttagttgtaaaaacttggtcacttaaggaggttatgccgcaaattacccttcttagaattttagcggagttaagtaaagaattgtatgtgtctatttataggcacacatggggcaaatggcacaccctttatgtacctaggatttcgtaccccatacacttattaaggtttgtactgcgagaggacgatctgaacattggctagtaggaaccttcttcatcgtgtggtgtacaactgcttgtaaggacttttgtacgatcttggacacgtgtcgtagaaaggtctgtcctttgtgaaatagtctctaaccaggtcgctgggcaaaaagcatacttgagggtgcgtacgcgaccatgatcttacacgggggacaagatttgatccagtgtcagaaaaaggtgtaactgtctacggagtgatattttgcaagaagctgacgtggccaacatctctaagacccttattgttttccaggctccttattgagggaagttactcccaaaggccatcgcatctcattgccttcctagtcgaggagtcattctttttcttgattacctcgaatagtccgtgcatcaaccgtatcctcctcgctaattatgctacgtgtctgattgatgaaaacttggataacatttacccccaagcttttgagatcatttggatcacgaatgcttgctattgtcactagtgttgatcgttgacacgtgttgtaggtttaggttgcggacacacctccacatgagttgtattctactgagggtatataagacatttgcttccttttgcgtggtaacaacgcgccatgtcacgaagtatttctttcccctttttgtgtgtggcaaggtgcgctgaacaaaaaaggtggagtggcacctgagttatatgcagaaagggaccttgacattttggtgggccctaggccaatcgtacaggagcttcacctccccagtcattggatttgttgcaaacattttgaagtgttgatctttcatagtcttgtcttctttttgaaatctaaaccgcctttggggtggcattttttactctttttattcaaaactacatgctctacaacttcttttttcccttttctgtcatcttttgcatgcaagaagaattagaagatctgatccaacgattactcgttttccacaagaaactcttcttagacatcgctcctcttcgactggaccagagaagttcttcctcaaggggaacatttaatttttatcgttgcatcgactggctctagagctttcaagcaggctttatggacacgccacttatcccttctaattcgacaagtaagtgcattaaccccctatttgaattttttggcctttcacgtttagggcaaggaggttcttgcttgcgttagggctaggattgtttgcctgctgtataacaggatagtgtgtgtgaaagaaagcccgtcttcacccattcattgtttcaaaggaatttccttttccttcatagccatggatttaaacgaagacccccttgcaagcacaaccatatctgtcgagggtgaacctatcccaattgtagtaaggttttctgtgtgacaggatcaaaccgaggttctcatgttaacacctcaacttgaggaggccttggaaaccattccaaaaaataaacccatcactgaatgagacctccctgtggggaataggagaggtgaaggggttgaaattccttcgccggtgtaggtttgtcctgagtccatatgggaaatggatgagaaagccaacagctttcgatcttatggaatgttgcaagcatattcttaggttgtcagcctccgtaatttccatggactgttgtggcacaagctttccgtcatgggagaatctgcatccattaatgttgatgggtttagtgcatggagttcgtcccaaatttctagtggggctcaccttcccttaagaacctatttgcagacctagttgcgaaaattgggatttcacccttccagttgatttcttcatcattaaggctcttggcttggtggtacgtattctacaaaatcaataaacttgaggttcctccccggaggagatcctttatttttatagtgtcaaggccaaccctatgaggacagataggtcaaagctggggttcttctgactggataaatgcttggactcttacttccctgtttgcaaaacggatcgcactcatgacccccaagaaaaatggttcttttcctccaggtttcctactagcaaggtgtcatctcttcagttaagcttccaactcccaggtattctaatgatttatcttaagttttgcttgcttttaaactttgccaatttctatacttggactaacacttttttatttgtagtagagcttccctcacaaagggttaggacggaggagataatcaagaaagaagtccgatatagggccttctcggaagatcaattgaaggttggggacctggtgactactaaactcctccgtacgtcaggcttgattacaaaattttagagtatttacacagttagcctctgagggcagcgccaacctcccaaggaagtgaaggaagcaatgccaccgatttggctattataataacaactacagccaaaaacgacaatgccctacactctaattggatgtctcgccatcccgatcctttgcctaaggaaaatgagatccaagagagatttctcgctgcttacctagatgtggggacactaggtgctagtactttaggaagagataatggacccttccacatcctgtgtccctccacacttctcaactcacttggggggtatcatgcctatccatctgtgccccaaaaaaaacgtactgtgtgctgtaattcgttattattttctttatttttcaatatctataatttttgcttaaactaagatgcattttcaaccaaattcctttaaaaggaaaatagcttgaattccttcttaaagctagaataaacacactcaatgaaagaagaagcatttttagccaaaattccctgaaacgggaaatactcatctgaattccttctcaagagctttcaaaaagagttgtataaaaatttgatacggttaaggcttcgcttaaactcttatagacttcggctttatcctgaccaggaaaatgccatctaaagtctatagcatgtgaaattgaccttcttaaattataaaaacgcctaaacggtcgtaacatatcaagcctccatgatcatgcagtaatttaggaacagcctagaaaaccattcgtattttcagtaccaacaggaggcaggcacttcctaagtacctcctaggtcagcagagggatacaaggttgaccaatgtcaaaggtttaaagcgatggccattggaaccacacgcttctaaacagcctaagaagacagctcttaaaataactatacaggccaatattgaaagctaaaggttgaaaatagtacgaaatattagagtcaaaacatggtgcctcgcataaaggcaaacaaaggtgttcttgaagagaagtgtcacatagagccccgtggaccaggctaaagtaaatacaactccgcgacaaaaaaagaataaaaattgttttaaaggaaaagataggcgacaagaaataaaggtgacccctattgatcttgggtaggagaaggtgctactgagtcgattagggctgggacattagttggctcctctggatctgggttaggctcagcaacgtctcgaacatggtcctccttaacctcgctggaagacaccttagctttagcaaactcttgagaacttgagacttcaacacttgtttcttcatcgctgtcactatcatttgagagaggaaactccttgatataggtgttatatttcatagcgagtactctcctagtaacattctccttatctgcctcgtcaataagctaaagtatggaaggatttgccttccataagttgtgaaggaccacaacataggacatcttcaaggaacgaaggtgatctttctccgccttagctactgccttagttgttgctgtaactgcatcctgaatgagttggaggcagtctccctcattctacgcatggcagctaaagcaatgtatgcattcataccgtttgttggactccagtcgactttattttgtaatctatcaatggtttcctatcgacgatcacagttacgacatgccccttgagaagaaggctgagatggccatgttgtgttatcaaggactccgccagtttcttctccttgtcgtgttcgacttgaaggtccttgatgagtaagtccttcttacagatgtcctcttggaagttgttgacttgatggattggggtggagatagtctgagactgagtagcatgcgggcctcgactatttctttctccttcgtggccttggctaagtcctctcgaagggagcgtacagtaccctcgacttcttgctcagttttagctttgtgatcccaatacatctgcagtatttggtgtcccacttctcttcctccacagccagcttggccttccagtcttcctaggtctcgatctgctcaactttagcatgaaggccacattttttatggtcaaggactgaattgtggcgcggagctagtttaattctatggtcatattccccacttctttggcagtctactttataaacaatgtcatctagagaaaggaaagtagagagaaattattaggcattctttggtaataaattttttatcgcaagtgagaataaatcagaaaattaaggcttacccctgcaacctgctgtttggcggccactgataaagtgtatggatcaacactactgctcactgcccacttctttgatgtaagcttgctcacactaaggctcatgttgtccaatatttctacagcataaggggcaatgactctgcccaccttaggtatctgattttggctcactgcaatcagatctaacacaaggcagggggacaaaggttggcggactccctcagttgtctcagctgtcttgatagaagacagccaggtagctcgcttctgaagatttacctgttctcgctcatgctgcttctacaaaatgccagcctttgtgaggtactcgtggccaagaatagatagcctcatggggaaggagaatcataatgaaggagccctaccctttacagtgggttagggtgagtcagcaaagcttggcctaggcgttgtgttctcgggaaggtgttgcgatgtaggagactgagatgccacaatcagtaattgatgaggagataaagatcactgctgttgcgccagaggcactctcctagattgtgattgcattggctgttgttgttgttgttgttgttgctgttattatggtggttgatattgttgttgttgtagttgttgctgttgttgttgttggtggtggtgttattgttgttgttgcggtggttgttgttgtagttgttgttggtggtgttgttgtggcaatggcaagttggtggacggtacatcagatgcccctaggtctgggaccgaagacttgaccctctttgcaccgagactaggggaagtctttgatcccttgtgtttagacttagcttgagtcccctttgggggaaagacaagtcggtccaggttgtcattagaaccccccgcgtttggtgtggtgtctgggattatctctcctgtagggggaataatttaagaagaccgctctcctggagcggcaagaacctcagaggcttttcgggggtgccaggtcccttctccccactagttgaagcagaatggcctgacgcagtaagtccaatcttgatgggaggaggaatctctcggacatctgatgatgaggatgttgagggggaatgcagtttctgagtccttgaagccatggtcttattctttctcttgccttcttcctgtgatttcctggcctctccatggcagctgagatttggttattctaagacttcaacattgcagattccgatatatctgaacacaagacgacaatacgagtaaacaagaggagcaattgcaagtcatgcaatcataagaaaaaatagcaacaacaagaagctaaaatgcgtgggtgcagccattcaataaagtaccttagggttgtctacgagcaaaagctaaaatgctcctatgaccattgaagctgtcatattcgttaaatttaggaagagacataacaatcaaagggtctactttgataatgtccaaagtagtccccaggtttctagggctcataaaaaatgtaaagtgtaaattcaaatgtaaactatttttgttctcattgcatgatgcctgagggccattcgtacaaaatttaattacatagatttttacacaaaacattccaaatgttgtcaaagcctggtttcctctgcctgttggtagtatcggcgtaaatgatctgcattcaaggcgtgagggaccctcgattcatccatccttttcaactgaaaagtcccttgtcccattttctcgagtatctcataggggccttcctagtttgggccaagtacccccactcccaattcttgtgaagatgggattactcttcttagaacaagatcaccaacatcgaatgtacgacttttcacctttgcgttaaagtatcgggcgatctttccttggtacattttgagttggacttgcgactgttcctggagctcttcaattaagtctagcaactcttagagcagggagtggttgtgggagggtcgtaagtatatcgtcgatggaatgggactgtggtctctaccgggatcactgcttcgcacccataggccattgcatatggcatgtgccccgttgaagttctttctattattctataggctcaaagaacttgagggagttcctctagccaatgggccttgcaagcctgaagcttcttattcaacgtggtcttgaggattttattgacgacctccacttttctattggcttgtggccaggctacagctgagaagcttttcacgattccgtgctaattatagaagttagtgaagcgctcactatcgaactgcttcctgttgttcgacccaatcttataggggagtacgtacctacacacaattttttgacaacaaaatccaacgccttcttagaagtaataatattcgtaggttcagcttcgacctgcttggttaagtagtcaactgagacaatttcatacttgactccgcctttacccgtgaggagggatcctaccaaatcaattccccagaatgcaaaaggccatgggctgctcatcaatgcaattttggttggtggtgcacgcgggactttaccatatctctgacactatttgtacttcctcacatattccgtacaatctttcttcatggtgggccaaaaataccctttccgaaggatttcttggaaaggctaggcccaaaagtgtgatctcaacaaaaaccttcatggagcttatggatcactacgctaatctctgtcccaacgatacacctcaaatatcgcattgaaaaccccctgcaatatagcttctcatctgttgacctcgctttttgtcattgacagtgagtcatttattaagcgattagaaaaataataaaaatagggtaaaaaccaataagtaataaagaacaccaaattttgaagaggttcgggcccgttagtatggtaatagcctactccccttagattttattaacttcagaacaaagaacacattgttttctcacaaagctcttacaatgaaatctctgagtaattctcttagatctctctctgaagcaattccttcgatccctttcatagtgagactagatcactatttatagggccttaatgcatgagggaaagtttcccttttgcttacaatgtataaactaggaaagaatatttattacataattatgctacactaaataggaaattggaagaagttgttgtattcccatgactcaatcccacaattgtaggcattgtcttcgtgcttggacttcacgatatcattctgaagtagccaagtcttaatgagttgctcggaaagccaaacccattcctactctaataatcttccttcctgctcgggtaattagaggttatacgtgcagatgtgttacatgaagtctgttcgagatattcatctcttcctagatgtaagaaatgcaggaaacgtctcactcatgtattctgccacgtcatagtgcaaaaaatgggataatatttgcccctaagtctgcgcgggacccttgtggtcgcacgtggacttcactcggtctggatccttatctgaacgagtgacacgtgttcgtagtgtcggttgatgatccaatgtgactctaactaagagtctttttagtttttagcccattaatgctgattgacatgtacctcaagccacaccttaaaattagcacgttttgatggttattcttcaggtaattgagtgcacaacgtacacttttgaggggaaatcaaggtatttaaattttgaaatgattactttgcctcactaattagcttaaaaatagggttgaagaccttaatcaaccacttttagccatttttgttctcgaagaataagagcaagaaatctttttttctcaatcctttgaagaatccccaggaaacaccgaacagcgtcatccaaacaaatctcaagcttcgaacagtttgtaagttctttgtttctttcctcttatttgtttgaatattttattttcattcttgaacttgttctaggaaaaccatagaaaacttagctttaggactgtaaaatctttacgtcccttgattatagtcacgtcttactttcaattccacgatatttaatttcgcttacccattcggggcttagtgaaaattaacccctaattcgtaattttgaaattctgg

SEQ ID NO: 296607 - DNA, 1002 bp, Cannabis indica
cactaaagaatcagagaaagagatccatgttcagatattgataatgctctgactacaaaaaggaatcaagggctagatatctgaacggaaggagtcattatattccgctgcacccaatgtaatgtttactaaactttatatgtgtttatttcatcgttttagaaagttcatatttaaggtgttaatcaacatacttgtgagtagatctaagatcctggtaaaataatatccaacaatgtattggtcaaaaattgatttcaatagacagtagttcagcataaaataaaaaatttctaccctcagtatgctcggaggcatcaccccgagaagggttgtaccaaatgttgcaatcattatctaaagaagaagagtcctcactttcaatggcattacccttgcccttgcacttaataattgttggacggacagtcctggcaggtgcagactcttgggtcctaatcacaactggggcctcattcaaagactccccccgctcaactctttttcaagcagctctctccctcttggtctctgattttttcttctcaaaaatgttattagagagagcctcggtctcagtgtatttcctcttggttcttgatttcttcttcgtagaaagtttatcaggtgaaccttgaggcttgcccggggaagagtagaggtcataattgttaacgaagatttttgttaactaaatttgagcctcacaatagtaatttcacatagaaaaataaaagctatagaaataaagatatgaacacaatattttttatgtgattttgcagttaaaattctacatagtccatgagtcaatcttatttctgattacttttttaggaactctttcgtatgagttttttcgtccctttttcgatcatctttgtcactatttataattacatagtggacaatgaattacaaagttgactgaaatatctttacaacaatcatccctaaaattgtgggatttgattacatatcacgtagtgtaaatgcggttta

SEQ ID NO: 296608 - DNA, 1835 bp, Cannabis indica
ttttatcccactttttattttttccaatgtaaaaagtgggataaaaagtcctttttgttgtagtgtaatttcaagagaacttcacaactctaaaagaaaaaagcttagaatttcactcaaagagcttgttccaaaatttatctattatgaccacactattagtagattatagttaatcatgaatatatatgcattcttttaatgataaattctataattaaaattaaacatttgtgatataatttcaatcttgacctcgtttaacattactcgtaaaaaattaaaatagaaaaagatggtacaaaagtattttcactttagacatgaaatttaccatacttcagaaaacgccaccgtcttgccgaccatttctcactttaatgattcaaataccaaataagattcccaaccaatcacattccacaaacccactgagctgacggcgttcccacgataaccccacgcgctttccaaaccaaaactcttcttcccactgtgcaacacacgctcctaggttgagagtaggattacaaactcccacactctcttggtggacccacctgatcgcacgtgtaatataaggaggtgccactgccgacgctctctctttctctctctcttcacataaagcttttcgcctttgctgaagaacataacagaaacaaagaacaggttttttctttttcctatttaacttcttaaatttttatacaataattaaagggatgagtggatttgatttgttataacgcgttattgttcatgaatttttaaaggtttagtcatcatctatctctgttctctttctgttctaggtttgaatttgttcatgtcatgtcattttcattctctcttatttatttatttattttttttaattcattataaacagaagaaccctttgaagacttgatgatccatgttatcattttgaaacttttttttagtgataacaattgcaaagttgaatttttttcccaagatctttcattcccaagatattgtataatgaacatgttttttgttcaagtaccaagtttactgactcagaattctggtggaacactctgtgctgtaaatttataaagatagatcatcttatggcagaaagacaagacactgtttcactagatgttaaacaaacaaaattaggccatgttagaatggtatggactatggaccacaaagggttattcaaacaagattattcaataactctaagaaactgtcccaattctgacatttctcttatctcttttgtttcttctttgagaaaaaaaacacatggtcatcatcttcattctagttaaaataaaacagaaataaaaaaaaaaagaaagaaagaagaaagacagtgctttcactgagtctcatcacttcgtttaattttcttttttagtgctttgaaaaaacaatgcacactagtggtggttacacagcacaagtgacatgcttatctcctaatgcaactgagaaggatgtttatgatttcttctctcactgtggtacaattgagcatgttgaaatcatcaggtagagtccattatccatactcttaattactcataaacaattattgtcattatagctcactacactctttgttttgtttttgttcagaagctatttcatatgaaatcaatcttgttttacttagtctttactacaagttcaaaatcttgcaacttatgtcatgattaattttttagctaatgatgtaaatgaagttactttgcttctttgttcggaatttggactacaattaatctggttttgataagcataatgaccccacttcgtaagctaaatggtctgtcaggatgcatttgatgact

SEQ ID NO: 296609 - DNA, 2851 bp, Cannabis indica
aaaacaaaagttttaccaaacgacaccttatttttacataattagtttttgtgtgttatttttaattttgattgctttacaaaactaatttttctgtctcagatttttatctaattaattgacgtaaccagtttctttgtgtcatattctaacgtccaagttcaacatccaactccggtaacaataaaaatttcgatgactttttcaatgccaatgacaactccagtgacttttcgatgacttttccgatgacgatgacaaattttagtgatttttcctgcaaggatgaaaaattccaacaaaattttcgacgatggtgactgtttcgacgaattttccagcaacgatgactgtcctagtgccttttccgataatatttattattagaaatcttatcaactttatttatgattttttatttagtttccctaactttaaaaacttttttatttttagtcttatatcttttttaattattttttatgacatataaaaaagtaaactttttttttccatatttataaaaaattaccaaccccataagcaaattactccaaaatcgtcacgaaaaaaaaggccaaaatattattacttggttgatttttgcttctctaatgccattgacaacatctttgaggatgctgatgaagggtgtagctcctattccaagaccaatcagcacaaccatatcatacttgacatggtcttgggaggcagctccataaggcccatcgatgtatattttagggtacttctttcccccagatagtgttgcctggaaaacttcaagagtgagcatttttttttattattattaaaaaaaagattcttctcttagcttcagtgaaattactgcttattacctcttggaaaatactatatattgtataactccagtcacctagagttcttatatgcacacttaaatagtcatcttctggtcctgaagttagtgagaatggatgcctgagataacgaaaaggagtgatcattggaaacaattcaaaaatttcaaatcaaatgcatatttctatagaaaccttcaataacagaagtaagaatattaggctatacttgacaagaaggcatctagatattaccattcaaatggtgatatttgagggcattgaatgaatatgtacatgccactctggtacctaaatccttctggtttctgcaacttgagggacaaaacttttcctggataaaaacttgcctgcatttttgggttaccccattacagaactgattgtcatttcatatggtaacaacagatgagttttcaaattttctgaaggaagaggattgtttgtcaaccttcaaaatttgaacctcacagctgcttgatcttatggctctgaggatccgttctccggtgtatatagcaattggaatggaaatgtacatccatgtctactcaggaaaaaatgagtgaaacaatgtacttatgtatttgagagtaaattttctcattgacaaagttgaatgaaataattagaaaaagatctcactgttttttcagccgcatcatctgttaggaataggaacatggagtggataataagtaaggcatacacaggaatgaataagtggtgagagtaccaaaaagtgttgtatccagtgacatgtcgaactgtccttggtagcaatggcgactggcgtcgtggccacttagttgctagtgaaaatgaaatggccattagcactaccataacaatccctgttgccacctctgtggtggctaatatctctaggtatgatggttggtggtacccgaatccggctgctattgtctgttggaaaactgaattgttggatttactaattcttgggaaatcacaaccaagatgagtgccaccatgaagaatcactcccaccacaatccctcctgcaatcaactgtactcaactagcatgttttagcataaagctttagtgatcaaatcttcattttctttttcaatgatgtaaaaatttagaaaattgaagttgcatatctacttgtacataatatatatttacatcaaatgctatgggaatcaaagtatgtttatgggaagctgatagatttactcagtactttcaaaaaggacaattaccttgtggaagttgatattgtcgttgaagggaataactgagttgatccttgggttactcctaagccatgtgattgtattacgacaaacagggaggaggatgagagccatgttgaatttcaatgtctcggctgcacctttggcagtggaaacacagtatcccataacttcaaaagctgctctatgccgatattggatgaatttccatgtgaacagaataatgcaaacaacaatccaaaacaacactatccatgctcttctccaatatgacctgaataaaatttcagcttttgaggtttgcgttgttaaagggtcatgagttttttgtgtcactgatgattgcttagccggtagtgtgccatttctcaagctcactctgaatagtgtttcaaattcttgtaactgtgaaaaaagttatgatcctgatcaaaataaacaaggtaaagtgatttgaacatgaaaatgcatgcatggttttatgtatgtatacctcaatgtagcctctattttttatgtcaagaaattccataaccagagaagcatagtcttctgcttcctcatgcgtgagagacaatttatttgtacacgcacttagtaaaacagtctgcatattaatccaactaagtaatctataacccaactttgtaagaaagtaaaaatattattaaaggccaataaaatatattaattagaccttaggtgctatttagtaacacttatggtttataaattttttaatcacaaaataaaaaaaaa

SEQ ID NO: 296610 - DNA, 2542 bp, Cannabis indica
ccctccacttctttctcctcttaaacgtatatatatacacaccaccactctctacaactctttcatttcatttctctctctctctctctctttcttctctacaacaccaacctttcaaaccctaacttcggatgcgaacctcaacctcctcccatggctactactgttcgaagatttctccctcgtcacttctccgttgacgtaactttttctatctttcaacctttttcttgttcttgatatgtatgtaattctattctattctgatctgatcttcatttctgtttgattcggttttgctctgttgcagagaactagccggatcttttcgttatctggacttaaacaaggtttgtgctgattttctttatgaatgcgtgttgtaatggttttaaaagattttagcacaagttcagttctgtttgtaattgcttgaattgtgttgaatttttgagttgaagtgtaattgtgtacgatgttttttgttcttatgatatcttgagaaatttaggattgggaggaagttgtaggagttatggcgtgattggttcttcagaaaatttgtcattgaaatttgaagatagaagtagtgatagttcatttgaagcagaaggtgtcgttcttgatgacgaagtacagaagattcgttgtgtatttgatgctgccaagaagagtttcctcagtacttcggaggctcttgcgtcattgccgaagatgcatcctgaagcgtttaagtcattgccacagatgaatccagaaggtttgttaatgttttcttgcgttcttggatagatgcttatagttaattagttaatcagcttttaaactattatgttgactggtgttacttattgatattagggatttatgtaaataagaatttgagattggacaacattcaagtttatggctttgactatgactacacattggcacattactctaaaaatttacagagcttaatctacgatcttgcaaaggagcatatggttaatgaggttcgttttttttttctttttgaatatatatatatgctaaacaaaaagttttgatctacattgtgtatatgattgaatgtaccattgcttgtggtttttcagttacgatatcctgacatttgcatggaattcaaatatgatccaacttttcccatcagaggattgtactatgataagctaaaaggatgtcttctcaagttggacttctttgggtcaatcgagccagatggatgctactttggtcgtcagaaggtacttaaacttccaatatatattcgggttgtctagttctggatctgggtttggttgtgaaacaactgctaatcaatgtttaccagttaaatcttcacttggatatacacaatgagaatatataaggcatctaatatgagatttcagcaatgacctccaaattgaaccttgataaatttggggtctgttctccaaatctgacatcttctacaagtggctttatcatcaaatctaattgtcgaagttcctttcaagaaacctttcctattttggatggttgttaagttcggttagcttttatagtcttaccaaatttagtaagttggctctgtataaaatgcaagaaggaaaaaatgccttgtgagttagattagctttaacattcaaaagaaagaagatcaaagcgagagtttacagaacctaagagtgatgtcattgcttggctatgaaattttgttgacactaaaattgtcttttagcatttgtaagtaacatttatcgtgatcactcatttagctttaatttttaactttgtcttaaattagagtaagatgttaaacaaaattattgatgatgcatcgccagtgaagtttgctagttaattttatatcttaaattgtcacattcaacaataatttttttgcattaatcaattgaggtattatcctttggtgtgattgttaatttgtcattttctatgttgcagcttagcagaaaggaaatagtggaagtttacggaacacgacatatcggtcgtgaccaagcacgaggtcttgttggcttgatggacttcttttgctttagcgaggttagtttattatttttatatgttaccgatcgatatctgccgaatcttactctaagaagttgcacatgtacagtgtaaaattaccacatggaacatttgtttctgcaatatgtgtaacaggagctaggacccaggactctagatggagttaaaagctcattacacaattcagggtccaatgaatattaaattgcagaattcttaattatgccaagatcaagtgcaactcatattcctagtgccagtgaactgttttgtttttaataattgctatgtaaaatacttgattaactatctgatacgaacttacacacctcccttacaggcacaagagtttagtaaagtaagtgaatactgagttggatttgtttgaaactatttgtttgtcaaatattttagttgagttggtctttgtgaggcaggggaagacattttttaacaagagaaacattattattctacaaaaaaataaaaataaaagtaa

SEQ ID NO: 296611 - DNA, 3811 bp, Cannabis indica
gtaaaagtaaaaaaaaaaaaagaacccaatttgtgtgtggtgacctttagcaaagaaaaaacaaaacattttgtttgttaagtgttgatttttaactaatgtgaatagaactatatagatgtatgacatttccagtctcttataaaagaaacaaaatactattttgtattttgttttatgctacagcataaagacaagttcaatcagaacccttttatttattttattaattttcttttgtcaaaagaagagatattggtaataatttgatttcatgatccctattcagattttggcaccattactttcttcacatgttaactctgtttgcccaaaaaaaaaacaacaaaacatgttaagattaaagctaactttaatttgctttgaagtacaggtttaagggtaactgtcaaggaaggtattgaacacatcaaagatccaaaatttacttcccaaatatcaaatactcaaaaggacattacaacaccaatcacaactgttccaacattaactccaatcaatcccacaacttcttccataccaattatgaacccgaattcgaatccagattcgagctctcctgttaccatgacacctacactgaatccaagtaccactactactaccactgctgcaacccctggttcttcaggtgcaagttggtgtgtttcaagtccaagtgtgtcacaaacttcattacaagttgctttagactatgcttgtggatttggtggtgctgattgctctgcaattcagcctggtggaagttgttataacccgaataatattcgagatcatgcttcttatgcattcaatagttattaccagaagaacccagttccaaatagctgtaattttgctggaactgctgttatcactagcactaatccaagtgagatttcttcttatactctactctactatgctatgctttttattttttgtcctagtcttaaaaagaaaaacttgtttgggataaatccatgatatgttttccacaagggttaataccattttggatcatgtgttttacaaaaattactaatcaggttttctattttattaaataataaatttgactctgtattttttaaatagtacaaaatagtattgtgttcaatttttaaccatttttttttaaatataactaatttgaagacggtatctattcatgaacaaatttgtcgtaatatccctagatcgacttattgttaaattttattttaataaaaaattagcttaagtactattttgtaaaattttaaaaaatacatagcctaatttatcatttaacaaaatagaagatctaattgttaacttttatataacacgatctaaaatagtatttacctaaaaaaaatagaaaacaaaattatgagatgatgtctagttattattttcatctgtcattcagtccatttttccggaattagaggatgtgtctaattaattatactataatagtgtgaaatagaacaaaaaaaaagtgacatttgaaaaattcaaccatgatgccagaaattatccacttgagagtggcataaaaagtcaaggttcctatatgtttataatgtagagatccctatacccaatttcaacactcttttcttcttattataacacctttttttcttatgtttttcctgttgaccaggtacaggaacatgtcaattcccatccactaggtaacacttggttataattttacctaataccaatcatgtgatgtgagtaagaaaagaaaatgacttgtttattaaaatgttggaattgcagcactagttcttcagtgttaaacacaacaaattcaagtggctcaacagtgtttggtgcagtaccatctggtcccccaccaccacccacatctgcagctcacccaagtactagtttctcacatttgttcatcatcacatgtttctttctgtttttacccaaataatagtcacaacaagtaaaaaaacaaaaaatgaccatttctactatttttgggacttatttttgtgcatattgaggaatcatttctggggtcttgagataattaactgaagaagacagacatgtttttgaagcctttagattcctccattattcaaagattgattttttacacctataaatggggagagaaatagagagagacagatcatatagaaacatatgttgggttctttgtagattttaaccatagtgcttcttcttgtcttgtaaattttatgcattattgtaatgttgtatcttcattattaaacttggttttgaaaggtttctaaaccactaaagtgaatgtttttttgtgtgttagacaaagtgtatatacaataatacaagaatatttttatattgaataatattaaagtataattaaagtataattaatcaaaggttcctatatatattaaattattcaactttcctagttctatcccactttatccacatgttcaactatgaattatcattattcaaatgtctgttttgagagtcttatgcaataatagtttctatcttataagttgattatgatgttttattcttaaaaaatatatatatatcataattaaagacatggtttaagattttagatcttatctgcttataaaagttgtcaatcagcgagtcttttaaaagatatttataattgtggataggttgcattatatatgaaacttttgcataattttattctattgcttcacttaacaattattgtcgttctaatctcttttttgccccacatctgttattttcaatccaatttttacagaagattccttataaccatatgccgattggattgaaaatatgaacttcaccctcgtgtccatctattttaatcgaaaatatattttataatttgaaatatgtatgtaggaaattcaatttcagaattgcccctaccccaactaaacccaagtcttagaaaccaaggtcaattaagacttattgcaacaaaacccttttggaccaaattcacaccctcaaaacaacattgtgtaacctttgatataaaatcaaaggtacaaagaatcaagaacacttttgattcaaacacaaaaccctagccaacgagtctttgtcttcttcttaagcccaactctaagcttcgaatcctaatctcacgaacttgcaaaacccaaacacaaatagagccaaacaacaacaaagatctagatttgatctttgttggtaagagataaacacaaatacacagagagatttgatctcgaagtttatctccaaaaataagattacgtctctatcaagctcgccttagagatgcttgaacatgcactgtcaacattgaagggttacaataacaatggtggatcttggaacaacccaattcttgtcaaacctataatgacaaattggagctgtgtggcttgatcttaggcacacttgacagatgactcgttgttgattgtatcgtggatagcccttcccacggccagatgaggattgcggaaggtcagattgtaaattcttggaagtggcaaatggtcgaacaccaccagatctactatttccaaatgtaagattggcttgcattttaatagcaatatcagacatgttctggtgatgttccaacctactctcatgagatagaagtagggtttgtacttcttcaatggtcaaggcatcacttcttgatgtaataccagatacaatcgagttaaattctgggccaaggccattaaggaactggagaactagatcttgatcattgacaggggaaccagtcagggcatcaaaaatggattaaaccttgtcagcatactcagagatggagagatttcttttttgaacattg

SEQ ID NO: 296612 - DNA, 1377 bp, Cannabis indica
ctcttgtctgtatctaatttttaatcaatttaaaacaaataataatggtacttttttttaaaaaaaaaaaaaaagataatggacttcacttgactattaaagatgataaatatatatataatggcatatatttaaaatattatattggaagttaggtacaattagtagtgaatactaatctaatctaattcccacaattcaatctaattttttttagaaagaaacttttattaaccaacagcaaaaacaaactacatcaagaccaatttatcagaaacaaagaaactattcaaatcagatggaaacttgtcctcccaaacagaattacaattggaaattatagccaacttggcaagaatatgagcagttttattgttgccacgggaggaatgaaaaacaaccagcacaaggacggaacaatctgccatccaacaaatcatctaatagggcgctccaatgggtctaacaatgagccctctgcttcaaatagtcaatcagattggcacaatctgtagttaagaaaaaagagtgaacattgagtttttgacacaattcaagacccaatttaatagccaacccctcagccaccaacaccgagcaaacacccttcctataggcacagcagcgcctaaaatctgcccattctttgggaagcaagatcaatagcagcatcacagttgagtaacaaggtttcatcatcaacctttgaccaaaataaagctttacccgaggaagaagaagtggcagcagctgtagttggaatatgaacttgatgataatccacctgctcgattgcccacaacatccattgagtgatgggagcaacactatgttgaaaacatttcttattcctcctgaaccaaaccagccaagataaagtgacaaatctttcaaaacaaatgttgggttgggtttcatgaatttgctgcaagaaatcccatggttcaagatgctgtttggggaataagtgataccaacctgtgtgtttccggagaggacggagggcaggacaaagccaaagagcgtggaaaatggtctccattaggtaaccataactgctgcaatccgttggaaacaatagccccctatgagccagattggctttaatagggagccaattccaacacaacttcaaatttttcttttttactttcagactaacccccaagttccaaataaacttccaccagctctcaaccttttcataggaagggcactttgtatctgtttgaaataatgtgatcactttatacccacttcgcacagtgtagatgccattagaggaaaattccaaacgagatcgtcctccaaattacacttacttggcacaaccccaaaacccagggaacatctgttggaattatcttaccaggatct

SEQ ID NO: 296613 - DNA, 4209 bp, Cannabis indica
ttttgtaacactttgacataattttctttcactcaaaaagccttgttcaaaccgccactctctctctctaccttctccgtttttcgaaatcctctaagtgatagagtagtgcccgcaaacatcaagtaatacctcaatcatagtgaggaaggctgtgtagaattcagaatcaacaaagaaggacattcgggctcagatcttgattatactctgcgacagaaaggaatcaagggttagagatctgagtgggaggagacatatattccgctgcacccaatgtaagatttctctttacttttatgtgtttaatttttcattgttttaaaagttcatatttaggttgttaaatcaacatacttgtgaatagatctaagatcctggtaaaaataattccaacactttcttgtaaacacgggcaggaggccaagagtggtaaactgaattccaggcatgatcaaccaccaacttactcctctcatccctcatccatttttcttcaaacttaaaacatcttttaaacctagcatctaggccatttgaaagaatacacaaaggtctatgatcagagttgctcgtctgggaggagcaaagaatagctttaggaaacaaattgagctaggccccattaacgagacctccttccagactggtggttatcccacgtcaacttgtcaccctaaataggcaaattaataaggccccgagagtcaactaaattagagatgttgggattaactggtcccttccggtggacccttcacgctctaaatcactaagaacaaaatttgtatctcctagaatcaaccaagggccaccaaacttatccccaattttcataaattcagtccaaaaaaatttttcaacatggagataaggagggccatacacacaagagagaagtcaaggatgggagggggatctgagtaaataaggcctcagatatgattgcgagaactaaaaatacactgaaaactaaatgcatccttctaggccaaaataatgcctcaagcggcaccaataggcagcacaaaaatgttaaaataaaaatgtagggatttaagtgtacgtactagaggagcaacatcaacttttagttcggttaggaagataaaattaggagagtgtgatctgatcagggacttcaattccaaaactatagaggtctgccctaaccctctacagttccaagcaatacctctcatggctcctgtggaggagatgcgacattctcctccacaggggtacaaaagtgaacggacatgctagagcaagaatcttcaatcaaaaacgagccaaccaccgagttcttcaaaacgcaatcaatgcgagttgatgaaaaagagatatcatcatagggttcttcaacgacaaccttagactcatgctcctgctccgtggagtcccatgggaagtcgcaaattacaccggggtgcattcgaagtaatttttgaagtcttgagcataaagaacaagaagactcaagtaatttccttttcttaaatggagtagttctttcattagttttagaagtaggcatgacaccaatatcacccccgaattgtcgtatctcatacaaatccaagctcccaaatcgtttaagttcttgcagtatggtctcttaggcttgaaaaaaaacaagaacgtgcccttttctcatcaagacacgagtgcatcgcttatccacaaacaaattcatcagtagggcctttagagccaatcaaatcaatatgtcctgacaggattgggccttagcaagtgacccgcccacacaggtattaccacactccagatttttatccacacaggttaacaccacaggcccaccatcatcattagtattagaattaggccctataggagatacagccagccccacagcactagtgttaacaatatcaattacccgtacaagtccaactggcccattggaatcaacactcgcgcccacaccaactgaaacccttaagtcaatatccatttccttcgaaccaatcaggggagagccatgcacaggcccattctcaggatttatatttagtccaggcctaataagaggagcagccggcccacacgaaatagacacttgacccaattcattgaccgcctcggagtgatttaaattttttgaacaatttgctttgtccaaagagtggtcagaagcatgtcgccccaaactagaaagaatagcaggacctttaatcgtctccttagccacaacacgaaccacagtaccataaatagcaactggagttgtactaccaccaagcagcgacttgggaacccacacgccatgctttgacttccctataggcacaggagaaagaccagtcactttcttgacatgcctcggggtgcgaactgccttggaacccactcgcaccgtacctctgactccatcaccagccaccaccggagttgtagaaccatggaaacaattaggagtagacaacaaagaggatgcacagataggaaagaatgaatttgcacctgagaacatatcaagatacgaagaagaagttgacagccccggtccaaacaaggggaagggaataccatttttgttctcaaccgtgactgcagaagagaggccacaacctttttcatttgtggcccaaacagaaataattgtagcagaagatacgtaatttctcaaacttgaactgaatccatttcttaacctcaaacaccaagtcaaaaaagcaactcgagtacaacggtttggcaatatcaatctccaccaaaaccttgagatacttactccgaaaggtcgggttttcttcatttaaatccacacgcaaaaccttaccagccaggcctctcaataaattgccattagactaggaaaattattcatgaggtaggttgtgaatctaagtccacagtatcaaactagtaaagtgaattttcccttcatctctcggagaccaagcctgaagaactaaagtataaccccttatgcaccagggaccattctccaacgcccagtttctatccttagcaaggtcaaagccaaattcaaaacagttagaattattggcctcctcaggtaaagcgaaaatagacataggtttatgccaagttttagccacaaagtcaatgacagtggcctcatccacaagcattggggccaccacttttccaaagagacaaaatgtagataaagccttgagagaggaggcactaggagttaaagtgacagaggcttcaaagcaagagaagtatttacccttactagggggttggtagcaataactacctccataaaaccaaacaaaaaggcaaagaaaccaacaaaaaagaggggacaaaaaggaaaagaaataaaacacacaactcccacaccacacgaggccaagaaatagaacacaccacaagctcaccacacccacacaacactacgcaccaacacagaaagccagcacaaaacccacaaccgaccaacaaaggacaaggaataaagaagagagacacatcagaagaagaacaaagaagaagaggacacaaaagacatcaaaagagacacactaaaggcaaggaaaacacaaagaaacggacaacaaaggagaagagaaccaaaacaatgaacaaggactaagaactaaggacgaacgatgaagagtgatctatataacataaaagtaaatcatcaatactttgaattctaaaccaatttagagtctttaaaaatacctctcatatatattgctaaaaatataaaaaataaataaataatgagaaaacgaagaaactaaaaggaaactcagataagatatcacatcattttctttgtgctttcttttatatatatctatgtatatatattgatattgatacattgatatgaaactcttataaaatttaaaaaataaaaataaaaaaatatagaaacatttttccattttcctttattaaggtaaagaaagaaaaattcatatttttatctccgatttgaccatttaaataatttaaattaaatttataaaaaaaaataataataacaaaaatactaaaataaaaaaaaaatcaatttgtataaatagttatgttctaatattctaaaattaaaacaacagaaaacataacgaaaaataaaaatatatatacatatgtataatcaagagtgttcaaatagtcatatatgacattgacaatcgctttttacaaataaaattttaacttttagagcaaataaaaattaaataaaatatt

SEQ ID NO: 296614 - DNA, 3983 bp, Cannabis indica
gctctctctctctctctctctctctctctctctctctccataacacagccaggtaagtaaccttaattttctgtaaattttttgttttcatttcaggtttgaagatcttttttttttatattatttacaactctttcttgtaagaatggacaactattgtgttatgtcgtaattttgggttttgggttttgttatttgcaggcaagagaaattaaagttcttcactttgattcagaacagtagctcaaatcacagaacaatggctatgaatttggttaataagtgttttcgtggtacgttaatttttataaattagctttatgttatgttactctaacttatgtggtgttaaggattagaaagctattctcaaacttagaattggtttaggttctttcgtgatcaaatagttgagtttaagctacttttaattgaagccttgaagggcttggtatggtactacttgagctgattgtgttcctgtatttaggctcctggaatttcttttttcccctattattaagtactgtggttccgatttgagcagaggatcatagagttgaaagattgtgattatgtctttcctcattgaattgttttccattatagctaatgtgattgtgttctgttgtggcttgagactttgtggtggaatatgatgattttaggggaagaaacatattttaactttgaatgcatcgagcgttttgtgaaaatagttatgaaattttttattagtaaaaaaacttttcagaaaaattaaaataaccatgtttggtcgccgagtgactaaaaattacactgtgcgaccataaaaccataaaacgaccaaaatggttggtttgtaatagtgcacaatgtaaattttatgttgttattgcaaatttaacaatttcatgttttacaaaacactcttgttctggcatatatatacgttttggatgctattaactatgctttgtgtatatcaggaactcagcttctttctcttccattccaacgccaagtcaacctgttcactttttcttcagctacagaagctcatctttcagatgaagatgtcaatgaaattccccaaactacctgtaacaccaatctatccgcagacgaaacacttgtcactgaaaaattacactttcttatcaaaagtcaccaccaaaagaatcctagtccagactctaatccctctcctccaaaccataacttcacaatcccagatctttctctcggtttctcccaagtatcagccctccattctatctcacctgctgttgttcgccgtgtggttgagaaatgtggtggggttcgccatggcatccctgtcctccaagctctggcgttcttcaactgggccactgcacttgacagtttcaatcactcgcccgagccatacaatgagatgatcgaccttgctgggaaggtgagacagtttgacattgcttggtacattattgatttgatgaaagctcgaaatgtggagatcactgttgagaccttagcaatccttgtgcggcgttatgttagggccggatttgctgcagaagcagtgcacgcctttaatcgtatggaggattatggttgcaagcctgataagattgctttctctgtagtgatcagtaatttgtgcaagaaaagaagagcaaatgaagctcaagcctttttcgatagcttaaaggacaagtttgaggttgatgttgttctatacacaaatttgattcatgggtggtgtcgttctggtaacattactgaagccgagaggattttcaaggagatgaaggtagcagggattaagcctaatgtgtatacttacaccatagtgattgacggtttgtgtagatgcgggcaaactactcgtgctcatgatgttttctcagagatgatcgacgttggttgccaaccaaactcaattactttcaataacttgatgcgtgttcatgtcaaggctggacgtaccgaaaaggttttgcaagtgtttaatcagatgaggaagcttcagtgccctgctgataccgttacatataattttcttatagagtgtcattgtaaggatgagaatctggacgaggctaataaggtacttaattcgatgattaagaaagggtgtaatccgaatgcatcaacttttaatccaatatttaggttgattgtgaggcttaaagatgtcaatggtgcccatcgaatgtatgcgaggatgaaggacttgaattgcaagcccaacactgtgacttacaatatattgatgcaaatgtttactgaattcaagtctactgatatggtgttgaagctgaaagcagaaatggaccaaaacgaagttgagcctaatgtgaatacatacaaggttctcattgtgatgttttgtgggatggggcattggaataatgcttacaagttctttagggagatgattgaagagaagtgtttgaaaccgagtctgtctctttacgaaatggtactgcagcagctaaggcaagccgggcagttacagaagcacgaagaattggtggagaagatggttgctaggggatttgttactcgtccattgtagtcataagcatacaattttttttcttcatagtgttgagctgtttttgtattctttttctttaattaaaaattttgttgtacttctgggttcattttgtacccaactcagatcctcttttataaaccccaaaacattgaaaatctctcttcatttctctcttatttgtactatgtatctcacacagtccactgattattctcactgagttcttccattacaactcgatagagattcaagggatttgagcttaagttttgggggtttaagtttaacagattagtttctaaattcatatttcttttggtgttatggcttcaaactgcagcaagtagtctagattatgaaaaatttcacgaagtttccaactattgtttttttttaacatggtgaatagagtcatacatgattaataaagcagcaaaccacaattaacggtagaacttcttcaaactataatagctcattgtctaatcgaatgttttgccaaactataagtttcagaatacttatcgcgagccacatgggacaaaactgtctccgaaaatttagacaatgaaattgtaatatctccaactattgtttcattgaatattttcaagtaaaagttttggatgacaggacttgctctttgttctcttttcagggttgaattgcttttatgattggcttgcttaaatgaaacgatactgaaaaaatggaaccaatgtaaaaaaatgagactggtacttctgaatcagggtcggttgcttgtaggccccttctacagcaagtgcttgttggacttccaccccagtttccccaagagggggttgtgtttccccaacagttggccagtggcggcagaaaacgaactttggtgggcgcaacacagttggcattttcttgtatgatacatagtgttagtatttggtgacagttcagaaagaggatttttttgatgtattcgtacaaaaaacagaaatgatcaaacatgttagcttaatgtacatataatgtaatgttttaatcattttgtttttgcattactaaagtctaaaaccaggttgcattacattatatggtgtaacaacaaggttactcagcatattgttctaccccagattgtagttttaggcgagaggtatgcaatgcatttatgtatggacgaattcatatcattatcgaagtttctcatttttactagtatgcaaatttccaatttttaaatctcccgcttcttctttatattcttctttgtttgactacaccccgattcgtaaacaacgagtcgcaggtattctggccgatccgaccaatagaaacgagttgttgttcatcgaacaagaatttaccaaatattataaacaagcttgggtggtggcaaacaatgcaacttgcgttgcgggagatgcccgcccgtaaaactattcaaataaaaaattggggaattaccccatat

SEQ ID NO: 296615 - DNA, 12346 bp, Cannabis indica
aataaatataaaattagaggtaaatctaattaattgatcaataaaagaggcatttttcaacttaccccttaaaattaatactaatatactcattaacctaaactaactcgaccaactcaattgaaaaatattttttatattaatatttatatttataaaaaataaaaaaattacactactatatttgtgttattattacaattttcttttaattgagcagttgaataaaatgtgaacagaacaaaccgagcataggatacatagaatcgaatggtaaaccccagccacgcctcgcccactctgctccggtgggttccaagctccaccaccaaccccttcaagctcttcattcagtccagtatatgatcagaggtgatttatggtccatataatgcctgttttgtttgcttatgtttttccattccatgtgccttgatgattgccctgcaagtgtttgataaaatgattcaaagaaactacacacttatttaaataaagaaaaaaaagttcaaactagctagtgatggagtttgctgactttttattaatttgtattatatatcttgcaatttgttttgtttgatttaattctgagcattttggtctgaattgtgacaaaatgaactagtaatgttagaatgaaaatttaattgagttaacaaaaatcaagagcttcttgatcttgatttgattaagatttgatccaattttgacagttaatgggccaatacttgtgagttgcaatgtttcacagacgagttcaaagcatttcatacctgtttgagctagtaacccaaaaaaactctttacaaaaactgactgctagtggtgaaatcgagcactcttatgttcggttctcaactgggtctactcttactgaggtgccccgaaagcttaagaggaacgagagaaagccattagttaaaacttttaatgaactcaaacgcgaggctagattgaagagaaaagaaagagatgatgtgaacgagataagcctacatcctcctcataacgggttgttagttaagggtttaatcccggttgctcacaaagttttggctgctagatccgagctagtgtcatgtgtttcgagggtagccagtagcattgctatatattcatgcaggtatgaaactatacttcatttttctatctgtagttagagatgcatagtccatattttcagttgggtcgggtttgagtttggcattggatattccaacatttcaatcttttggataggttgtgtgaagaggttcatgttggccatccaccccataaaattagaacatgtgatgttcccggtagcttaacaaacaaagtgcatacttggacaagagggggtgtagaacatgtattgcccgtcgttgaatcttttcatttgtatgaccgaataggaagagccgtttcacataacgaacggcttgaagtggataggatccctgcaattgttgaattgtgcattcaagctggggtggacatacccgagtaccctacaaggagaagaacctgccctgtttatagtgttgcaggtagaattatggatttcgagaagaagtttcctaaagaagaatctttaggagaagatatctatgcatatgggttctgggaaaagaaatcctcaacacatcataacaagtctatagagttcaattctgacaacttaaatggtatgctttcctctaaattttgcttatgtattggtttttaattgtcaactgatgttgttgtgattttgcagccattgctactcgaggaatgaaggcgtgggagacaatgcggtatgaaggatcgaaactcatggagaagtatgttgctcaaacttgtggatactgttcagaggttcaagttggtcctaaaggtcatcgagtaagggattgtcaagctttcaagcaccaaatgagggacgggcaacacgcatggcaggaggcaacaatcgatgacatagttcctcccgtgtatgtctggcatgttaaggacttcgaaagagaagagccgttagaacatagtttgagtaggtactatggtaaattaccagcggtggttgagctgtttgcgcgtgttggtgcacgtgtgggcgagcagtactcgtctttgatgagggaagatgttgcagtaccagaattagatgaattaaagttggttgtttaagcctaggctgcctttgctggtggaacatagtttgaagtttgattaagtgtagttgcttgtcatgtaagtaagtgtttttggtcaaaactttgtaaccttttcttcaattaatttattaaattttacaatctcataaataataagaaataaaatgtgtaattaaattcaacacgatttaagaagacaaccatgacttaattgcatcacaattaatttctaaatgcttactcaaaggtccaattttttccacttggattgaaaattattatagaaatgtttaatattggaaaataaataatgtcaattggtgttcaaaatttaaaattatgaaatatatgataatttacaaattatacaaactactaatgggtattcctttttcttattattggaatttatattaatagataaattggaagtagtttattatctcttatttatcaagcaaaattaacaataataggctaactaaatcgtctacaataattaagaattttcttttaaattacatttttaactaaatgatctataaaccgcgaacttcaaagtgtcaaaataatgcgaagaatattaaattttcatttcgaatgaacatgtgacatatcacatctattaatggcaagcaaaccaaaaatcttctaacaaaaattaggtaaaaacactccaatcgaactaaaataaaagagaataacatgacaaaccatattcaaaattgaaaatcgaagaatcaaagtgtcaaatgacaacacgaagaatctcgaaccaacctatacacccaaattcaaaaaaaaaaaaattggagatcaaacaagggtgtaacaacatcattaattaagatgttctaaattgtaaaagagttttaagatatataccatcataattactaattaagctttctaattagtaaactagatctcccaatggaaaaaggacctagtaaactagacatgaatagggagattaaataacaattttttatcatctatttactataataaagccaactcttctttttctttttcaaataaataaaaatagttttgacaattgttcttatataatatttactagttggagtattaaacttgtttggtaaggtataaaacatgcacaacagggtccatattctttatttatttacaagattaagatagaaaattagaaataaaaagtgccaaagtaaaaaaaaaaaaaagaaaaaatccattttggtgttgaatcatatcttaataaaatcagttaagaaagttggctataattgtaagtttattcaatgcagaatcctgatacaaattgaccatttactctacaagctcatctccttaggcaagctgatttcaagaaaatataagctgcaaaaacccgaaaaaatagaaaataacacacaatgagaaccctcaaactatatcgaaatctcgttctttcaaaggatggaaattatgttttcttaccttgctgacatgaaagccattcccaagaacaccgcctttatagattgcttttgccccgcatattcaaacgccaatggaagcatctcatgcagagttagaaaagccatcactccaccaactgttagagaaaaattgtaagaaaatccaagaatttatctcatgtttatgtgtttagtaattaaagcaagtcttatcatcatcatcatcactaacctgctccaagaaggccttcaagaatttcgggattcaagttgcttgggaaaagataggctgcaagtaaaggaaacaattatagaacgccctgagtaaggatcagccttgcttcgattcaaaaagaatttcacctacccacaattataacacccaaaggttcagcaaaaccagaaagtgttgccaatttgaatgcctgccatttgctgtgaaagattaacaaataagtaattttagtttattgaaaaaaaacagattataatatcacaattcaaaccaaaaacaatgaacatatcaacaacctcaaaacaaatttttggaaagtgaaatactttctagggagataccaacctatgattagtgtgtcgataactaataatgcaactcagcttacaaaatacataaactcacctttgagttgcaaagtaaactggaagtgcaaccgcaacgccctaaagaaaaacaagaggttaaagagaaagaaacacagtttgatgtgtcataaaacagtgagcaattcactttctgtacctcggggatgttgtgcaaagcgatcgccagggccaagttgacaccgacacgaagaccctataaagaattgtggggaaagaaataatcagatgatcataagcaatgcacacaacagaaaacacagaacagactaaagaatatgtttcccaccttcatggatccaaggaacactgccattccttctggaaaattgtgcaagcttattcctacaactcggaaatggtaaacaattcattatgtaggaataagtcagacttttattggatgagaagttgagaacttgaactatgatatttatccatcttaaagtgcaatataaattgctcaaatgaactaaataagcaatgtatgtttttaagttttatctataaaaattagggtaattagaatttttgtcccctgaacttttcaggccgttaaaaattctctttgaactattgcgattgttgaatttagggacttttatctaattttactaatcgaagtctgacgtggatgaaagttccgtggccacaatttgatacatgtcaaaactcgggaggtacgatattgcagatatcaaagttcagggggtacgatttggtaatagacaatcgttactttagtaaaattaaatccaacaatcacaatagttcgggaggaatttttaacggcctaaaaagttcgagaatatgatttgatatatgtcaaatttcgtaggataaaaatcctaattggcttaaaaattatagtaaatagcaaactcaacttcaattcaattccacagatttttcataatcaaacaagaaggccatacctattgctgtgacaattccactatataagacttgacgacgatgctttttcatgatatccttgccaccttcatccccatttttctgttctcaaaaacaatatctcccccatcaacatgtcttctacattaatttatattgcataacaaaagaaagaaagaaagaaagaaagaaaggaacctttttatctttcttatttggaacaggagcaagtgatggctctggaataaaattagcaatcacagcaaagaaaataacacccgaaaaaaactgtggagaaacaaagtagaatttaattacaactacaaacataaatagtttcacatgatttaagggtaaagtttagcagattatgttacccataagtttccttttaagaagccaatcgagtttatcgcgttgtgagctaaatccaagaatgatatgctcaacattagacctgcagcaaagccctgcacatacaacatttagagacaaacactgctgattttcgaactcttttttctgttttcaagaaagagaaagaggtcacttgtcttagactgattccttcccaagttttttgagaagccttacttatggcggaggaaaaccgtggtacaaagataacaacatagcaaagataaccttaacctcgctctctagtattcaattgctaaaattccattctacttagtttagttctgtattaattcactcttaatcttaaaatacaataaagacaagtgcctaattcaaaaactataagcttaaatgtgatgttataaacaaactaataagtaaactaaattcacctgaagaagcccaagcatcttcaaatttggagttggattgagaatcactaaaattgcacctgttccacaatgatatcaaaatcaaaattagattacaaaacacaacaaacaaccaataagaaaccattatcaggagattaaaaaactcaatttatacaaagtgggttttttcattatgctaaaaatggagactttactcgaatgaaaacacaaaaactagaaggtgcccatttagaaaattgtacaaaatcactgaattataacaacagaaatgatcccagaagagttgaattgggaaataaactgactgacctatagaagtactgagtcccccaacaagtgagagggccagagcaaccaagacctgagaatccattgtggtctatctagaaactcaaagatcagatttttagggaagaaggaatgttttaattgaacgtgttagacgtaatatatatgaaggctaaaagggaaaactagagagaaggtttaatgaagagaatttgtgtggttgaagaaagggaaagagatggtttggagtggtggtgttactctgatctccaccaattcctttccttgtgtttcttcttcgtcttcttcttcaatagacattagggtttgtttaatgaaactcatataatattatccctaaactttcatggaagtcacctgctacgccataacccatttcccatgccatctcttatttttaaagttttaatttttaatttttattttgtaaagtagatacatttaatttaatttaatttgatttaaatgggcatttgggatttaggtttcaattgtattttgctgaaatttagtggctttaattttcaaatttcagttcaatttctcttttttgggatacaatgtaaggtagcatcaaatcaaatcaatacaatgttattatgttaagttttgatcttttttggttgcaggagccaaaggatatggatatcttcattgcatttgagatttgcatcttttggatttaagtagtattcagtcaatactttactttccaatcccatgatgatcatttagtttttgttttatgtttcatgttcactattataatatgttaatgttattgtattatgaatgttaaagttttgatctttcttttgcaggagacaaaggatatgtataatgaggcttatgacagtatgtaactatatactatattatattatactatactcatcatgtaatgtgtttgctttcccttttcaatactttgagattcgcatctttacatacaattacatttgaaatttggattgaaacaaattagacatagataaaagttattatttaggattcctttagtactcgctattgtattgtattgtattaatattatttaatataatattatgtttggtattgacttatattaataacttgtgtaaaattatcattactataacttcaatctcaattccgacctccgttcaagttcggagctagattcgagtttagagtcgggtcgagattaagatttgggtttggaatcctgatctgggtacatgattctagttcgggttggggttgggatccaagtccactattcgggaccggggctagggtccctaaccctgaaccctttgcaaatattataacaatacaatattatatttggtattgacttatattaataacatgtataaaattatattattaataccataaattcgattccaactccgacctccattcgggtccggagtcggatccggagtcggatccgagtttgaggtcaggttagggttcgaatttgggtccaggtaggttctagttcaagtcggagtcagggtccaaatttggtgttcgagactggggccaggatccctaactttggactatttgtaaatattataataatgcagatcatttgttaagtattaaataatacgatccacattatattaaattttgtgaacgtaattaatacaataaaatattttatccaaacaatgtgttacttgatatttaatacaatacggcctttatacaatactaaactaactcttattacttatcaaaaaaaaaaactaactcttattatttagttttaaccatttgattgaggtaagtcttctcactagctagagcatctggcaagaaacaaatataaaccaaccagaaaaggtatcaaagatctaataaaagaataatcaaaacagattaaaaacaagatgatttatagtgtcacaaaacaatctgtacaattctcttttttctctaaacaattcacctctcaatctctctcttaagtccttaactgagaactacaaggttcagcttggatactaactgtcataacagacagttatttgaattagttggtaattaagttgagttttcactacttcatgtatttgatttggttggtcggttgtttattcttttctccccaataaaatactaaactcactcctcaatcaagccaaattggactcattggtaagaatttaaagataaggaaatgaaaataattcgtaacccgaattagctcaaattgtcagacatgtgatttattctgcatagttgctctgcaatattaatacttcgaaatacatacagagctgaagaagaaattcgatgataaaattcgatatacaaacatgcattccctccgaaatttttggtgtctttttctatctcaaccttcagaaaataaagttattttctttgtaacttggtgaccatatcagttatccatagtttactttctagaaatgaaaaaaggttactttctggtaactatggtcccaaattggaccatataatatatgataagcctcagaaattgcttaagatattccttcttctcacattcatgcactatatttctttcttttttgatatgcccataaataaataaataaagtttcactaaagaaatttcaataaaacactaaagtttcaaactttataaagataacaaaaagtaaaaactctctgtgacctctgctgcacatgcctaaagtaaagattctctattactagctaataagaaagctaaacgacttgtcgtacgagtaaaattaatgtatttataagaagaacatcacatcattcataacaggggatatttacggcataagtacctaaacctttgagtttgtaaccgatacaaactcaataatcagtttaacgatataagtacttaatattagtaaaattctgttttaatctagttttattagtacagacttcttttacataacacatgtaatttgtaaggtttaaattagttataaatatgtaatataaattagttataaatttaagataataacaaagaatacgaacaaaaaaattacaattttataataactttaagtacttagtgctactaaaaaaaataattagaatcacgccggttacaaactcgtataaatataatattgaaacaaactttcctcattttttttttttaattttactacaagagctcaaactaaacttattataccaaaagctaattttatacaataataccacaaattaattaattaaagccaacatgttaaaagattagcaacaatgacaaacttagtttaaacattgattaatgatgatatttttgttggtggtgacttggcatgaaaagaacacaactttggtgcccttctgaaaaaaattgaccactcttatgcattgtccacactctcttttgattcatttcttctgatgatgtgtagtgagtagtgagtagtgagtagtgaccagtgaccagtgaccagtgaccaccacatgtcatgatagagccatttcctgccatcttcacatgctatctgtccccaaaattcttctctttatcccatcatcacataatttctcctaaaaactaatactattattacactaaactaacccaaattggcaaattaaccaactttgatttttttcctttctttcaccatatactataatacaatattgagttgagagagtctcatttggttactttctagttactttctttcatagagtaagtcttagaggccaagtcaatgcattgaaggtgtcttgggcaagtgactaaatggttatttgttatgccagctgcttccatgagtgaatgaatcactgttggccccactaacctaaaaccccttctcaccatgtctttgcttatactttctgattttgaggtcttcactggtattttttgacatagtttgaattgtgttgagattggtttgtgattcacaaatccccataagtacttatccaatgaccccatttccttcttaatctgcaacacaaaagtcaatttaaaaacacttaattttgtatcactaatactacttaataagtacactcaataattttttatctaatatttgtaaaaatataattttttccaatttcatcagtactttccgtccagacccaatgatttaaagtttaggtcttatatattttttatttaaaacaataacaaagtctgtactgatgaaactgaagaaaaattataattttgtaacattaagtactcatgttactaaaaaactagtgagtttatgcccgctatttacccaatattcaaatatgtaactaaatgaaatgtacctcaagaattctattagcattatcaacaactcctctaatgagactcaactcaatattgtattctgtgttgatagatttgattttcttttcattgtatttagcaactatttctgcatcaaatcctgaaaatgcatccctacataaacacaatccaacattattagatagcccaacaaaagaaaatagattacttacctaaatgtttgccttttttttcaagactgaagtccaatctgatccaacttgagctccagtaagtaacaacaactcaaataacaacctacacacaaaaacacacatatataaatacacaaaaaatttgaaaagtgtgacatgttctgttcatagagaaaaaagggttatttacttgtcatcatggacaggaacaccccattcttcatcatggtaagcaacataaataggatctgcaaagacaattttgtgttattaaatcaatcatcattaaaaatgtgttatcaattatgtttttttaagtgttatcttatgtatacatacctgaattaggtgttatgtaactgcatctcttttgttctctattaacaacaacaccagcaccagcaccagcaccagcagaaaccgaaaaatcgggtttagaagaagacttagatgttgttcttccataatgggaaattctcatttttctttgtacttgcatagttgcaacttgttctctcctagcagctgcaatacttcctggtgcctcaactaacaaacaactctcaataggaacattaagaacaacaacaacatgatcactacttaacttgtttgatttctttttcttgatcacttcattattgttgatagaagatttagtcatgaaaagtggtgtaacactagtttcattaacatcttttcctctcttgatagctggtggtcttggagatggcatcttgggagaaacaggaggtgttgttggagactttattgagctctttttgatcgatggtgatcgtctttccaagctcgaaataactcgattacatgttggttgaagaacagggcggccattgattttaggcatagtgagttgctgagattttggtttagctgaacacatttttttttgggatgagatgagatgagatgaagagttaggatgaggagtagttgagaagttaaggggaaaagggtatatttatagaaagtagaagagtggggacatgagatgagagacaagtttgggaagttggaacatgggggtgttggggctaatgactattatgcattgtcaccatacatgtattcacataataatcctctaatgaagggtattactaatgctttttttggttataataagagtgacagctcgaactcataccactgtgtaatttgtcatacatctcaactaattaagttgtgaatatttattgtttataatatacttaattttaattaaataaaagcttaatgaacccttttattttttattttaaacttcagaaagtattagctcgcctgtgcttagggtcgagcctgtgcttaactaattctccaaatccaatcacccaaaatagtaaaattggtgaaaatcaaccatagtcactatgtaaaatgaccttcttttgataatttttttttgttgcaaaaatagcattccaaatagggtgttgagaaggttaatttgttacaaaattatcaaaattaagttattgtgcaaagtaactagtggtgccttaaattatgtggaacctcatacgtatcaatagtgatatgtaatctagatgttgctagacactactaatactttttaacatttcgcaatgtgtcgagaagatcatttttgcaagtagttgtaaacaaa

SEQ ID NO: 296616 - DNA, 8795 bp, Cannabis indica
ttttttttataattattattgttttttgaatgaatataaattatcattaggtcactgttaaaatagtccgtaacttacacaaactcaagtatatccgttccctactaaaataagcaagagagacaccttaacaaggttatgaacaataaaaattgttgaataattacaaaacaaaatcttaaaaatattaaaattcttacagaccatataaatatcttgcaaaagagaactataattttccatacaagacctttttttttttgttcaaaagctttgtgtaacaactttgcagtctgtctctacttcaaattacgatagtcaagacgagaacacaactagggactcaccaaaagtcattgctcaaccacatttggagaaagtaattcgaataccgacaaggccgacgaagcaactcaacgaccaacatgatcttgaatgaccgcctcatgcctagatgacaatcggagactcgcaaccatgcatctatgttgagtttgaacacccttttagcaaaggagcccacgggggctcaggtggctagactatcgaacagacagccaagatcgaaacaacaatagttccaccattccttgaatgagcttcctagtaattacaagcaaaagaaatcacccagcccaacactccttccacatctagtagctcatgattatgaatctaatggtttcgatgatatcaaatacaccaaataagcaccagagcctctccatctcatctttgtaaagaataaattcatgttcacgaagaaaatactgaaggttagcctaagggagagatgaagaagttagaacaaaatccaccaacttaacaacgagaccaagactagaacaatcccaaggcgcaggaaaagatgtctcattttccatgccacaaacatgacaagtatgaggattagaaactttatgagtaacaagattcgaattgataagaaaccaaaataaacatgctttccaaataaaaactttcaccttaggagggatagtaaggctccaaaaatatttctaccaagatgaagaacccaaagaagaatcattttgacccaatcttaaaagtcgtatgatattccaataactgctcttcacagtatactcacatgaagaactatagtaccaaatgagatggtctcgttgttgattcgaacgaaggatgcttaaaatttgagcggcttcatccaccgagaacaaaaagtcaacaatacctttattccaatcaccattaactaatttaagatcactaaccattgaaattaaattgttggaccgaaaaatttttgaaagaacaattgacacttttggaatccaaaaatgattcttaatgcttacactaaaaccatcaccaataagccaacaaccaccttctaaaaaaactctttaccaataaaatgctcttcaaaaagaatgagtcacgtgtttgatttttcagtagaaagaaagtttccaattggaaattaaatacttttcataactcgagctgcaacagactccaaaatcgaatatatacgccaagcttgcttggttagcaaaactttattaaaaataaaagatcacaaaagccaaagccaccatctctttttatgccaacacaaacgatcccatgtacaatattgcattttcctattctctttatcatcactccactaaaatttagcacaaagtctatgaagtttctcaacctattattactgttaattttgagtgtttaaataattagatttataaaaatatctatgttatattaaacgtggctataaaagagaaaatgttgttcttttttcttttaagaaaaaaaaatactcaaatttaattaactacacatatctcttttatcttttatcttatattaaatgtgtctatttttttatttttttaacttttgctatttaaatttaaaactcattgcacatatctaaaaaatattttctattatcattttttttacccaatctaaatattttttaaaaattatatattcattattgtgatatttaaaaaaatatctttttattgttattttttttagaaaacatgtatgatatttataaaaaataaataaaagtattacaattaagttaaaattataattaattaataaattttattattatatatataattttttttataaatagtacttaaattaaattgttttaataaaaaatattattgattattcaataatataaaagaagaaaaactaattatacaaataaaaatacatgtaaccaaaataaaaattaagaatgtaattaagtatataatattaacttagtatatatctcttatattaaatgtgactatctaacataaattgttgatttaacgatttttgttttaaggtttttgttaaagttaacagttaaaactaatacggttgaatcaataaattacttttttttttttacaataataagttttaaatatctaaatttaatttatttattaaaatatgatttagatatataattatttaaaagtattaacaaaattaaataattatttttttataacaaaatatcttaatttaaaattaaattataccttaattcaattaattaattttactttataataaatttaaatcatacgttaacaaaatatattgacatatctaaatttatttaattatttattatttaataaaattagttagatatatatttttataaataaatttaaaataataattagataatattaactctaatatattgaaaatgatataaaagatgaagaaaatattttaatcaaacggctgaaattggacttgtgtggttgatccaactgtacaccatctcacagaatatcacaatctcacttgtacggtacaggagtaacagcactgaggcatctgtattccgaaaatactcaatccttcctgagtttttcttcagaactcaatctcaaccgttgatttatatcccagattaattgactctataaaagccttttcgttttttttaattaattaataaactattctttttttctatctgcaagtacgtagaagaagccctttgttgttcttctccgattccatcttttctgatccataacgaaaccctagattgtcgctacgatctcaatcaatccgctttgtagtcgttatttttcgcctctggaagggaaatttcgaggttttggagcattgatttccgtactgagatcgacatcgttgtcctgggacattctttgtcgaaatcggaggtgaggctttgggggattttgtgagagatttggaggttttggactatatatttgacgtgtgctcttctgattttttcttggaagttggttgggtcgttttcttcttccggaggaggatgaaaatcgaaggatgaacgatgccggtactgcgtagtggagcgcgcaggggccgggcagcaacgaagcaacagtcgagtccgattgaggctgtggaggcgattgccacgagaacaaggcggcgacggcgagcggcggcagcggctgtggtgccgaagaacgataatagtaagcaactagagaaatcgcaaggacatcagttcggtgatgagaacgtaggtgcttcaccggctgaggctaaagaggaggagtataggggactagaaaaggaaagggttggggttgaagccgctggagcggagaaggaggaggtaggggagaagaagatggatgaagatagtggggctcggagtaacgacaaggttcaagtcggtgacgacgagggtagcactgcaccgcttcctgagaaggtttggtttcttcttctgattaaatgtgtttcttttactgattatttttcactcaaaacgtcatgagattgttaaactagtataatttaaataacttttaaaccctccgactaattcacacttgaacatttatctaaatacacagttagttaggttttggtagagatgttaaaccgaaggatggcaatactattattttgaattgcttgttgacaatgcagataatcataacccaccttctcaaattggaagaataatgtttagttttgacagacggagatatcattgattttcagatgatttggagtcttaggcaagaaatcaagttaagattgatatgaaggggcagggagaaaaaaaaaacataaataggatgattgaaaaaaattatattaataaacgcataatgttatattattactaacgctgtttttaagtaacccaactcttttaatggttcacttgtcacccttattttatcaatagatcatactcataacacagtatcgttgttgtagtctctaatatcacaggctcatggctgaatttctgccaaattatgagttacatagtcaatcgagaatcttttgattgcttgaaacggtttgaatattataaattggtattttagatacatggggttacattaagcagtaatttatttatttccggcaggttcaagttggtggttcccctttgtacaaagtagaaagaaaattaggcaagggaggatttggacaagtttatgttggtcggcgtctttctcctgtaatcggtagtgataaaaatactggccctggagctgtagaggtatatagcctcactttgagctattatttttattgagtttgtcttcttgcttgacttattgttttgactctcctatatgtatgtactttgtatggtataattgtcttaggtggccttaaaatttgagcatagaactagtaaaggatgcaactatgggccaccctacgagtggcaagtttacaagtgagtttaagcttttctctcttgtcagttagctctccattaataataggtacactaatgagtattgttgttgcttgtacagcactcttggtggcagtcatggcgtacctagagtacactacaagggccggcatggtgactactatatcatggtatgtgtgtcctttgcctaatatgtaatggctacggtgttctctcgcttatttaatgtctaattatgctcacaggttatggatatactggggccaagcttgtgggatgtatggaataataactctcacacgtgagtttatttgaatatataaatgtttagtgacaagtacatggtttgcttgcttgttcttactttcttcctttctttttttattaacatttctcccctcttgttacatttagaatgtccattgaaatggttgcatgcattgcaattgaagcaatatcaatattggagaagatgcattctcgagggtaagattcttcccttgccaagatgttcacagcctttactattttcttaaaatcctgtctctccccctctcttttttcttactaaatttattagtatttaaaatttagagggtttgttcatggaatttgttttaacattttggtagttttgtatatagttttagaagggtttttacttggagatgtttagaccatacttactagttactactaatagagagatttataagtgtgttttatttgaagatgtagcaatgactcactttgaaatttagaacatttaagctgctgttttgatgaagattattgtggactttgaggttctttgcttgtcattttatgatgtgtgtttatctagaagcagttttgattcctccaaagcttattaaagcatgtttataaaagttaaagaagcagttttgattcctccaaagcttattaaagcatgtttataaaagttaagtcatacattttgcaggtatgtgcatggcgatgtcaaaccagagaatttccttcttggtcctccagggactcctgacgagaaaaagctattcttagttgatcttggattgggtacagttttcaaacgacttttttttattaatactaaactttgtatatgtttattctcaacttttgttctataaatttgtttgggtttatcagcaactagatggcgagatagtacaactggtcgccacgttgactatgaccaaagaccagacatattcaggtacaaacactgactatggttttggttagctatatgagttattatgctgcttgtgcctaacctttttttccccctttatattaattttataattgttcttgcttaacagaggaacagttcgttatgctagtgtgcacgcccatttagggagaacttgtagcaggagagatgatcttgaatctcttgcctatacacttgtttttcttatccgaggcagactgccttggcaaggataccaggttggttatttgttgaaactttagaagatgttcatggctgatagttatatatttttaacatgatgatattttccagggagataataaagggttccttgtttgcaagaagaagatggcaacatctccagagaatttatgttgcttctgcccacaaccctttcgacagtttgttgaatatgtggttaatttaaagtttgatgaagaacccaattatgcgaaatacatatccctttttgatggtattattggtcccaatcctgatattcgcccaattaacactgagggtgcacagaaggtgttaaatctattttgtacctgtaattgagttaccattgacctatctgctaatgtttagcgcatctaactaggactctgcatcttgtgtagcttatcaatctagttggtcagaagaggtcacggctaattattgacgaggaagaagaagatgaacaaccgaagaagaagattagaatgggcatgccagcaacacaatggattagtgtctacaatgctcgccggccaatgaaacagaggtatattttgtccttcagtcacattttgtttatgttttagcttcattcttcagattatatttattgcacaagttcccacttttgtttcgtattagttttgattgtgttttttcatttgtgctgtcaatgattattatcttcattaatactttcagactttgactttatattctttaaagagcagaaaatataaataatattggaatcttatcagtaaggttatggtgtaaggttttgttttcttgctgttttaggtaccattataacgttgctgatgcaagactttctcagcatattgagaaaggaaacgatgatggtttgtatatcagttgcgtggcctcttctcaaaatctatgggctctaattatggatgcaggcactggattcactgcacaagtttatgaactatcaccctgttttcttcacaaggtttagaatgttgctttagttttaacgtgctcaatatgtttctcacttttagagtatattactctgctacagttaaaacttttgcctatttttaacttccacgtgggcatgtatttatctggcatttgtatcgattggcaaactcaaatgtttagttgtatgcaggaatggataatggagcagtgggacaagaacttctatataactgcaatagctggagctaataacgggagctcccttgtagttatgtcgaaaggtttaaatcatatttctaattttagattttctaggcaaagtacactcacaatcaatggaagttttacttaaatgtactcttaaattcaggtacgccatatttgcagcagtcttacaaggtcagtgacactttccctttcaaatggattaacaaaaaatggagggagggattctatgtgacatcaatggccactgctgggagtagatggggagttgttatgtcgcgcggtgcaggattttctgaccaggtaatctatttgattttgaaagtgccccctgaccagtgtcttacggatcataagggtatcttctgatatattttgtccttaaaattgtttatattcaggtggtggaactggattttctttacccaagtgaaggcattcatcgtcgctgggactatggatatcgtatcacttcaacagctgcgacatgggatcaagctgctttagttcttagcataccaaagaagaagcctcaagatgaaacgcaagagactctgcgcacctctgcttttcctagtgcacacgtcaaggtgaattgggtatccttgcatagtagtttagttttgttattttctttgatttgttggactgaagtattctttcttatgcgtcttgcaggaaaagtgggcaaagaatctttatattgcttctgtgtgttatgggcgaacagtttcttaaactgtcaatactatatttatttatttagtgtgccccataacaccgtagcagcagatgtgctcctcgtggcgtttcttgactagtttattcagtccgggtttgggatctcaacgataccataccctccacagagcaattttgatgactcaagctttaattaattaattgtaattaaggtataggtgctttcagtaaaatagacccatttgtttgtgtcatgttgtgtggaaattgtgctgttcattttctcaattattaatcgtagctcacgagatcctttactaggaatgttgtgtgtatatatagcccctgcaaaggctgtattgaccctcttatgaaataaatttccttaggtaaaaagaaacaaagaaaattattaaaaacagacatgataagtagaagaaagaaaactagatcagagaaagtgttagtggactgatgtactgtagtgtacaatgaatttgttgtggataaacacaattggataacatgcagatctatctgtttgagaaggtacaatgtcaactagggtgttagtggtgcggtttttactattttttttaaattaacttgtgcttgcagtttttttaattttctaaaatgcatctgtaccgctaaactaaaaaatcacagaaattgtctcgttaaaaataatgcagtgcggtgcagtttttgcggcagtttttgcggtttagactattactaaataattaa

SEQ ID NO: 296617 - DNA, 1244 bp, Cannabis indica
aaaatatttgaactatgggctcatttgatgttagacccaaaatatcaaaaattaaagaagttttataacttcttgaaaaaagatttcacaagaaagatattaaaaattatgtatatgtatatagtaagcatatatttatatattaatagggtcgcacccctatataatttcctggggggtcataactacaaataacaaacaccaatccattgttgctacacttggtggtggcacagccaaggcgaatggagtcacgccacaccacctgtaggtaatgaccacacgcatcttcttctgtgcatgtgttggaggtgtagtcatacatggtcttttcggtagcccaaaacttcacagcttgctcacctgtcatttctccataacctgcagctaaattttcaccgtaaattccttgagagtgctcgagttcgcaattcttacctttcattttgtttgcataattgctcgcataagcaactaaagtgttattccaggtcattggcccaacacccacctctgctcgaatggcattgtgggtatcgaggaagtcattggaagatgcactagcaatcatcaatgtcatcattaccataaatatttctcccatcaacaaaacttttatacaggacttatggtttaaagacattttcaaagaccacattatttttagaaagttggtaaagatggtgatgataaataatttagaagtctttttttcttttcttatttgtacaataagagatacaaataattcttatttataaggaaagaaaatgtaattattagtaaataacaaccaagttatatttataaatttgggttggtaatatatagaaaagtttgaattagtaaaatagtagactacaccaaaataaggatagcaatataactaccacaaatttaaatgaggtaattttttttttttttgacacttgtaaatcatataagctaatattatcttctatttttgattcgaatataaaataagtttattttttgtattacaaactattatttatatagtaattcattagttttttggtattatatatattgtattaatttaaataaaataatatgtgttaaaaaggaaagtttcttgattgttgcaatttgtgttgtgatttgttttgggaaatttgattttctatacttagaaaatcaaaaaatttgatttctaaaccaataatttaaaccctaaaaaactataccttttttttcaaaaccccaaaaatacccccctcaca

SEQ ID NO: 296618 - DNA, 3953 bp, Cannabis indica
accggagcgggacaccgcggcgaggacgactggggagacggcggcgtttggcaacggtccatcttgatgggtgacaagtgtcagcctttagatttctccggcgttatctactacgatagtaacggtaagcagacgactgagcttccgctgagatcgccgagagcgagtcctatgcctgggtatttggagagacgtgggaagtgatattctcaccggctggtcatacagtctctgtgtcaccgctttggaaaaattcgcttgtgtcaaagtagacggcttcgtttactttttcatttttcgttttttttccaagtctatggaaattttagacagaattgacgtgttgttagttgattagttgggggtcacagatgacacggtcgtgaatcatgacgtggagatctcttttcagtattaaggtgtacacgtacgtatgtatatacatcattagaatacatgtgaaactttctaaagaaattatcttttcctttttgaagaaagaaacaagttaatttgattgtaatctagtaatctatacttattaaattttggctgagtttaataaaagggttatttgtcgatgttacgcttatatagttaactcattagttttctttaataaatatgattaacccattcttattaaagaaaatatatatatttttttcatttggaaaaaaagggaaagaaagaaaaaaattgatacacaattgagtaaaaattttaatgcaagaacatattattaacttataatttaattttgtttatctatttttgttaaattttgggagaaataatacatatttgggatggtgattgtttggttatatgcttggcttctaattctaggtatgactatgttcataattaattgaaaccttaaaagttaaaacacgtcattcaagagagattatatgatttttctttagaaagattgtgaaatgatgggatcaaagggattcagatcctcatacctaatttcctatcctcttctgttacttttctctttcgttatcttctcttcttatccttgtgtgttgatcatattaatatcaatgcactatattaatgcactatattaattctttcttttcttttttttttctcgaaaagattaattattataaattaaagaaaatcatttataaaaaagaaaaatgacagagggaatttctcctaacccaagtacaatcattcttcaacactaaagcttgtttagccaaaccaacttagttagcatcttgccgaacatgaaatacacaaatagaaaggacgtagcataaatgatttttagtatgaaccacgaaatcttaaaatgaagaaatgcttgatgtttgacaataaatagagttagtcaacactaaagaatcaatttcaattagattcaatgtgaaattatgatgtttagcccaaactaatccgtgaaacaatgctttggctttcatctcttgaagttgatatttgccaatcaaagacttagaaagagcagccagaacttgcccaaaaaagtttcgaattataacacccaaaccaattttgttctttgaggcatcataagcagcataaacattcattttaaacttgtttacaagtagtgggtgccatggcactctcccgacaataacagtagagatcaaaccaagaggcttttgaatggtagaacattgctgcaaagtgcaaagataagcttggaatttgctcagaattttagaaaatttttgtgcgagtttgccatgaatgatgttgttcttatcattccaaatgaaccgcatagtgcataaaatcttcaagattagattttgatttaacataagacaaatagacaagataattgccatccttcaactaactagctgccctataatcaagatcatagcccgctatttcccaaacagatctagcatgtttacaactaaacataacatgcccaattgattcttaagcattcaaacaaagactacaagtagctgaatcaataatatttctatgtaacaacgaaactgcaatagaaagggcattttggatcaccctccaagcaaatacttcaatttaaatggtagctttagaacccaaaataatttccaccaagactcttggtttgtggaactcaaagaaagatcttgctcttctaatgaacacgtaatgtgataccccgattaaacaaaatactcccccgaattacaatagtgctagatccacttatcattggtactaaagagtgaaagaggaattgtgaggatataatcaatatcaattggagaaaaatcatgttgcagcagatgaagattccattctttactagcagtgatatatgtggaaattatattattaggacaaccagtatatctcaaaggagtacagacaaaatttcttgcaatccatggatcaaaaccactactaatttgagaaccatcacccactttcaacctcattccttgcactaaaggatcagatccctaacaaatttcttgccacgttaatgaagacataccactgctcttagcaaccatgaaatcattatatgaaaaatacctccctttcaaaatacgactaagaagagaattgggaaattagataattttctaagcttgtttagcaagtaaatcttggtttgaagtggatgaaagatctaaatcccattccaccgttcattttggttttacagagaaatttccattttttgtccaatgagtcttcttcttgttagtgaccgaatcccaccaaaacttagccatcattttcacgagttgtttataaaaagtagatggaagttaaagcaactcatgacacaagttagaatagactgaacaactgctttcaacaaaacttctttcccaccaatagaaaaaatcttatcattccaagcatgcattagtttccatattttctctttaatatcaaaaaataattactttttatctctctctgaataagcaggtaatccaaggtatttctcatggcactgactaatcaaaatcccaaagatttattggaaggatcattctgcagcttgtgaggtgtttggtgaaaaagacataaccgatttatcaaagttaagttcttgactcgatgcatgatgataaatatccaaagtacatttgattttcccacaagatcgatcatctactttgcaataaagaaggctatcatatacaaaaaatatatgaaaaatagatggagctgtacgagaaataaccaaccctttaagtcatcccatcttttccttaaattgtaaaagtcttgaaagcccctcagagaaaattaagaataggtatggagagagtgggtccctttggcctaatcctctttgcgatatgacagaacttgaattgcaccattaatgagaaaagaaaaggtgtttgtgtgtagacacgtcatgatgagagagatccatctgatattaaaccccattgttcccataacaactgctagaaaagactattccactcgatcaaaagctttgcttatatccattttgagtgcgacatatcatttggagcctctcttatgatgtttagactatggaccatttcaaaagccaccagaacattatgattagggagaaaagcactttgggtttcacaaataacatgagaaagaacatcctttaagagaataaaaaacaccttagagataagcttgtatatgacattatagagacttatttgatgaaaatatttcatggagtgaggcttttaactttaggaatcagagttatcaaagtcttattaaaagcaactggattgccacaatcatttagcacatgaagaccaactttagaaaccgaatttcaaataatattccaattatgttgataaaactgttgggttttggtgccctaaataaaacttatttcaatataattagatttactaattaataaagattagaaatcgttttatgttgcatggtgcacatgatttatttcatgattatgtttaatgtataaattc

SEQ ID NO: 296619 - DNA, 5492 bp, Cannabis indica
aagcttcatggtcgagtgacttgtaagccttgtgcatggtcgagtgacttgcaagttgcatggctgagtgacttgcaaacttcatgggagagtgaccttgaagcttcatggtcgagtgaattacaagcttcatggttgagtgacttgcaagctacatggtcgagtgactccttcttgtgcttgtcgagtgacacgcacttaagcatgcttggaagagtgactcctccatgtgcatgtcgagtgacatgcacttgaccatgtcgagtgacatgctcttgtgcatgtcgagtgacaaacacttgagcatgcttggccgagtaaatcctccttgtgcatgtcgagtgacatgtacttgagaatgcttagccaagtgactcctccctgtgcatgccaagtgacattcacttgagcatgccaagtgacatgcactttagcataccgagtgacatgctcttatacatgctgagtgacatgaacttgagcatgcttgactgagtgactcctccctgtacatgaagaataacttttgagcgtttagagaagaaaataggactatgcatccaaagcaactctttgtgcatgtcctcgttaatctctcaattagtagtcgactaatctcgagtgttagccttctaatttttaggattacacttgcccctagtctataagaattcttttaagtgttcttgtagactaagtttgataagccttactcccatctttcggttctgtgactgcccctttaggcggttattccttgaggtctttttttttgtgatctttttgtgggggagccttgtctctattacttttcatggtgatggcttgtcccgtgcagggagtgctagcctcttgagctttttcaaactcttgtgtgagctattaatttgtttaagggagctttttgcaacctgggctttctcaacctccttttggtgtaaccttatcatggatataagggagcttgtggcccttaggcagcgctaggcggtgctcaaccttttttaagatttaatattttattgagggagcttgtggcctttaggtagcactcgaccgcttacattgcatctgtggcacttgacgtgcgttttgaatgctagaagatcggtacttcttggatataagagactttgtggcccttaggagtcactcaacccattttaagatttaagattttattgagggagcttgtggcccttaggcggcgctcggcccttacattgcactcgtggcaatttacagtgcattttgaatgctagaaagataagtactccttttagagaggcgtgactcttagagtcgtatctgattcctcttttcttttccttttttttacattgcttcgttcactttgctaatctcgattgacaagtatagtaagtaagtcaagcaggcatgtggagagtgatgaacgccgtatgtgaggtgaaaactaaacatttcattgataaagataacacatgattgcccgaatacataagctatttttggaggtcaaccttggttccctctttaattcaatacaatgtaaacttgtatttgctaggaacattttcccatatagtggaactcactttgaggaacatcttggatatctaattcttacagattgaagagcgaaggcttcacgtgaatgtaccggcttacgagtgttaggggcatcttctaatagatcttttaggaatctgacgagcttcccagaaaacactcatgggtatccatttccaagactttgtttccttcctccacatggatctacttctctgctctctcatagaagtcttctatgccaactcattcccttttcagcatattcccacatagtccactttggtgactttggcattaaagcgctagatgtagctttgcaagttttcttgttctcattgctctacattagcgatacttattatgggcataacgtaatcacaagcttcctaatgttgtacaagtaattcttccaaaaactgcttccaagatgtgattgttcctgatcctaaccccttgaaccacttatactcaactcctttgagtgtgatcatgaagcattatcaccttgccttgcatgacactttttcatctccattagctcattaaaagctcctagatggtactttggatcagttgtaccatcaaattgcatcatgcgcacaactccttgaaattaggtggaagtggtttaacttgaatctcccttaaaaaaggggattctttatcaaaatgatgaatcatcatctgaattttgccttgatgcgatagctatctttctaggtaggtcttgtatctctgcttttaactccttcattcttttgttcatcctttcacaggagttattgagtggggctcaagttttccttgcagtgtgcacagggcttgtgagtggtactcctcttgtctcttcattgtatggcttcccatcatggttgaaggataacacttttcgtttgctttgctctttaaaggggggcataggcacggtgccccccagcgttagactttatgggggaaatatcttcgtgaaatgaatagatatttccctcattgtaaccttactgcgatgagtaggctcaattttccttgaatgacctaaagggctcttctctcgcaatgagccctttctgttaccatcctttggggtgatttttgttgatgacatggagttctctctccaacatgtgcagttgggatcccctttccttactgatggtttttatacataaagtgtgaggcttggatttcgcctttgcatatgttgctcagcaccttttgcatatcggccaccgtagtttctaaaattttgttctcccagcagagatcatttatctcatcttaatagtggcaagtttgggatcttaagctcacaaagtacgctcacttctattttctagagaggtgtagtgaagtaccaagatctcgcggtgatggaggtggaggatgttttattggtgatgggactctttgcctttgtgacctatttttacaaacatctgctatggatgcggtcaccctatcttagcgcttatccactagattttctttatgacgatcatctccctctcttgcgggggatactgggctattctggccaacttcttcaaccatggacgtgggtggctctcttttggaagtgatcaactgagtgttatttaggttaacctcgacgtcttgtagatggtgtgagcgtctaggaatcttacaacaatgctaagtaaggaaacaatgaagcttgaacttgtcgtttccacaaacggcaccaaactgttgacagtgaaaactggtcaactaactaaaggccaaaactcgaaactcaaacacaagacttagaatgaagatgaaaatatgaaaatataaaaaattaaagtaatgttcagaacaataatggaggaagagaaatgcttgtatttcttggagagtgttacagtgattttccaatcccctctcacatttaagaatggggtatttataggctctaatggcatggggtacaatggtggttccaaggaataagataacatccatgagttgtaggttgcaagtggcgatcttacgcattgtaactttgtgtggtgcaaggtggtcccaagttaaaggggtagtagatgtgtgcacccttagtctggatgttaggacttgcatgagttgtgccttcactacttgtaccctctaggcaagagaacctgcaggaggtgtggtttcactctctttgcatgcatgcctcatcctttgtatcatgcttcatccttgcaatcgtacctttaatacattttccccaaaaaattaggcattttataccctaaataaaacccatttcaatataatcttttttgttatcaattgaagattagaaatcatttaagttaacatgtgattttcatgattatggtttaatataaaatttttaataaatccagaatatatagttattcataattacaaggatgtcatcacagtggaaggtaattgtgactatatgcttcaaagtttacgtctcatgatttaaatacactagattcacactgatgtaataatcagcgataaagtttacttataccttggataagtgttatgtcctttccagggcattgataaagtatggtagtattggatgtatggagtatacatcgaattagattgatattgaacttggtaaagatatcataaacttacagttgtatctttctaagtcaatatcacttagttaatgttagatcaaaagatcttaatcctgatatggttcggtttaatctcaactgtgttatttatgttcctagagtttttcgttaaagttgaccaattggatcggcccaatacttacatcttgggaacatggtagtacaattaagtgggagcgctaatcatagatatggaatctatggcttctatctagacatagaagttgttgccttaaatagtgatcaactgatagcggggtgttatatatccgatgcttgtcacgtgttacacaaatagaataaaagagtataaaacacacagatttgttatagaagttgagcccccttgtgatagcgggtaatgacctactccccttttggttgtattaatacctaaagataatactacatagatcagtatgggtgggatctgatatagctctctataaggttacaaagcatgaattagtaggcaaatctttaatgggagactgatattgccttagaggcatgtgagagagataaagagaagaagccctcttgggcatgtagcagagagagagagacaaaggtttctgacttagagtgatttggaggcttaatgacttaggtttctaggccagggttaaggcctttatataagaggcctaaaccctagattacagtttgaaaccctagatattttcatagtttgtttgataattataaaagactaaatttcccttgaatctagatattttccatcactttgaaagggcccaatttgtaggtagcttgctatccatattttgggttatgcatagaatcctgccaggttaatcctggctgcccataaacctattggggaggtctggccgcccaaggcctgcaggatgaggtctagccgcccaaggcctgcatgatgaggtctggccacccaaggcttgcaggacctgacaggtcactatagctccacaaagaggaggccaacctttggatgtggaggctagcctttttcaagttgaagacaactttgaacactatttccttctagaggccaggtttcatttggtcgaacagaagctcccttggatggaagtcacttcttggccggctagctagtgcacaaatcatggctagcctataggcttctcttggcggtccaaggatgttggtacagctctttgagggctcgcttcactctattcaattattgcttgacgattttgcgatatcttgcatggagaccatgttttgctattggcaggattatgctccacctgtactctatctttggcttatgtggacatgccacgtcaggtggacaaaatttgggat

SEQ ID NO: 296620 - DNA, 3892 bp, Cannabis indica
aagaaaaatccacattaaaatcttcgaattctcataaaatttccgtttattctataattttaggatgtgggtatccataattgtcgctcttctgaactgggcttggtagtattaatcactagctgcggttgtggtgtctgtggtagtgtgaggtttttttttttggtttcagtaatggctgctactaacgttggctcctccttctcttgtttggctgctgctctttccactccaatacgcaccagaagtccttttcaggtttgattcaacttaagcccttttactcgacttgagcaatcgggatttcattttgtgagaaatgagaatgtgtgatttaggccccaaaaaaacttatgtctttgacttattgcttactgggtattgaatgtgtccctttctaagaagaaaaagggggataaaactttgatgacattactgggtttcaacttttttctcttcctaagcagaatggctggtgctcgtgtctgatattgtaggtttcagctgtatatattttctgatataagagcatttattttttagtgtagatagctcatatatgtgttctgttagagtatttcaattttttttattagaaacaatgctgagatggtgagttacaacagaattggtacttttcttacacaaggattacttgaaaatttatatgcttgccttgctgatggttaggttgtaaattggtaatgctacacagtagtttgctaactttcattataatggaaaagggaggtgaagtgaaccaaattgtgaacttacttcgtgaggatgccccttggattgggtagtggattagttttggattttgtctaagagtcattatgttaaggactcataaatgatggtaagtattgtttgcaaccttggtcttttcatggaactaatgagggttgttggaaatggttatttgtatttgtgctgagctaagatcctatctaatcattttactttttgttgttgctgttaaaacatggagtaaaaagatatagttttattggtactgtcactgtgaactttagtggcttagtgatgcatagtaggatattctattaaatttgtcatatgctttttgtagtttggatttctagttatttctcttgccatttgccataaatttgaagaggattttggttgaagaatatcatagtgctcatgaaaataattttctccattttatcaccagctgagcttatcacgaggattatacaacaatcaacaacatgaacctcaactgctaagatatcctagaggtaacttccaatattgattacaaaatttgttaaatgcggaaattgtatgtggaagtgcaatttaggttgcccaaattgatttgtagaatgtatagtaggtagataattatggctaaagggaatcttgggactctagttaagagagtcaatattaaaactttatctataaatacaaatcaagggatgtattgagtgatgctccagtgaacattatataatcgcttattttacttccccgcgaggttcaatattgctaatagtttctctaaaatgttattgtttgcttctatttttattccaatcaggcaagtcctgcaagttcattcatggaatacttaactcaaaaggaaggtccccgaagtggtgcagtgctctttttgcagtttctgaggaacaaccgctacatgatgagatagaattagttgcatcagagcaagaaaaccttgaccctagggctgaagatgtatctactgcaagcaattcaaatattatatttgatggtgctggtggaaaaccaggtctaatatccttttataaccaccgttcatacgaaagagaggataagattcatgtgtttagtccagagaagaaccacaacagcctgttatggtttattggtccggctgtacttgtagcctcttttgtctttccctctctgtatttgcgtagaatgctctcagcaatatttgaggactctttgttgacaggtgagattgcttgcactggtatatactgattttgaggattgctatatttttgccttttgtttcttcctatttttcaattagagacgctttagttgcaaacaaaatcaggtcgatattgtcttagttgatgtctgaatatacttgggtgtgatatgactttgttatgttgtcacatagttctaaaagtacgccgacttcttgtcaatttttagatttcctcatactgttcttcacggaagctcttttctattgcggtgttgctgtgtttcttcttctaattgaccgtttgaggcggccctctatgccagaatctactgcaaacagtaatagaacgctggcctcacattttggacaacgaatctcatctgttgctgctttggtacttagtcttataattcccatggtgacaatggggttcgtctggccctggactggccctgcagcatctgctactcttgcaccctacctggttggtatagtagtccaatttgcatttgagcagtatgcaagatataagaagtcaccatcttggcctgttattccaataatctttcaggtaaagatacttagtttattttcgctcaacttggtttcttatcttgactcatttgataactacaaaaaagactagctgaactattttacctttgaggactataaaaatcaacttttctgtttgatgctttgcaggtttacagattacaccaactgaacagggctgctcagctggtaacagccctatcgtttacagtaagaggagctgagatgacctctcataacttggcgataaacagctccctaggaacacttctgaatgtcctccagtgtctaggggttatatgcatttggtctctatcaagcttccttatgagatttttcccttcacctgcttattcttcttaataaagcatcaaatttccttatataaccagtgaaacaacttgcatttgatctttaaaattcaactcttgataggtctattttttcattttttttttggttgaaaagtgaatggatactgaagcattttgacttgtccacagctagttacaaagattttctcaggactttgtataccaagaaagatactaagtgcagaaaagaaagcaaaattggtgacattttttttttcatgtgctttcttgcaagttaatacccattgtacataaattatttgtgccacagattgttcaatgtttatgatcctaaaatatgagcttaaactgttgggtatatcaataaattatgtcgtgctcaagtttggttcttttgatagtaccctaaaatatgagcttaaactgttgggtatatcaataaattatgtcgtgctcaagtttggttcttttgatagtacttactacttacacatttggttatgggatttccctagccattatattataatctatagtttgtttatgagaaggggtagtttggtaattttgtttacctttccatgatgaagctcaactaatagtcacgtgactatcaggtgacacactggtgaaactgctcatttgcatcaatgctcaatactattaatagtattacaatgtattatatttttattggtgtatactaaaagataccagtagtatttagcatgctcgtgtgtgtcaatattactattggtttaattaagtattgagttttatataatttaatataataatttttaaagagtatcgttagctaattataagacaacatgtcaagaggtgttagacactacagatgactaatagaatactttttaatttaataacactaatcattatatgacataataaataaataaatataaataatataaaataacttaaaccagttataattaaaatagaaccgattctataacagtgttataatgaataaaaacaaataaaatgaaagaattcaaactagttataattaaaa

SEQ ID NO: 296621 - DNA, 2996 bp, Cannabis indica
cccttcattctgttcgccaccacctttgaggcaattttgtagagcacattacaaagagatattggtctcatatcactcatttgtgtggggtatttcttttttggaattaagacaatatgagtatcattaatggaatccgaaaacttgcgtgaatcaaaaaaaatcctgaacaaattgaacgacatcagtcccaacaatggtccaatgtttttggtaaaacgccggagtcatgccatccggaccgggagacttatccagatgcatttggaaaagtgcacttctaacttcatccttggaaacagggattagtaattcatcattttgctcacaagagatggaaggccaaattctatccaagaccgatcccaaattagttccagaagcttgaaacaagtcacggaagtagcccgtgataacaccttgaagccccgattcgcaattgacccaaacaccattgttattctggagctgactgatgctattgttgcgcttcctagaacttgcaacggaatgaaaatatttactatttttatcacccaagttaagccaatattgtttcgacctttgcttccaaaaagtttcccgttgagccaaaatctcagataacttgtcctttccttccttgtggagtcgaattgagataggatcacgaccccatttagagtcacagatttgctttttacaaagattgatccgttggcgaaagttcccagttatatctcgaccccacttcccaagcacctccccacacttagctattttatcttgaatttccatgaggcccgaacccaaccagcacccctcaactaactgcttacataatggttcacgaatccaagcattctcaaagcaaaaagagtgataagtagtagttggaaaagtacctttaagcaatagaaagatagggcagtggtctgaattagtgatctccaagttgtataggatcggcagtgggaaaatagacaaccagtcactagttaccagagctttgtccaatctttcttcgatccaatcgttgctatttctccctttttcccaagtgaatggataaccaacaagaggcaagtctatcaaattacaatcccccaaagctatattaaacccctacattaaacggtcaggatacttcttgccccctctcatctccgattgagagcccaagttgttcgtgtctcccataaggcaccaagggagattactatcatttttaagagaacgaaagaggttccaagtcaagtacctcaactcacgtttcggctcaccatagatgcctgtaaaccgccaaggaagagacccctgtaactcgattgtagcatcaacatggttgaaagagaagccttgtattaccacctccttaacatctttccataataaagccaaacccccactgtggccacgagcatcaacaacaaaacaaccttcaaatcccaaatggactctaatacattccatactagttttattgcataaagtttcacataaagataacaaattcggcttcttttggaaaacaagatccgataagaattggttggcccgcgggttcccaagcccacgtcaattccaacttaaacaactcatacctctaggcgggcctagaaaccagaacccgccaaaagcccttttttggaagacccaccatatcttgctccatgtcatcagtgttaccagaataagcctttccttgtggtcccacgttaccctcctcactagagtctggccttctcctttttgagtcaataattgtagtaattgtggaataaaaaaaaatcccattattattcacatgcaaagtcatatcctcttcattgactcctcttcattgactcccctaatatcctccttgtatggacgcctatcatttagcaaatcaataggatttgtatcatatccatgattctggctagtcgatccccccaattgctccgggttcacagggatcaaattaactccttgttcaaagttgttcacgatggatccctgccttgtatcatcccgaaccaccgctcctgaccggagccactgcgccccaaatgtcgagtgtcgcctctgtagagaagccctcagttctagagtgtaaggtttctcctggagatgtaacggctttaggaaaagccttggacaaaatctctctgaatgcccgattataccgcaaatgaagcagaaggtagggagtttttcgtatttgaaattcgcccaataccaagaggcgttatccgtactgactttcatccttcgctttattggtttaatcacattgattcgaactcggactcgaagaaaatccctccaaacacccacaaagttattaggatccgattcaataaacgtaccaatgaaattcccgagcgctgtcactacactcagggtcatgttacccggttgtagattatgtagttgaacccacatatctagatgattgatctcaacaagccgtgggttatcaccttccttgagacgagtaaagataaaaggcttctgatcataagtccaagggctcccgtcaatgacaagttgtatatcgatctcgtgatagaattgaaataggaataaattcggattgagttctttcacgtacatacccatccccggctgccagagaaaagccatcatattctggaaaacgttaaagtctgatacacgccctgttaggagtttgcccactaagcaccatcgagtatctatcgccacttcttcagccctgcctgtcggaatccgcaaaacttctacctcttcttcatctaggctaatgagttcatctctgttctccacttcctttccagtgatactgcttgatgccattgaaacacacacgaacgagaatacagcaaactctcaaaaacaaagagacaaaaaaatgtatcaggggatacgactaacactgaaatacactaaaaaaattatacattttttattatttattttacatactttaatttatttatttttattaaattcaaataatttcatttttttaattttaatattttgataaa

SEQ ID NO: 296622 - DNA, 4540 bp, Cannabis indica
tggattcgattatgagctaaactctctatttagggatttgatggatattgactgagattattctatggattaatgttatttgattgttctttcttcctatattattgtgatttattcatatttgtgcttatttcatgtttaagcttgatcaccttttgcatgttctatgatctcaatacaaaatctgaaaagtgagtattgagaatgctctaaatgaatagacataggttttgatgtgaaacgagagtattcacatagcttatgtgacttttagattattgcttaatgcaaattgtatgttgttctatctcagagatgcagtagttggcatacaatttaggacctttatgatctgaaaagagtttaggttaatttataatctgtcatcacataggaggaagaagaatggttaattagtgttaataattgggtaatcaaagcaattgaaatcatatccctaatttcacatccattgttaaaccttttatttgtttgttttatttaattttgcttagtttattttgttcaaagtttatttattcgattgccaaatagaaacaagaatttaattgattggtacttaactgcagtcctcgtgggaacgatctcacttacctgagtattacttgttaaaacgatacgtatacttgcgtgttggatttatcacaacatctagtccaggtgtttgctgaaatccttttacaactaggcaagctttgtgtatgttgacacccccatttgtattgtatttaattctataaagccatttgttaggataatttttatgtctgttgttgagggaacaagaatccaagtctttttctttttgagagcttggaattcttggttcatggctttgttcgaatgagtgatagcaagggcctattttactgttgttggttctaatctattcttgacttgtgtaaaaaaaagcttttggtttaaacactcctgctttagatcttgtaaccatagaatggttgttgataggtagagtgggtaatggctatgtgaaaatagaagttgaggaatgtgactcttgttgaggtaaagggtatggaagtgttgagtctgtggatggtgtttgacttaagcttgactgagcagagtatgaactatgtacagaggatattttgtgttaagtttgtccaggtgaatgaacaatattatttgaattctgaacaaactgagtgttgttagcactttggtgtggtgtgggggcattgataaagttgtgtgcttgaggtacagaaaatgagttagagtagaccacaacagaagatgactaggaagaatttgatgcagggaaaagttgagtgtatggaaactcagactcattaaagtttacacttcaggctacatagacacgcccatttgggtgtagacatctgtagcctttttgaatgctactgtaccccaagagcaagcttttgctcgatctaaaggccactttgtgagagttatatggtgttaatagagagaaacaggagcagccaaatacttttaacatgttgtaatcaggtggctatttgtatagttttttaaagggagacatattgttgagtatggggtgggcaacctattaatcaagtaggtagctgaagcataagcttcccaccaaaaattgagtggcatattagcttgagctaaaagagtgagtcccatatcaactacatgtttgtgtttcctctcaacaagaccttgctgttgatgagtatgagcacaagattgtctaagtgtgatccctagttgatgaaacaggttgtacagaggtgagactctttaccaaggtctatttggacactttttagtttggtttcaaacatgatcaacaaattttataaatgagtgaacatatttgtaacttcatattttaattgcattagaatatccacacaaacctagcaaagttatcaacacaacttagatagtacttgtagccatctctagaagagtaaaaagagggggcccaaacatttgtgtgaatcatttcaaatggagctcttgttttattgtcagtagctttaaagctaaactaatgcattttgttttaattgacaagcatcacaaaacaagggttctttttttactccaagacacacttgagctaaaactcttgctagaattggcttggttgggtgtcccaacctacaataccatacagaattggttttatttttatcaagaactgaaatactagaagttgtacaattaaaggctggagaaatacaactaaaattaggtttacatgactgtaacttggatgagacaacaacattggaaggggcacatgaagtttgtagaatccatcactaagagagccctttagaacaacttgcttcgttttcttgtccttgataagatagcacataaagttatattcaagaacaacactattattagctagtaaacttagaaatgcttattaagtttttggtgatatttgggacatgaaagatatctttgagcattaaagatttagtaggagtatttgtaggaatagaattagaaccaacatgcaagattgggatagaggcaccattgcctacaattactatggcgttttctttataatcagtggtcttgttgagattatgtgtgtctgtcgagaggtgatttgtagctccagtgtcaagataccacgtgccaggtgattcttcaagaatagtaaattcagagatgttagcttggggattctttgtcggagatgttgaagtagaagcacctagaaattgaggactagtaaatgtgatatcgaatcgatgataacacttttgtgtagtgtgtgtacggccatacaattgacacacagatttattgcctctaccaccatgattggatgttgatcctctgcctcctctaacaccacctctgtatccacaactacaaccattgatggaaagattagcaatgttagcttgaacattatttaatgaagaatacaacaaacaccaacataaactataacagacttgtaactaattaaaagaaaataaaagccaaaaggaaaactagtcttgactatatctattactaataattaattacaaacactcttcatattataattttattttattgtttttggttcactttttattttttactttgtataataaatttcttatgctctaaatatatgcattgttgtatatcgaaatctatcaattatgaagagttattttcatagatattaaagtttgtggtctacttattttttaaaatatatttctttctcatatattagaagtaattttagtgttgtagtttatcactagtgagaatggtacatatgtattttcaataattggttaggtagcttataaattatacaataaaaaacaacacacaatgtgtataatataactatgaccatatggtctaatgaagtaaaagatatattaaatttagcaaaaaaaatagtaaattctatatttactatttagtatattttttataattatgctccaacacatataaacacatataacaaattaagatgcaaattcacataaaagataattatcattaatgataataaattaaaagaattgttaaaaagtattactggtacccagtacttttctcagtatcatattactattggtgtaattaagtattaggtcttatataacttaagaaaataacttttaggaaatatcgttaattaatcttggagcgtcgcctataaaaaacgctaaacactactggtgtcaataacaatattaataaattaaatatagttttattaaaaaataagataatatttatattataactaaaaagtgtattaaagtaactcattaatactaaatgaaaataatataaataaaaaaatgcattgacaaaaaagtacattaatgctaaaattatattgtgccaaaagtacattaatgctaaaagtgtctcaaagtaacttattaattatgtgccaaatttgacacgaagttatatattgtattaaatttgatttaatttttaacatgtatcatatttggcataaattttagcacactattagagagtaatattttacaaaaatatcaatatatatagcattgctaattgcaccacttatttgatattaaggtggtgtttaattgaaggtaatagaatgaagtgaaaagagattaattttaattttattttgtttagttgtattctaaagtattataatttcatccaatagaatgacttttctaccattttggaactattttatttaaaatagaaggaaatatcatcctcgtgcaaaataaaataaaaaattattataaatataattcttttttatgaattttaaattatttttttggtcaatcagataagtgtattgattctacaacatatttttacaacaatagcatcaccaattattagggggtgttcacagggtcgatcctaggcatttattttaggggcccaaataaaaaaattacctatgaaaatatatatatacttttaatcatttttaaaaatatcatttatctttatagtacgggcccaattttttttttcctatggcccatttcaacttagg

SEQ ID NO: 296623 - DNA, 1492 bp, Cannabis indica
actccctaaaaactattatattaaattatatgggacccgatacttagttgtaccaatagcgatattgacacatagaaaagtgctaggcaccactggtaccctttagcatttctcatttagttatttgctcctcatatccaaaacaaacaatattaattcgacatgactagctaatttatatttcataaatatgtgcttaaggatattataaagtaataggagaatactccagtggagtctcaaaacagactccacgtacaagctctggttttcatttaaatcatttttcttttcaacactttttctttattaatttctgcaatatgacgggtaattcagatttgggtatgaaacgaaaccatatggtaaatgtaactttttttttttaattaaatatcctgacgagctccatcatgattgaccgatctgccaatcttaatactccagaagcttacttaattggtaggtctcttcgaataaaccaatctttgtgagatgcacgtacgctaagtggagttcccatcatgcctaaggatatacagttagcttgtaggattagattagaggcaatagagcttaggttttgcagcagctcatcacataattttattaacttagttaagatgctatgctagttgaccaatcacttggctttgttagctaaacactttatataaatacttgcagcttcaaaaactcagccacttgaacattcaatagctttaacaaaatcatggtgccaacacgaatgaccactaatcaagatactctagtggtggatcgaagcttccatggctcctccaccctccaagaaacgatcctcctgttctatttttgcgctcacgaagatgtgcaatagccctatttgcctaagcactgcagaccatcccggttttggactggctagctaaacctgttctaacacatcgcaacttggcactgtcatatatactcaactcacacattgttctcaccaatattaattttatttatgccacagtttcaattcaatttattatctattagtgcccttttagatcacaagatactagtcacaatttcatatttttttacctctagcacttgttatattcagagcccttctcactttgaggattgaatttgagacaactagttgaattgacaacctttattatctacaacaacaaattctacctaaagatggctctacagtacatgcttctaatgttccattaaacaaaattcactggcatacttgttagaactttactagtactatgttaactagttttttaaagtgtatttaaatagttttagttgtgttttatgtaatttgatactttttgttaatattttacaggtgtagtattgaagaaaaataaagcaacactactacaaatatgggctttagaggcagtttttaagacctttcagcgtcggttttagaaaaattcactactgacgttgatccgagtgacgctaaaggggtatgaaataaccgtcgccatag

SEQ ID NO: 296624 - DNA, 3351 bp, Cannabis indica
atacttgtgagtagatctaagttcctggtaaaataacttccaacatgaaatattgcagatctttaggcatttcttcattcttggaatccaagtacgtcactgtttgcgactgaggttggatgagtacaggaatccagtgaagcctagaacttgtcaaacatacatgtaagattgttaatataataaatgtagagttataaattaatgaaattaattttaaatttacttacttattctgataggggctataaggaatatctcaagattggttgcggccatatgatcgacgtgcattacaatgggaactgagatgccatacttaaatggaaataacactatgatgtagaaatgcatattttgtgttcaatccattagtgctaagtagtcgagcctgcatgtaactatagacagtaataactcgtcaactaatcttgtgacgagaaaattacaatttataggctcaagtggaaactcataactaaggtgaagaaaaagatggaatataaactcaagtgtttatctcataatagagagaaaatgaaaactttctattactctcaatatggtggttacaagaatgattttccaaccccctctcacacttgagaatggagtatttataggctttaatggcctgagatacatggtggtcccaaagagataagctgtcacttttaggctgcaaactacaagtgtaggaggtggtcttgcaccccgtacccttgtatggcatcaggtggctgcagtgtacccttgttcgggtcctcagaccttatagatacggtgcctccactactcgtacctccttcctttcagagcttacagaaagcgtggtcatacgtttttcccatgcatgccttgtcctttgatttctctcccaatgacattcttttcaacatgtattcaaattttccccttactttgcattactcactccatacacacacgtgggctcacatgcgagcccctcatatgtctcacacgtgtgccactcacaccacactcacacacactacaaacacattgcacgactcacatgcaagccctttacacggctcgcatgggagcccctctctccatccacagacgacacacacacacacacacacacacactacacacagtacacgactagcatgcaatcctctctctctctcacacacacacacacacacacacacactcaacttacacactacagggctcgcatgtgagcccctctcctcacgcacacatgacacacacaccacaaacacacatgcacgactcgcatgtgagcccctcacaccgtaccccgctcgtatccttcttccatgtcttcctctattcacgaatcgtcatggtgtcggtccttgtggtgcttcaaactaacccaaaaattttaagcaacacttgcccctagtctacaagaatttttttaagtgttcttatcgactgaacaaattaaggtcttgcttggttgaagtgcaaaccttatcttcttcacgttattcgagaatgtgcccactatatatagaggacctctcttgctagattttcacttcaacaaatcatcttggagtagtggcaaactcccttcacctttcctaagaggtcttgggtttgattctccccaaggtcagtctttgaacatttgtttctttgatagcttatcatcatttaatttttttttgcatatatatatatgtgtgtaaatatatttggacatgctccatgcttgtctctatcatatggcgtgttttgctcttgatcatgaggcatcatcttgatgcttgaattttggtttatgtggcaggcgtcttgcttgctttagagtaattttctcttttagttcaatctctcttgcttcacgaggtattgtatttattcttattctctttatttttgttgttcatgcaccatgcttttagaatacttgtggttatggtttgtgtgttatctttgtggtcttagtagcatcacgtgtgtcctccttggggcgtacacccccatgtgttatgtctagtgagctcaataccttgatgttacctcttaggtggaggtgtcaaggcatcacgcttcattgaacctttcaatccttagcctcatttggaggtaatctcagaatgagatgtcttctgcggccgatgttattgacatatcatcctctgatttgcagggtactcaagagatcctatacgataaatatgccagattaatgtccgagataagggattatttagaacacattattaactatagagagtgtgaggagagggttcgagccaaaatttatttggttttgagtggagatcaaaatggtttgattgtcgattccaacatgtatctttctaagcttagcgcatcccttgttgaagtttagagtcacctgatattccacacccactctctccttactctcgggggtacccagggtcaaggcataggcttgtagggactcccagagaaacaataaatatgaggctcgtgcttaccataatttttgtgtatctacaggcatagctccacccaaacaatcgactcaacctgccacaccttgcgagcgttcctcttcttatgtgcttaggaaacacaatcctcctttgcctagcgatgtgtcctttgtctacgcaagcgccaggagcactatgtctacgaacgagattcacaaggcgatggatacctttaaagtgtgagccacaggtaacttagtgctgcgtaggcctcggcaagatgagtttgaattgtaacgctcaacttacttaggcacgctacaataatttcttaaatactatgtaagcctttgcttatcaaagagtttctcaaaaaacgtgtcaaaataaaactttgaaatttaaacttaagctttaataaatacatgactttacctaatagtcgggatcccgttcaaaagttacaacaacttacagaatatatttctagaaaagtgttgcaccacaactacaaatgtaagcccctgttgtcctaaaactgaacgctccaagcttaactatcttgatatgtagaatcatcctcaagctttggcctcactggtgttcagtctttgcctttctttaatctacacatccgaacatatctatgagtcaatagacttagtaagaaaaaagtataaaacatataaacacattactgactgcatctaggtgcccatacacctatctacaaggcttaacagataaattaagaatgctcttgcctttggtatgcttaatcataatatcagccactaccagcactatagttgcgttgtgaacctggcattatagttgtaccgctataataatagggaaatttacatagtatactaacttttgttatttttttacaaaattactgccaggcggtattttt

SEQ ID NO: 296625 - DNA, 2845 bp, Cannabis indica
atatttatatatatgtatataatacgtaccctccaccactccaagggtctcttaagccattgaagaagataatattgctcccaaacctctttaaaaccctctcaatgccctgcatatatatatgtcagttaattaaatttcaataatataattagtttataaaatgtaagtaataatatataatacatagtgtgaacgtacaaatcccccaaagtgagtggtgatccaggtgcgcctggggtgtatcccaaaggctcgttggcaagaggaggctctgtcactgtaatgccactcataagctgggaatatactttcattggtgctaccacctgttggcaatattatctctgtacatgcctgtaattaattaatttcataatatcataccattattatttggttaattatcatatattattatgtatgttcagctcacttactgtttagccagatttattgggcccttataaaatattgaaactgagtatatataaaaaaaacaaaatacattaatattattatcagtagtatataaaacaaaacatttcaccccattaattatacaagaatatgtgaagcttaagatgtctgaaagtaaagagaacattccttttgctaaagtttattatcaatattccatattgataataagagtcatagtactactatatatcttccccgggtaaattcgcaaagtacagaattgatatgtaaaaataattgatttaatctaatttgtacgtatttatatatgttttaaaaaaaattatttgtacaattaatattttaatataaaaataagaatttaaaaatttaacgtgtgcgataaatatattttaaaatttagtaaattaatgtacattccatttttaacataagaaaattataatttaaaataaaaataaaatattttttatatataattttttttttcaaatttttttatttttttatttattttaatttattgtttgagatataaaacaataaaaatttattttagtttattattatttatgttaaaaaattatttttaaataaatattaattaatttaatattaaaaaaataatcaataataaattaaatttgaattagtatgtagattgaatatataaaattcttactgcgtatgcattatgaaaaaaaatagtttatagctctactatttatttgcaagtccaaaattcctctaatggttaagcccaaaaaacaaattcaggagagaaaaatatcatattttaacctgttttggaaaatatcatattcaatttatttctcaaaaatattatattttaaatttttaccattatatactaagaaatacaaatattttttcagaaaaaaaaaacacatgctttgattctttcaaacaacttaataaatgcattataatgaatttaccaaaaacaaaaacaactcagtgatttaatagaggcattactacataaagatcatacatatatgtatttatttttcacaaagggacaaaattgaaagcttatatatttatatatattatttagtgtagtgtgtatcttctctcatttatttttctttattttctttttctaggtgaaataagaattctaatgttcatttttctactagctagtgtacttgtttaaggagagataagaaaaaaaggagagatcatggttcaaacctaaaattttgaagctattaagttattaattgattgtaaaatatcattacgctacattaaaaaaaaaagtgtacttgttgactttgaaaaagattaaaggaaaaacatgagaatcaatcatactaccctactcaactcatcataattaatattataagaagaatataaatatatttatagcttgtggccctagccttgaaaattttagtttgtgaaggatataagaactgtatatccaagatcgaatacacattacttttattttatactaagtaccattccccaaagaaaaacatatttaatcaatacatatttatataggctggggccatgaaaggggataatgattttgaaactcgtggttcatcttttagtaaccttcatttgatataggctccactaatagtggataatgattagtcataatcacatttatgtaaatatataatatatatttataaaaattctaataaagggtataacctatgcatgtgagacattatttttcttggatgcttagagatgctatgtttactaggaaaaatcttttgattaattacaatctaagataacccttctatttatatatgatgagttgtatcttgtagataatataaccatagatatagagattttgaatattatttgaaactttaaacttaaaagagcatatatagcataataataagtaagagctatcttcccctttcaagaaaagagtaggtgctttctttccactaggtaaaagagagattaatatcattatactagattgaaaaatggtaatgctataaaagcataataaaatgtaaaatgtaaaaatataatttattatgttaaaaattttactctaaactttcaaaattataaatgtaaaatatgtcacataataaaaaatattcaaaatttagatcataatatatcataatggaaaatttacatgacaataaatactatacttttatatttactattatgtaatttttaaattttattattaaattttaattaacatgttcttttgcattaaatgacttgcattattgttattattaatttttctatttacttttgaattattattattttatattttttaaaaaaatatttaaagtgtaacattaaatgacatataaattttgtatactattaagatttataattatgtagtgtagtataa

SEQ ID NO: 296626 - DNA, 6617 bp, Cannabis indica
gctgcaaccactgtaagatttcttatactttatatgtgtttatttcttatcgttttagaagttcatatttaggatgttaaataacatacaattgttagtaaatctaagatcctggtaaaataattccaacagaacccatctaattggtgcatgatttttacctatctttgaggtattaattagtagtggaataggtatattttgctaccttaactaaagatttgatgctatatattggactgtttgtgacctgatttagtgtaggaatacattgctgaggttatgaatggcatattgcaggttttgggaaaaacttgctgggtatttgtgaattctgttaactcggataggattgctaggccattgctaactcattgctgtaacaactggagcataccaggggaaaattaaccatccaaatctattttctaaaatctcaaattttcacaactttaattacttttggcttcttaattttagtttatttagcttaaaatattatttctaaactccaaaattaaggataataatttttctcttgaattgattagtttattttgctttatattacttataatttttgaattgcttttagttggttttacattatttagtgtaaaagttcctgtggatacgaactttgatacttatcgtattacttgtttgtgattgtgtacacttgcgcaattataaattaatataattttcacaacattgacacacgattggagatggaagttccaaagaaacgtctacacagtgctcgatcgaagaaaaatgctcacgaacttggaaattcgctctcaatgtttgctctgaaaactcaagaaatgtaaagtgtataatgagattttttgagatatttataggcaaagtaaagagaaggaataagttttgggaattaattttgaaatgattggtatttcccccaaaaagttcaaaagcctcactttgcatcaaaaaatagcttgggaaaacgtgtagttgtcaaacacgatccccaaggtgcagtaatcaagggaagtaatcatggcaaaaagatttggaaagacaagaagaagatttgcttttggttggtatgacacccagactaggtggaccgtttgagcaaagtcacgcgtcacataattgtgcaaagagagaagccaaaatgtcccggtatgactagaactccccgcccgaacttggggggcaaatgttatcccaaaaattaccctaataatgtggcatagaatgatgtgacacatggcgagcatagaagaggttggacggatgtgaaactcttaatataggtgcccagaagatactggtcggcagtatatgcctaataaagccgaccaacatcatataggtgttagatggagcatatccactagcgttccgagtaaccaataattggagcataagggatgttcgaccaaagacccttgtgaagggaaatggccagattcatctcttcaactgatttccccataaataggtcaatcaacactcctataagtgaaagattgcgagaatcaagaaagattaaaggatttcgtagaattgactcaatcagcattaattatttattctataattaaatataaatattctacatcattttccctataaataatgatcatattcatccttaagagaacatttacccaattgaattgtttataactttttcaagagatattgagaaactcacctggccagtctttgtgatcttgatattctttcataagcagtacaacaaaaaatggaaccaatcaaaggtgttgaacctttgtaaattctcgtgttgtttatagtctttattaacttgatagttcaaatactcgtattatcgttttattgtcttcgcttagttgactagaaacaaggtcaacgcttacaaagacaaacagctaagtgaagtgagaagtcattagtgtgaaaataagtgtgagaagaaactttaaacttggtatcaacaaaatgaaaagaaaaatcaaaatggaaaccagtgtttgtataacttacaccacgaacaacaatacccagatgttcaatttcacacagcttgtctaaatttccaattatacttcaaaatattgtacaatgatcccacataaagtggctgcaaatgcagggcaatgatctcccatatcagttgcaagaggatttgagctgacacaatacgaccccagccacccatttttgcgcagttgaggggctggtcatctaaactatgagattcagaactttcgggagctggaagcggctgactttgtgtaggcgagttttcagagctttcattgtcatcgtttggtggatcatcagaatcttctctcttgtctttgttcttctcgctaggactcccgccgttaccttccttaggggtgcttttgatcaagtctggtcgtgcttcaacaccaactcgtcttagatgtagctgtcacattgcagacaccagttgaagcttaaaaaagtaaaacaaaattaactcttgcatcggcagccatggatttttaaggaaaggaaaaattagaaccaatacctgaagatgtagattgacttcgtctgggcgtgaaagaaatgggaaatctccccactcttcaaatacgcccgtcttgctccaggatatctttcactcaattgatctttaagttgttgagggattgcacagtagtcatttgtcttcagtaggagatcatgtagacacatacaggaattaaaaaatatccaaaatgaagaaaagaaaaaggaaagagttttgggctttctttactacatgtatgctagacctaataatggaaattcttgtgctgtctgtgttgagccctaaaaggatgtcgtgaaggaaaccataaaatgccagcagtgcagaaaaattgtcttacaaaacgaatgaatgtcatcaattgatagtccgagagagaaacaagagttcaatggtgaaagctttcaaaatatatatactaaacgtattttataactgtgactctgaggaatgttcacttaaatgcatggataaattaaagcaagagccagattaacatacatccattattgtgattagtgaatctgacaggaggagtgatccaacagaagcagcatcaaccgtcaaagtcaacctagatgccaaatcttctcttgaaagtgtttcaacctagatgatcaaatatttgggttaagtataacaagttatttgtgtatccttaaagtaattagccactaatacattttgagaataaacacagaaattaaaaatattgaataaaaaatagaaaagtatatgccacatcttaaaaaatgttaagttccatgttaagctaaaacactgaattattttgcttgaaataaaaacactggattatttaaaaggctcctcgagtagattgctttatagtatagtagaatacagatataaaagcaaactagctaaagcctcctagattctacctgagaaacaacaaagtccacagaatcagcaatgaaaggctcatgggggccatcgcgaattcccgttaggacatatctttttaataaaaatgagggtgtccaactaactctgcattgggcaatggttaaatcagtaaagtaaattaaatgagagaaatttcttagtgaattatagagaattattgatccaataataactaattctgccatgtatcttatcagagaacaaagagtttgtaatcgtatctctccaattggagtgaaagacatatgatatcacagtaagcaaggtaataaattaggtaaatgcctacgtttgactgtatcctagtgtcacaagttttacagaagtaaatttagttagagacaccaaatactaatacattaataaaatccaattgaaacaaagaagtgtatcaatatccagaaaaagaatgaaagaatgctaatgcgacccccacgtcaattaacaactcaaacgtacttctcatataacttaataattttggcaatccccattctacattcattgcatatgaaattaaaacatacactggagcccatgggatcgcagcagagaaactgcgagtatccaaaaaggagttggatagtactaatgaacgaactcgtctgggacgatgatgagcaaaaagttgagccaagaagccaccaagcgatgtaccatagagatgtatctgttggaaacacaaatcgataaaaaagaacgttacttggtaatcacgtaagtacgatcactatgaaaggtgagtttcatattcatttataagtttaagcaaatatgattttactgtgttcatacagtaactcaatatagtctgttttcatcgggaaagtggtataataggggaaaggatgtttaacaactttagatacagttgagtccaacgcctgctttttaatcacagttacatgatcacaaccaaattagatcaatttttatttgaaaatccctgaccatagctagccataaacctagcaatatactttataacactgatatttaatacaattaaatatacatagttaggcacttacatgatgaacatctatagcatccaaaaacttttcaaatgcttgaatccattcctgatgattccagacccgtggaatatcaactgagattatccggtatccctgtacatttaagtaaggagcgaagatacaataacttttatgtcaattaatccataaaggaaacacttttgagaaagagaaaaaggtcaagatgaaagaccaaaatattaactcgctatgtaggctcacaagtttataaaaatgacccgatggaataatactcactacataaaagtacacaactcgcaaggattttttttcctccttaacgtgaaatttgccaagctaacaatataaaatactaaaatttgtaaaataacctcacttaatttacactatgcgaccatgatggccacacagtgtgaatttatggtcattttgcaatcataatgatcgttttatggttgagcgatcatacatggttattttgccaataaaatttattgtaaagttattttgctaataagaattttcatgctatatttacaaaacactcttcagccaaggacaagctctgtaaaaaacaacaatgatcgatttgagaattgtgcagaagaattaataccagaatattaattctttgtgaggaaattagatcaaatgcattgatatcaaccataagattgtagtgacactatttaaataaaagatataacaaagtatggtcagatccactaccttcatagacaacgccatgatctgtttgtagtagacatccgccgttcctgctgttccaggaatgcaaataagtggaggaactactttaggcccaaaatcataatatcgccactgctttgttccaatctgcaagcaagtctcatcaccaatcatgaatcccaggttagaaatagttcaaaattaacatcatttaaatacacatccaacacaaggagaaagccaaaaaacacaaatcaatgtttcgtaaacaccaatcgtttaatcattagcagcagggttttgtggctgaaacaatgacatgtaaagtaaaaatgtaaacattacaagcaaactcttacatgatacagaaatcaacgacataaaatgacatacaatgtgaactcaactacaattctaagcaaacgaacaacttcataatgcaaacgaacaagcatattagtaatttagtacctccacagataatttagaccgaaatcacaactgaagcaatagttaacagcgtaaaatttgcaaacccaccttacaattaaaaaaaaaaaaataaaaaaaaattattaaaccaactagagaaatggtcaagcagcgatcaagaaatcacaaaaatcacaaaagaagccaaatctaacaagaacatgaacaaaggggaaaaatcctaatacagaaaacacataaaaatagggtggaataatcgaaaaggaagagagagagaagtatataccgggatcttgtgaagagggacctgagacttgaagtagatgtaatcaccgggcgccgagaagacgcctttcattgctaattactaagttcacacctccatcgttgaattattcgactatattcaatcgatcaatctctctgattttgatttttttacaaattgattgagaattaaattaaactaaattcgagggattggggagaagcgtagcgaaatgccaggtggctgggcccatttatttgagtcaaatgacgtcgttgccctccatctgtccgtcatcgttaacttgggtgcgcacgactgtctgatgcaccataacgacacacttttatttttttaaaaaaataaagttcataataaaagaaaaaaatagacatcgccatcactatatatcataagctcactaaatcatgggcaaccaaaaacaaatcctatgctaaaagagttacaacttaaaaatttatgagaaatcctattacaatgagtacaaaagttatcaatttttcataacaacgctatttagctacataaggaccctcccaagttaaatactcatgtagatgcatttttcgtatttgtaaatactcggcttagcactaaatcaccgacattaaaaagtcttttcttcacttttttattgaaatatctcgtaacttggtgctggtatgctgcattagtaatttgcgactcagta

SEQ ID NO: 296627 - DNA, 4297 bp, Cannabis indica
tttttatcttattttaattttagtttttttttgtcaaacaatttaggagttaggtggttgattatatgactcgttcttctaattttaattcgggtcgtgtctccaacagggagatatcccaattagattccatgctattattttaaattattgttattaataaaattgcatgatttattaaaaaaaatacctaaacctgacccgatccgcaccatttaatgcaatttattggataacattgtctccacatggattaaatgtaaaaattattgagtcatatataagaacatgagcagactactccactcatcactaattaattttgtacatggaatatcatgattcttaacataatcaatcactaatccaattttgtggttttttttaaaaaaatattataatatgtttttagaaaattctataaaggggtgtactaatacacatcttatttattttggcattcaggagaattttttagtctattttttttcgcatgatcatgtacgttgtagttatttaaaacattctgtaaagttttggaaaattaaaaaaaaattaatacgccgaaaataatgttcaaacagtcagttgcacacgtacttcttttattttatacgcgtgtgaaataaattgtttaaatactattttttatattgtaaattattccgaatttttcaaaattttagttgttttcttaaataaatacaacatacacagccataaaaaaataattagactaacttttttctagaaaccgaaataataagaggtgcatcattgcacctttttttttgggtgcaccatacaagcttcttataatactatcttagactctatcttttgcaaaacttatcgattggactttctgttttattaaattacaattcggatcttgtgtttttcaaagtagtacaaaatagatcttgagtttaatttttgttaaattaaaacttaataataacttgatttgaaagtattatgacaagaattgatatacttttttgcatctattcgtactaaaaattagtttcagattgattatataaaaaaacatttgacaaaaattaagtttatagtttattttgtaccattttaaaaagtatacagtctgaattgtcattaagaaaatagagagtcaaatctataagattcaaaataatatttattcaataaattttattttaatttattttattttattttattttactagtccatgttcttcattaaagaattgttaaaagaaattagtggtggtactatatgaggtgttatacattgagtataaacataacctttgattttcttcacactgatccaataaagggaacttttttggtagtgtatctggcaatttttgatattatgttcacaataaattttagagcccaaacaaattaaaaaaattaatattaacactgagagacctaaaatagctagccataatggttcaaaattaatctataagaataatagctcataagaaagtgttaaagctgttcttctgatgagtgaaataactgcataaaaatacattgatatgccaattgggccaataatattatctacacataactactacaaaacacaatcaatttatatacacaaatcaaaatttaagcatctcaaactatatttttacaaatctgattttacactaactaaaatagcagagagaaaatacttgtaagtattttctagatttagtttgtccatgcagatatttttaccaaaggaactcctttccaatttaagctagcttcatttccattgaccccttcactcctaatttcataacaattattatcacttaccatttctttagcttccattaaactctcattgctcaatctccactccttcaagccaaactcagccttgagatgaaacccttctcttatttcctcccacttttgtgaccaaaccgaagaagagacgaaaggcgccacgaaaagagtctccattgtcattcttgcttctgagagatgagctgggaaagttgactctatagagtctaacaaggcttggtaatgcaacacatgaccatcaaagaattgagtgaaattagtactgttcttaagattctcactaggctcaccatctgataaaactattatacctttgtttgatgataacaaatccttggctaagtttagaaactccataacaagctttctacttcttgtgattctcatgtgtgacattccaactgcaatattaaaggccaaaaactctttcccacaaccccttttctttcccttttttacttcactaactaaatcttcaatcccaatttgttgaatcttaagctctagaccataggagctagcatgatcaagaagttgcctcttagtttgctcaaaatcaacttcttcttcttcttttgccaaccttattgaagtgagtttcaacgatttccatcgcgatgaagctgcctcgatagcttgagaccattgcagcccttctctcatgtcaaaatctactatgtgaagtgtgtcaacatcatctggtgtagcttcaaggatggctgaatttgctgtgaattgagcaaatttgacataagggaagaattggcaaaaggccttgaatgcagggttggagtttttgagtgactcttggattaaataatcaatgaatttagtgtcaatttgttgggataagatgaaaccaactctctccaaagcttttccaacagggctgactctgtcaccgattcgcctcaaaatcacatcctttagctcactctgctctttctctatggcctcaccacatgctttgaggagatgaaacaaccctagctcgttttcgatcttcatgtcttgttcaggcaaaaatagtactggttggactgaagttacatccactatggatggtgatgatgatgatgatgatgttgatgagctaggacttgaatattgaagactcccaacactctcatcctccattaaagaaccataaatagcctcgaattcgccactcaattgaggttcaaacacttgctccaataactccattggaaaatcttccatcattggcaacacttgcaaggactgatgatcatcaaattccatacaatattcttcaacttgattattattgttccaacatgaattattattcatgtcatgatagactagtggccaagaggactcaaatagctcttgttgcatcatgttttgaatttggtgatctaaaaatgtaagaagaaataaaagactttggtgttggagtttactttcttggctaagtattatatgagtatttatattcaattaggcaaacaatgtaatgacaaattaattaggaaatggaaatttatttatgtataaaaaaattggaaagaattaggagtcattatcttatcttaataaataattaacatatcattttcactaactttcctcctaccttttatcaaggttcccagctcaggcttctcaacttttttggcaacttcttaatgttggcttatatgacaagtaatctctattcattcaagaacaataatatactttaatctaaacattacttagaaaactatttgtgtctttttaatgcgattgcctttcacttgtaaggaaaatactctcaaattatttttatttatttattaattaatgaaagaagaaaagagattaattttttgtttttttcaaaaatatttttttagtgttttattttcaagaacaataatatactttaatctaaagattacttagataactatttgtgtctttttaatgcaattgcctttcacttgtaaggaaaatagtctcaaagtatttatttattaattttttatttataattttattaattaaagtttttattttaaaaaatataattttaaagttttaaaattacaaaaaataatatgattttttttttaaaaaagtaaaaaaataacgaaaaatcaaccttacgataattataataaattataaaataactaaaaataatttgaaaactaacctcatgacaattatagataaattataaataaataaaaaggaatatcgaacactaaagacagtattttataaataaaaaaattaaatcataagagtaaaaaaaatttgtgttgacatatatttgtaattttttttttaattttgatcaattatgaaaaaatttcttttaacttctaatgctaagagttaataactagaaacaaccaaatgatatgaaataataaggtagagactattagtgacccttttatgcaaataccacaatttgtgagagcccttttgagaaaattttacttgtgtaaagtccttttttggcaagttaggtg

SEQ ID NO: 296628 - DNA, 1349 bp, Cannabis indica
ctctttgtttatatatatacatatagtattgctattagacactagcggtattatcactttcgaaatgtattcatttacgattgactagcgatactctctacaaattattatattaaattataacaatattgatgcttgccaacgctaccttttagtcatttatatatatatatatatatatatatatataataaagtgtgcccaaaaaccatgtttgcagttgcagagtaatcctactattcctagagccgtctttactcacttctttcgctttcaactctctctgcctcttcaaattttcaacaccattttcccaaaaatcaaacctttcttcttctttcaactgtttcatcaaacatggaacaaaaacaccaagatttctcttttacaaaattcccaactctttcccagattatacaagaactaaaacagctatggagtttagctttacccataacaggtatgaacttactagtcttttacagagcagcagtctccgtcttcttcctgggtcaactcggccgactcgaactcgccggtggaacactctcactcgggttcaccaacataacaggttactcagtcttaatgggtttagccacaggtctagaaccagtctgtagccaagcttacggtacaaaaaaccaacctttattagcaatctcttttcaaagaatggttctaatcttaaccttagcatccatacccataactctattatggttaaacctagaaaaaataatgatctcaatgggtcaaaacagagaaataacatcaatggcagcaacatactgtttttactctctcccagaccttttcacaaacagtttgttacaaccgctgagagtgttcctccgttcacaagaagcagttaaaccaatgatgtattgtacgatggcggcggtgtttttacacgcgccgctgaatgtggtgatggtgaagaagatggggttgggggtgggaggagtggcggcggcgtcggtgatgacaaatttgaacatggtgttgttgatgggagggtggtatttggggtggggtggagggtgggagatggtgaggttgtttgggggttttaaggaagtttgtatggggattggtgggttgcttagattggctgtaccaagttgtttgggaatttgtttagagtggtggtggtatgagattgtgactgtattggctggttatttggataatccaacattggctgttgctgctactgggattcttattcagactacaagtatgatgtatactcttcctttggctctttctggttgtgtctccactcgggtatgtatatgtttatgtttatgcttttttttactactattaatactctagtactctat

SEQ ID NO: 296629 - DNA, 3748 bp, Cannabis indica
ctctctctctctctctcccctaatatgagtagtagaaaaatataattgaatcaggtttcacttcttgtgaataagttagctaaataatctcatgagctcacacaatgagacctcaaaattataaacctgatatacctagtttgcccatttctttagttacatggagaatttagtgatgttaaggaacgacatgcatctatcactgggatttgagaatcattagtaaatgtttctaaccatttttctcacaggtatacacctgttcgttctgattctgttgcgggagaactaaatttgtctgacccaactggaattattcttccaggtaagagatttcctgtctgatcatactaagaattttgtctaggcaactttgatcaaatgtcagactagcttagttgctgtcattttttttattgtgggtgttgctagtgctcatattctttaacatcagacattaatgctcgcatatagaactttaaattgcttttggatttgacattccacagaacttccaaaagtagaggagcttgtcctgactggaaaggcgattgaaggtgatgtgctaactgctgttgaagtgatcccaaagagttacactcaacagcatgtgtggagcaagtacaaaaaagatgttagataccaatggtatgtaccatgtccatctaaaggctccttggcatcatcaccattgttggcttttttgtgatttgcaatttgaaaatggcacgcacatacatttgtgtgtgtgtgtgtctgtatgtcttgtatacttcataaatattgcactatagggaagttcctcaaacttatgcaaatataactgtttacttattttgctgcacactgcaggttttatttatccgaatcaggagagaagaaagactttgaaccattaactgcacaacgttcttgctcgtacaagttgcggtttgaagacattggacggtgcttgaaatgtgaatgcattgtgactgatgtgtttggaagatctagtgagcctgtgtatgctgaaacagcacctatcctgccaggtactcttttaaagctaaagtaacttgaacagttacgcaagttgctttcctattttctctgatgaaagaaaaagttgagaagagtgatctagtgttgtttttaatgcatcacacatgaaacttatctttaaattaaaaaagaacagaaaaaactagctaaaaagtcttcatttggtcatatgccggtgcatcacatttctttctcacaattctcgataatgattttatcgattcttgtatttatttatttatacagaataatcatcagattatatatacacacacagacaaatgttatggatccattagtttgaaaaataaagtcctgctgttttgcttactttcttacatggttggttttcaaaaattatcttctgttttgtggataattttttccttaaaatcccttgtgatttatttgggcagggattcctagaatagataagttggaaattgaaggtaggggtttccataccaatctatatgctcttcgtggtgtttacagtggaggaaaggaaggaaaaagtaaaatccagtggctaaggtctatggttggaagtcctgatttgatctctataccaggtagagtttaaaccctctactatttctcatattaatgacatttaattgtcatttatgccccttatttctcaaatatctatcatttagaatgtgatgaaaaggggaagaatattatgtctaggtaaggagctaatggggattaccatctatataaataatatatagattttttcatatattcaatgcaaaattatgttgcaggagaggtaggaaggatgtatgaagcaaatgttgatgacgtggggtacaggctggtggtcgtctatactcctgtgagagaggatggagtggagggacaacctatctctgcctcaacagatcccattgctgttggtaattagatttatctcactatgattttttcttttgctggagttagaaattagcatcttcagcaccccttccgtttacggatattatttggtttatttcatagtttgaaaaatactgttgcacttttcttgctttctttgtaatctgtcattgatatcaaaaccttattgcaactcttctcttgcttttgggaggtttgatgctttcctaccatcttttaccgatttaataatataaatatggtccaaccaatctatcaaaagccttctcaaatttacattgtctgctttgatttctcacagagcctgatgttcttaaagaagtgaagcagaagattgaacttggatctgtgaagtttgaggtaattccacaaaactaaaagcatttgttataaagattctccttcatagactcacaagcttatatttattgatacaggcattgtgtgataaggatcgatctccgaaaaaggttgattattacatgatattcttgcctatttcctaatcactcttttctttttcttttgataaatttaagtgtaaatggtctaaattctttagtgctctctattgcaggttccggtagtgagcaaccttgagagaagaattcttgaagtcaacaaaaaaaggattaaggttgtgaaaccaggttctaaaacgtcttttccagcaacagaaattcggggtacttatgcacctccatttcatgtaagtttatgctcaaactcttgacacttcccatttgctgtagatatagtctttccttccaaacagccaatgatttggacttcggatttcattgagttttctctataatatctgattgaacaggtggagctgttccgaagtgatcaacaccggcttaaaatcgtagttgacagtgagaacgaggttgacctgatggtgcaaactcgacacctccgtgatgttatagttctcgtgataagaggccttgctcaacgattcaacagtacatccctcaatactctactcaagatagatacatagtaaaaaacatcaagactatccattttatttcatgatttttcaatctttcttgtccatggaaagttctgtcattattctcattgttttcgatacaagatcacactatattggtattggcgttttcaacctgttgtgtaaaaaaaagagatattgtaatgtatagtagttaggcttctcgtgtcaaattagtgtaaattatgatattttttgttactacggcactcaaatttgcaggtggggtggtgtacggtattctttgtgttcagataattttgttgtgtattcagcacccatgtaaaaaactacaacttttatttgtttatttatttcaaccttaaaagttttcttattaccatagtttaaaaaatcattagaaaaaaacaatactttttgtatttctaaaatatgttctataattatgttaaattcttgaatgtttttcttccggaataaatagtgtgatcaaaatctgttgtaaatcaaatttaagtcgtattatcagttaaatttattaaagaagtgtattataacgtgcggaaaggtggaaagtagtagggatgtaaacgcggcgggtgcggggattgctcccacaccccatacctccttaaatttaattcactctcatatctgtgtcgatacctgtttaaattaaagtggggtggggtggggtggggattatccgacgggagatggattctcatcgaatacccattacatatatatatatattttttaaaaaatgatgtctcaatgagaaataaaaaaaaataatcataaaaatttagtaaa

SEQ ID NO: 296630 - DNA, 5546 bp, Cannabis indica
ttaggatgttaattaacatacttgttagtaaatctagatcctagtaaaatattcccaacagttactgcgttattatacttaaaattaatttagtaaaatttttaattaactcaggctaatttaaaaaataagttcaagcttcataattaactcaggttaatctaaagctagtaagtaacacttactaaaaattttctaaaaacaaattgttaaaattctaagcctcgggctggaaccatgcttcaaggaataacaaaagacaatttgtggaaaaaaaaaaaaagaaagtcaagtctaagcatttaattgaaagtctacaaattttggcctttagaaccaaaacctcatggagctgaatataaggttaaaacttagtaaaatcaagactcaatagataaagttacaaatatctaaagagttaaaagtatgtaatatcaaaaaaaaaaaaatcgcataattaaaatccctgcggcaaaggcataaaattgtctctgcattcacagaagggggatccttatcccctaaagattaatagagaaaagaaggacaataatacaagtttgattatggcaagggtgggtcagttggtggctgggtattgtatggctgatttttagtagaggcctctagaatggaagaatcagcaaggaaggagcatcaacaactagaagatttgaatcctccaagttctcacttttcgagtgggaagttgtaaggtcaacctcctcagctgctctagcaatcttcgtggcttctttaacttttgctagttggaggatttaaggcattaactgttcagtatcgtcctcatccaagaaatctatcatggacttattgagcttcaaattgggatacaaggaaaacatgaaggcctgctttaatgcctccgacatcctagcctcaagatcttatttttcctgagccaatgcttgggtttggttctccagctccaacaccttcttcttggattccttgtgggtatgtttctcttgttccaatgcttgtttagtagagcttaacttagttgcaatatcctctaacatcttaagagcatcatttttagctcgctctgcctattactacaaatgaaatggtgttttatctttttatccatagttgaagcgaaaaaatcttgtcattcaatagttgagtttgcttgtcatactcttgtgacaaaagtgtatgctttctttccagacttttgatttgagtcagagcttgagtataaagatccttgtatttatatctacactcattcttgatcttggtttccttcttctcatgagcaacaactttgtccagagactccttcaccctttgattgatgacagattccattttgaaatttccctctgctagagcttggacaacctcttctgtcctcttctcaacatcggtgcactctgaccttagcaattcaagctcataagccattttattgattaaggcatagtgcctctccaccatcagatgaaccagtaaggagaattatagacacattagaaaactaaaattggcatacttcttgtccaatgcaacactagaaaacattaacttacaacattggcttggtcctcatataatttgtcatgtaaatggggtctccactcgccatcatggcaaatttttcaaaaccagtttccagctagtaatagcaccttgatccaacaaatcagaaaagaatggagccaaatcagtcccacactggaatgaagtatttttgctacatccacttaattagaaatatcaggtaagggcttatcccacttgtcataacctgcaaactctgcgtttctcctggtagatatgttagaggccaatttcctcaattcttcatactcaacactttttttagtaaaattgtttgatggattccatctgtcctcttacttcttttaatagcaacatagatctgataggaagatcaaagcatggaggaggtagtttaggcagagctatcttttccctagacaattgaatggaggtagtcagaatgcttttgagtactaggtttttagaggcaaatcatgagtatcttgctcgatcgggtacttctcctagtacacctttcaccatcagatatatcagatcccttttgggattgagaatcggaagcttgtcttcttgtggcagccagctgttccaacttttccttggtttccaccttcaccttcttattcacaccatctgaagtccttgatcgcttcatggcaataaggattgtcctatcgcaatcttaagagccggaggtgttgtcttttgagatctactccatgaaacttatgtagttttgcccttgctcttgccatctttggctacttcataaactgcattggctctagagttcatggcgtctataaagttgttaagaatgcccatctagaatgtagcatgttgttctgcaagaagtaaacaaagcatataacacatcaaattatattaaatgtaattacaacttcaaattactagacaatatgccataaagatccaaattgtttatcttagcatacttggtttttcctctaacagaatagaaaatttcctcttgacctaaattagtctcatactagaagaaccctgggaaataaggtttgctaagtatggtccactctaatatggtcatgtactggaagaatgaagtggtttgggcttcttactatgtagtcattgttagggtacttatccttgtctaaatttaagaaatattagttgaacctgcccttatcagcatgacttaaatctgctaaggatagagctctaattacacaaaacagtattttaccactttcaaaggtactcgctctcggagtaccctcgttctggattacatctctgaaatgaatagtgggctcctcattttaaattatttcttctagaaactttcttttccagtcagctaaccactgctctttagcctgcacagcctgtaaggcctcctcaacagttatggctacaattacctccttcacatcatcaagatctcctctaagaaattcctagacactctccttcactgaaattgcgtcaatcttttggtggggagcaataaggccaaactcatggaggttttcggtggtcacaagttaagccaccaacaactccttgggtgataaggaattgtaaaaagttatttttttcctccaactcaagagtcagaggcaattggggaaggaattctagaaaaagtaaaataaaagcatcaagatatgaaaattggagaaaataggaaacaaaactaggaacaggatggaatacttactggctatgttgaagtcaaaactgagcgtagggactctcttcaaggggaagccggaggtgtaaaactagtagtctagaaagtcatgtctataattcatgaagctaaataggcatacaacttttttggagtagcgtcttagatagtaaaagtcaatcttctccttatgaaaggaattcctggatgtgtttcttgaggaattaccaggactaccacctcagcgaaagatagatttcattattgatttgatacctgtggcataacctgtttcaaaggcaccctgccgtatggctcccgcataattaaaagagctgaagatacaactccaagggatgctggatctagggttcacccgacctagtgtgtcgccttcgggagctccgcttctgtttgtaaagaagaaggatgggactcttcgaatgtgtattgactaccgggagctgaacaagttaactattaaaaacaaatacccattgcctagaattgacaatttgtttgatcaacttaagggtaagatggtattctctaagattgatttgagatctgattatcatcaattcagaattcgggaataagatattatgaagacagcttttcgaactaggtatggccattatgagttcctgattatgtcattcggattgacaaatgctccgacagcctttatggatctcgtgaatagggtattcaaggatttcctcaataactttgtaattgtatttatcgatgatatacttgtgtactctcgatcgaaagcagaacatgagcaacatcttcatatggttttacaatggctcagagatcacaaactttatcgatgatatacttgtgtgagttttggttgtcataggtgtcttttttgggacatatcgtcaggaaagacgacattatggtagacccagggaaacttgaagcagtgaagaactggcctatactgagaatagttattgaggtacgaagtttcctcagtttagtgagttactatcgacgtttcgtagaaggattctcaaagatttcaattccattgtctgagttaactagaaagagttagcgatttgtgtggtcagataaatgtgagaaaagttttcaagagttgaaacaacgattgattacagctctagtcttagccctaccttctgatcaagagaagtttgtggtgcattgtgatgcatccagacagggtttgggctgtgtgttcatgcaagcggacaaggtaatagcttatgcctcacggaaactgaaggattatgagcaacgttattttactcatgatttggagcttgtagcagttgtgttcgctttaaagatttggcgacactacttgtatggtgaacggtgtgaaatttacaactatcacaaaagtctcaagtacttcttcactcagaaagatctaaacatgagacaaaggcggtggttggagttagtgaaagactatgattatgaaattttgtatcatcccgggaaagcaaatgttgttgcagaggctctgagtcaaaaagggcctgatcaaatgtttaatatggtgataatttctccccagttagcctttgatatgtctagggaaaacattgaatttgtaattggagaaatgcataacctgacacttcaattagacctcttggaaaggatcagaatagtacaattagaagaccctgaattggttaaggttcgaggagatgtcttagcgggcaaagctacggatttctcaatttcgagtaatggaatgttgttatttaagactcgcatatgcgtaccaagtaatattgaacttaaaaaggaaatagtagatgaggcacacaccaccccttattcattgcattcattcaggtaccaccaagatgtatcaagatttcaagccctattattgatggtacataatgaatagaagtgggaggacattgcaatggattttttggtcggtttgcccaagaccacagggatgtatgactcagtttgggtggtagtggattgctttacaatgttaactcatttctggcctgtaaaaatatcatatatggtggatcagtgcactgacttatatgtgaaagagattgttcgtcttcatggggtaccaaaatctattatttcgaatagagaccctaaatttacatcgaaattttgggtaagtctacagaaggtgtaacaccctaactaacataggcgtattacatgatttttaaacatgctgtgcagctcgttgctaatcaacgaggtttatggaaaacgtgattaatcaaaatttttactttttaattaaacttataaaatatttatacaaaagactcgggat

SEQ ID NO: 296631 - DNA, 6294 bp, Cannabis indica
aaaaaaaaaaattataatatatagaatttaaatttaacagtgaacaatagtaatggtacgtccaccgtataattttaaacataataaatttgagatattatttgtgtgataaattattttaataagtagaatatataaatattgttaaaattatttattaaataaatatttatatattttgtatatttattttagtaaaatacctgttattataaattaaaaaaattaaaggagttatttacaataatagagtagatacgcataaaaatattctccaaccaaaagtaagcatcatatatccccaacgtaaatattgactatacatttgacatgaaaaatagttacattaggtttagggaaaaagaataaaagactaaaaatgcctacaatcaaatcattaaaagtagagattgaattgaagggagctcacaaagcagaagaaaccataattgcatccatctccatgtgtgcaattggtaattgtcgatggagagtccaatttagattgtgaaaataaagagctttggcctctattttatgggaactaaaattgccaattagcgacatggatagggctgccactatctggctattaaagtcctgaagaatagcaccaacacaaataatatttcatgatacatctacaacaacatctatattcattttaaaatcaccaatcatagaggatttctacggggttgggaagcagcaagagaagcaatctgcaatggcttggcagtagcttcatgatggtatttatccctaactgatcggaagttgctcaaataagttgtggcaaaagaggcaaggtcttttgctggttttgccttttgaccgtgtccaacttgattccgttcagtccagattggagtagattgaagaaagatgaaataaatagtcacacgtatgcattaagtgggaaaaatgccaatcaaaaaccatactcaagtgtcgccatactactcgggtatatttacaactaaaaggtgcatgctcaacagattcccatgcttgattacaaacagagaaagttaagtctgtgattacctatcttcgaactaaagaggtagaaaccggtagagcatcgtggatggccttccatgcaaaaattttgaccttcgaaagaaaatgtaaagaccagaaaaacttccaccaagttgatgccgagtgtgaacttaaactttgattagtttcatcaagacttgatgctaaatggtagtagctttgaactgtgtagaaaccagagttgtaatgatgtcaaatcaagttgtctttgctgctgaaaaaactgagcggaatggtcaaaattatgtccacatccaagggagaaaaaaactgttccagtaagggaacatttcattctctttcatctgttatcaaattggcaactaccccatcattcggacctgtgtaacaaataaggaagaaagtgttgtgtcttggaatccaagggtcaaaactatacttaatccttctcccttcaccaactttccaacgcaagcctgctaaaagaagatccatggcccaatgaataccctgccaagttaaaagaggatgagtgacccagagatgcttcaagaaaagagttatttggaaaatatcaacacttaagcactttactgagaagagagtctgatttctctaggattctccaagcttgttttactaacaacacttgattaaagtggacaaaagaacgaaaacccatgccaccatcagcttgggttttgcaaagaagattctaagaatgtaatggattttcgaaccgtttttattcatactccactaaaagttagccatcattgactcaagttgtttacaaaaataccttggtagacgaaaacagctcatgacatatgtacgaattaattggaccactgctttgagaaagacttcacgaccccgattgaaaaataaatctcaatccaagtgtgcataagtttccaaatcttctctttaatgttgctaaacaattcctttttatctcatctagaataagatgacaacctaagatattttttatggtattcacaaataggcatggagagatgtcgatgaaaaatatttgagccgctaaagttgtgtttggggagaaagataacaacgatttttccaaattgagattttggccagaaacacgatgataagtgtccatgggcctcttgatggctatgcaagatctcccatttgcttgataaaaaaaaaatactatcaactgcaaagaacaaatgagagattggagacgcttgtcttgtgagtttgaaatcggtaaggttgtcaaaattttgctcatattagagaagccttgagagacttcaaagcatattaagaacaagtagggagacaagggacaaccctgtctaagacccttagttgggattaaagcttcaatggcttccccatttaagagaaaaaaaatatttttggttaaacagttattaattagtgaaatccatctttcatgaacactcattttcctcatgacttcttcaataattttccactccactcggtaaaatgttttactcatgtcgagttttaaggtggaaatgcccttctgttgatgttttaatttttgatagcatgaaccaactcaaaagccatcaaaatgttattagttattaaatgattctgcaaaaaagcactttgcgattcagaataattaccaatgggaggacttatttgaaccttgcaacaagcacttttgtaacaagcttgaagataacaatgcagagactaatgggcctgtaatctttcatgcattgaggcttttgatcttcagaatgagagtaataattgttcgacttaaacacgaaggattagcaccatcactgagaatactcaaaacagctttggtaacaagattgcccacaacaacctaattttattgataaaatatggccaacatgcgatcaattctgggacttttatcaggccccattgaatgcaaagtcgtgtatacttcagctgctgagaaatattttataaggttctcatttaaattagcgctaaccaaagtaggaatgcaatcaagagtggtagcaagagtgtctttatcaataacactggcagtaaaaatatcttcaaaataatcatgaattactattgtaatttcagcgtttgactgcactttgtgacctgattcatcataaaggaacttaatttaattgttggatttacgagtagaggctatagagtggaagaatttagtattcttgtcaccacaagctagccaatcaaccctcaaactttgctgccaataaacttcttcgttccaataaatcctcaagaattgttttagaatgtttcaaatctgacatattattgctggcgcgagatgtgacattattcaagtcagcaactttggcatgtaattcatgaatattcttcttcatttttccatatttacatgtatgccaagattgtgattttgtagcacatgattccaaattcgaagtacagcaataattgggttagtttgggcaggagaaatccaactcttggaaataatattgctactttctagatcagtcagccaaagtttcttgaatctgactctaatcttactcttaacagggagatcggtcgctaaaacacgagtgaaagttgcacaaatagcacgatggtccgagtgttaaatgtctaagtgtttaactttaggtgtagtaaaaaaagactcacaatggttgttgacaaaacaccaatcaagatgttctttaattgtatttacagctgtacaactcttgatccattgtatggatcaccatcataaagatcttcatgtaaaaaacaattatcaaacacaattcaaaaagtaaccatttgtgactccccaattagatttgtcattgtttgaaaggattttattaaaatctccaatagtgaaccaaggtttgagaggagcaacataagcaaagcattgaaaaagagtccaagatgcagacctattacttgttttgggtgcaccataaaaactagtaaagtaaaaactcgagcccctagaagtaatgatataacaattaaaaaaagtacaaccatagtttaacaaagtaacatcaacatcatcattccataaaagcatgaggccaccacttagccctaccctgtgagcttctattccatttcaaaaatgtaaaggttgtcagatacgagtaatcgaattaaaactgagtttgtttccatgagaaacaaaacatgggacgattattgttgaacaagtaatcgaagatatatgaacgcactcgggttccccaaaccctatgcgttccagctaaggattgtcatggtgagttgtgggactgcatagcaacctctacacttgagtcatgagagaaactagaatctataaagtcaaactaagatctcaaaaccttcttcccttgacaacgatgaagaagttgttcctttaataccacaacatctttttagtatttttctcattgagaaagcataatttggcctcttaacatttaagtttggcgatgcattttccttgtcaataattgagagagggtcagtttggtgaataacaccagcagttgtagtgactattgctggtgtggaagtgtattgagggcccgagtgactacttatagttgttgcaagggagggtgaatttgtgggaatgaaattagtgagtggagggtacgtggcaaaggtatttagagatgatgaatgagggccaacatcaagaatgtacatgtgagagatatcagtgattgaaggattggtgcacgagtgtatcgatgctatggaggccgtagatgttttggtttgattaatatgatgagaagaggctatttcagtggttgatggacttaaaatggagttattggtatgaatgtgagaactagtggcatgaaattgtgaagagaaaggtggtggagtttgagtacttctgtggttatctgtattggagatagaaatgttggtagtgactgtggaagtgattggtaacaaaagagaaacatatgtgtatttatatattgacaaaaccctagcattagaaacatttgcaatagggttacttggaagatttacactaattgagcaggaactaagagaaagttgttgttggtttgagtgtttcccttcaaatagaggtcgtggttgaggcaagcctcgagagtataggcttgggtgactatttgtgagagcatggcgagcaagcctcgtaataaaaggtcacgcattttcttttgcaaaatcagtacggtagctacgtaaccatttgtcgaaagtttggcacctttaagcgatcggccataaggaagtttgtcatcattgccactgtcgatgcgctccataaaagaaacacaatgctcaaaaggatgaccaaggaggccacattcaaagcaaaatttgggatgttcagatctttgggacgacatgggcttagtttgttagttgctcggcgatacttttgatttattgtattttgtaaacattttaaaaatagattcaggatttctgtaaactttatgtatttatataattagcaaagtttatgtttatagtaaaaaaaatttgttaaacacgattttacactaaactctttaattgataaaatttagcacaataatttaaaaaacacaatgacatctctaaactaatagggcgttacacaaatcctatttttaatttgagagtaactattaacctacccaaaatatgttattcgattagaaaaaatttcaccaattaccataatatttgtacttcacaattccaattggtctttggaatacttaataaattaattttccatttttttttttttggtgtgggcatgtgagtattcattatttaacattataaataacattattttatttacatttgattgtttatttaattatgatataagggaagggaagtttgatttggattgaattcactctaccaagaaaaaacaaaattaaaaaaataaagagtaggaaaagagagatagtgtgttgggtgctccacgaccaccggtgatggcacatttcttcacgtttatttgttcacatgcgtaattttgtatttaattatgtactaaaatcaataaaggctggtttacaattacggcaaacacgataaatttaatgctattgcttcgggacttgctgtgttgttttacgttgaataatttaagagcattgctacttgtgtttaatatggtgtttataattgattaatgatattttttaaaatactaattagtaatttttttttctcaactttgatatataccaaattatgttttttgaactttttttgttgttaaaaattcttcctgaactattgagattg

SEQ ID NO: 296632 - DNA, 1868 bp, Cannabis indica
tttgtaatatggtatcagagccacgatcttcgcgagctcaatctcgttttctatgtcttcttgattgttgttgatgtttatggctcgtggtggaaccaatactcaaagctcagccaatcaaggagatgaatcacaaactgtaaataggttctttgtgttagaacctaatgatcgaccacttggtgaagatcctcgaagtccttactacatctctaatggtgatctgtttgttgttagtcttgttcacaagattttgactggttgcgaaaattacaattcctggaagaggtccaagatagtggctcttgcagcaagaaacaagattaaatttattgatgaccgattgcctgaaccaaaagttgataatgttatctatgatgtgtggttttgatgcaataacttggtgatttcatggattttacatgcaatttcaagtgaaattactgacagtgtgatgtatttggacaatgcggctaagatttagatggagcttcaagaaagatatcaccagaaaaatgcaccaagggtattcgaggctaaacgatctatgcaggctcttgttcagggattgaactcagtcactacatacttcactcgtttgtagtctttctgggatttgatttaagaatttagaccataacctatttgtacttgtggtgctatgaaaaccattcaagagtatcaagatgaggatcgtgttcttgaactcatgattggtctgaatgaatcttacagtggtgcttgatctcagatcttgatgcaagatccattccctaacatcaacaaagtttttgcctaagttatttatgaagaaagacgaagaggaattactaccaatcacaatgaaaatgataaggctgctcctcccatgtcaactaattctggtcagtttgttggaagtgattagcctgataagccaaaaaatggatgccatcactgtggtattcaaggacatatcatggccaagtgttatcgattgcatgggtatccatcaagacacaaactgtatggtaaatttctcaacaaaaatgcaccaagcactgacaaagctcttgctgcaaatctttctgatgctcaaaagaatgggaacactaatggagatgacaaaaggtgttgagcaagattctatggccacctttgcttagtgtcaaaggctgatgaacatgctgtctcagaaaagtggggaataactaagcaatatgcaagctaattaaccttctgtgtcacaattttctggtaaaatcttttccaaaccttcttctactgggattctcgaaactggtgatacttaccatgtgtgtcataatttgtccttatttcaaaatacatatgctaattcaagtatttcttgtgtcaatttgcctaatgttgcattggaacaattattctttccttggattttattcttaaagatatgatgtatgtgctagattttcatcttaatttgatttttgttacatctttacttaaaccaagagtctgtgtcatcacattctattctgaccattgtgttattcaggacaatttgaagacacatcagattgggatggctaggagacatggaaagttggtttacctagagcaacctgttgagaaaattagtcctcatgttttttctttgtcttctgattcaaaaataaataatgacaccatttggcattgtagattcactactacaaaatgcacaatttacgttagtcaaggcgtctcaccaaaatggttgacagaggcaaaaaaaataggtagaaattttatgctttaatggataatcggagctaaaagaaaataattagcgtcagctgctacagtgacgctaaaagaggaaccgaggaaaaaagtaaaaaatttaaaaattatcttttgcattt

SEQ ID NO: 296633 - DNA, 5785 bp, Cannabis indica
attattttgtaaaagaaaataattaaagaaatacatatcttctgattttctaaagaaaaaaaacgttataataaggaattaatatattaataattttaccttaagagctacaacttcttcattggacccaattgcaggaatgttataaggcatgacaagggccttagggttagaggtcaagaaaagaacctcttgcaagaatgttgtcaaagtattcttaccacttatcggagtgattataccttcatccatcatccgtggtgctacctgatccctagacgacgacgtcgacgatgatctagatagaaaacggttataaaaagaagcaaaggcattttgaggtctcatcacaacaatcatggatccacaacacaagatcccaagaacataacttaaagccaaggttgcaccaactccactacctctcaagttattacttttggctattttttcgccattattattaccttcatcatcatcatcgtgatcatcatgatctgatgatgatggtaatgcggatagagaaaatctcccatgatgacgagcttgatgagtagtagttgtagtggtgttgagaagttgatgatcatgagctagggttttgtgttttggtctcaaaaacaacaattgatcatgtggttttgaattggacagttttgtattttgagtattagaattgaaacgagtcaagggtttgatatgaaaatgcgaattttgacaagggttgaaaattagggcatgatccatattggagcaatttgattattttttaagacaaaagggttcttacatatatatttatatattagatcattaacaaaagggcagatatagtgtttatatatataaatatatattgttattggctatatagggacaatatatacataaaaaatgatgtagggaagtaaggaatcagtacttttatatgatttgtttcactattattagtttgctttcgataaagaaagaccagctagtttaagcaattggctaaggaattttctggggcttaagctgtaattttaattattctttaattttaatttatgagtgttttttcagtggaaaagtactgaaaagttttattccaatctgagtagtgaaaattacatattgtagatatagtagaaacgtgatacacataattcccaacttataaattaggctttgcatacatacatcccacaccactctctttcatacaatattgtgtgttttatatataattcagatttatttagtaataaataataagatatctatttaagataataacagtctatgctgacgaaattaaaaaaaaaaattacagttttacaaacattagttatgccgctaaaaataaatattgagtttatatcacttacaaactttaaattttgagttatgccgctatttacccaaattcatatatgattttgtattagtttcttttaagatttaattaattcattgataagattttcacaattggataaaaattatgtttggtgtataattcggggtcgtctcaagtttgtacaaggccgtaggcgaagcttgaacaatgccttagacaaaaataaattatacttttttgacaaaattattaattttatttttcaaaaaagttaattttaaattcttattattaacagttttcttatttatattaattttattttattctccacttgttttattaataatcatcatattagactgaactttaattcatttataaaaaatttcataaaaaacaaatcaataatcataaaatgaacacaataaaataagtataattataagtaaaaaaaatattatgatcataaaaaaagatatttgaattagaaagttctccagttaatatcgaaatagatagaggaatcatgtactaaaacactgagtgtactatatgttatacccatatttcgaacaacaatatggtgttgatacgtgtaaagaagctagaaagtaaactacctcatgttataaagtaataaatatatttaataaacttgccttaaaaaatatagatggtagaaatattcgaactcaccctttaaagataagggtaagttatgaataataattgctaatggatatataaaaccaacaagatgaacaacaaacaaataaagtccatctcaggatacacaaaatacactacagattgactgcttggaaagggtagataataaattattcaaagagcttgcagctcattgacccacatactcgtgagtatgttgaaagactaaagacaacattcccaacatgattcatcacataattgtcatactgtgactagcatctcgcatttatttcactcaatatatttatagaagaacgcgagaagtattacttaaaatatacttaggcgctgacaaccctctacagaataaagcgtcttgaggagattgcttgtattgcgagaaaaataagacatagtcagtataaccgcttacaaataaagctaaagagcaattataagcagttatttactattatctcatgcgatgtaaatgtgaaatgtgaggattgtccatattttatgaacggttacaagaaaaagatcccaagagaagaactatcactctaaaagtccaataaatagggatagaacctagggaataaaaaaggggcgatcaatttgagaaagagagaattataccaatctttttattgtattatgtacacactttataaaatctcagaataagatggactcgtagaatttgaagaattaactttaaaactatgttaaaatcctcttattatttattattattatttcttttattatatatttcaatcttgagttcatttattacaaaaagacttatttgttaattaacaaaaatctgtacatagtttgatgcttttattgagagccctgtaagaaaaaaaaaaactcaaaaaatatcctccttgaaacatatgcgaactttacatctatggcagacgatactccttgaaacgaagataatcaaccacgagaaaaaactcagcatccagggaaagaacattagaatttccataggacaaacacaattgatactccttgctctcagagaggaaatgatggagaatttaaacaaactttgggtggaattcagaaagacgaagtgaggatgcctatgtcccactagatacattttattagtgtaactagaaaatagataactctgacaacgacaaggtgagtcaaatcggagaaacactgaattggagcgcgaagcagcggctgcaaaggctgtgcacagcgatgcccctcctagccaactagacgacctcggggaagacgtagaggatcaaggaccagaagacaaggattatattattttataatgtcatttatattattttattagcatgtttagttatagcattaaatgatattggattatttatattattttcttattactttacacaataaaagtaatgataaaattattattatttttatattttattaaaacattaaattttgaatgacaatattaaaaattgatgcaaatatatcataatattattttttattgctaaatatagcacaacttttatatctaccattaaaaattgtcttagaaggtaaagcacaagtgaaatgataattgagaagaacacaaaatgaaaagtgctggcaaaaataaattttcccagcgcctaaatgcactggtaaaagttagattttagtcactacaaatgtgtgctggtaaaactttgaccttcttgccagttcagtttgcgaaatgctctggtaaaagttacttttaccacgcagtagcgaactgtgctgataaaagtgacatttcttgtaacggttgaaacaaaattataaacattccagctaactaaactcttcgatgaggggccagtctaattatagggtctccttttattaaagtctctcaagttcgacctaataagatcaagacaatcctctcctatagcaaaccggttttattaagttgagttagcccaataatttttgagaaaatatcttaacagttacctccaattacaaactacacgaaagttgcctctttttatggagattacccatcatagagatgcacagaggaacataacaaacttcctatatcccttttccactcaatctaaaaacagatcggacgttattctgtttcgtctctatttttgtgaaactattccttaataccaccctaactagtctataagtataaagtgtcccatcaaagtttactttattaggaatgaagtagttaaaatatactatccatcttatcaaagtataagtatatcgaaatttccttatacacgtacatgacatgcatatatagtagattcgtgcaaaagtttagcattgagaaatttctttactccaaatacaaagtcttcaagagaatatatatacatgtttgatggaataaactcaattttgtttcccaagtctctcaaatctgtttacatatgtaccttccttcatttttaggtaatatattattgttcacaataatgagctatataccttccttcatctccaaaatttcgaccacaatattataaattattaaatttatttttattttttaatggattcccaacaaaagaaagagaaaaaaaaccctatttatatatataattatatcatcctaacgaaaatactttaacaaatcacaaattaataccaaaaccttttcctcctctctattcacaacaatcacaaattataatggctgacaattcttctaattacatacaaaagataaaaagtgcagccatggtggtagctaagacaacaccatttgtgatctttggtgcggtggctttcgctgccctaacctcttggaaagccaaaaagaaaccgatttttaagagatcaacatcgctcgcactcctccatggtggtgaactcgccttaaagagattggttgattaccacgaagctcgagccgatgtaaataagctagggttagctgattgcgagtttaaacttaagatttcggaagaaaggcccaattttcgcgaactagcggtgagtaaaggaaaatttatatgaaaatatatgtagtactagaatattgcctggtatatatgatacatattatagaatttttttaagaaattatacgtattagattagtgttactttgattttattagatacataattaggaggtcagtttaatttgtgtatatatgtttaattttgatgaaaaaggaggccatgtcaaagttagaaatgagaggaaaagaagaatatgcaataagaacattgaaagaagaattacaaaaggcccaaaaaaacaaaagaatgcatgaagcctatgaaattgagatattactagtcgaaatgctcatttacaaggtatgctaatttatttattttaatgttaggaacgatattaaaatcgttcctaatacgtactttctaggataaattattaggcgttccaaaaagcttattgaaacgattgagaaacgacaaatgtcgttcctccagaaacttatttttttcctgtagtgtatgaagatccatgcaaatataaaattttccattcaaatttgttagtactaagtagtgagaattaattttcaaaagacttataacccatatttcataaacaaagaacattaaaatttttttaaaattataacaataactaaaagatcgcatgatgagccatttcaatatcatggaaggcatagtccacaacttaaaaagaaaaataaattagtgtagagataattaatactttttgtttgtaattttgtaacatatatattatttaattattttcttgtaaaaaaa

SEQ ID NO: 296634 - DNA, 1738 bp, Cannabis indica
atataatagggtcgttaatgggcaattcaatgagtacagataagatgccttgggtttattttgcttgctttctccgctagctataaacaaaactggttaattaagtgtcacgttgatccatccatgtccatacaaaattataatttacaatcaacacgtacaaatctaattctctttggtatatatatttacttataatcacttactacttactttggtgttagaattggaaaagagaaaaggaaatggtctttttttttcaatatttctactatcttgtttaaacacgtggaaaaggcaaaaagtagtgcttctagaaccaatcctgatcatgtaaaatgggtacattagagaaaatgattggtgattaaggagtctcaatcactgcttaacagattgattttggcatgctggggtggggcctgggtctctctatacctatatattatgtaggtattatgtcagcttaaagtcacgtctaattcaaaggaatagctacaaataattattgtaaaatgaagggtgttcacacatttgctactttttactttatttaactaaatataagtttgatattctgtatttttaataatttattcagtacatgtattttaaaattatacttatttgatattttaaatttaaattttttaataaaattttatcaatacaattaacagtgtgaaattttatgaattctcaatttaaatttaattatttgattgtatataattgagaactgtttggttaaattaataaaactgtattgattaaatttttcttcaggataccaaatatatataattaaaaaatatgaagtactaattaaatattgttgaaaatacagggtaccaaatatatttttcatgaaaacacaacgtatattccctaaaatcaatagatagcaccttagctgctgttgctctaatctcatttttggatttcgtatggataagttttgtcactgttttaattggattagtcttactcttgacattaatgatgtgagttttacataataacgcctcctcctcgccatctttccctctctccttctcttccatttcccggtgcaatgacagttatatagcagtccacgatcatgggtggtccaacaggaccatgggatcatgttccctacggtcccaaaactaaaaaccctaattttttgagagcgagagagaagagctttaatggtggcctaggtcgcacgagaacaagagagaggagagggtctgagagcgagagagaagagaggaagggaggcggttgcaccatccactggccttccgtttccaccgagagggaggaacaaagaaagaggggggaggcggctgatggaagagatgagcagctagggttttttttttggttcagttaagaagaagaaggaaagaaaaaggagaaagaaaaagcaaaaagaaaataaaaaaataaatgaaaatatttttttttataaatttttaaattatttcatttttttttaaaaaaaaaagaaaagaaaaaaaaagtaaaaaaaaatattttttaatatttagaattatttttttaaaattaatattacgtggaccactaaaaacttgccaagtgtacaagtgtgtacacgtggacagtccagcatggcacttaactgtgatttttggacagaggtgtgcagagcaaaatagaaccaaggtttcggtagttatgctgccaaaattacagtttttgtggttaattgttacaaactataaaattc

SEQ ID NO: 296635 - DNA, 1954 bp, Cannabis indica
aattgtgttttatttagggcataaaacccaacagtatccctaagctgtagggtgggtattggctggtcaaaggtggggccctccagattgcatgatgcacaccctttgcaccgtagaccatgaagtaatctcaggcatagccactagccttagacatggggggctcattcgtgccacccaactagatacagcccagctggttgaagtagaagtaccctgaccagcgttggatttcaggttaaaataccaactgatctcaaagggcaaaggatgtagccaacccatctatgcatataaaataaagagggcagacaggtacttggtcctcttcagactcaattgtgttgggcagaccccgaaataattggttgtctcagaagtacgagtgaagcgacaaaataaccctctactgagcgtggtgaccaaaccatgccatcttagttcttaggaggagcatgggccatgtattcttcacctggcaggtcagtgtcaaggcccccgaacaattttcgactacaaggttcttgaacctcgttggagtaagtgtagagggaagagacatccaagcagcctctagctccctcttttgggcaaaagctctaggattgtcagttcctccttagcatgatcagttcctacataggatggcagctcatcttcattcagaggctccctagccccattataccccctaagggggttgtttgtgagatcgtcacagtctctgaccgatctccgggtaggtcgtgccctttgctcaggctcaacaggcctctcagccaactaaataggcctcttagcctgctcaataggcctctcagcctggttaacctatgcagcctgtccctttgccatcagttcaataataagggtcagtagaaggggttgcacaataggtctgctttgtcttagccaggtttggatcctgactaatatactgtgcaactttaacggcaacctcagcctcaaatggtttcttcacaaaggacgatctacgtccctctggcaatgtgttagggacacctagccagataatatatgtccaagaaactggaagaaatttcctccaaccccggttcagttcccaaatgaaatgaccgcagttgtctcctctaattcattcagagtggtggtggtgttgtatttttggtttaggggaaccactactaacatccaagtcagagtatatgctggaagagctggccgaagaattattagatgaaaaaccacttgcttagatagatttgcatctattcagtgctcacctccccagtagtcatgtgaattcatctgcgcaaaagggaaagggaggtgaacatccagacagcataaaaaccatacgggtagcatctaattatccagccagggtaaaaataccttgtataggctgaccagggttcctaacagatccaaaacaacctattctacaaaaagaaaccatgaaactctggttcttcatgttcttcaagacccataatttaaaatgtgggaaatagagccaaaattcaacttttttcagttaacaaccctacattcacctatcctagcacccccgtgcaaccattaaggatgagtttccctaaacccacgacatggaggttttttttcacttccaagaatgttgtaaaattaaaaaaacaacataacttttaaagaaaaaaggaaaggttggagaaacttattcagtgggcgaagcttaatccgagcttgaatgctcaagacaatagctagattcccacttcacgaacgatggttgatagagaaaagcgtggaaaaacattgagttttcttagagtttttcttgatttctctctttgaaaatttttggatgttaaaatgaaagtaaaagggtttgaggaggagaaatgcctttatataggcctcattaatttaaattcctctaaaaattaattaaatgagaaattgattaccatccaaaaacaaacaaacaatc

SEQ ID NO: 296636 - DNA, 2567 bp, Cannabis indica
tatatatatatatatataggagattaggcacttgagctctaacctggtggatttgaagaaagcttcggctgaggaaatgcgtaagagtgtttatgctaactatggagccttcattcggtaagaaattacacaaaatttaatactttctactctaagataaaattaaattttgggtcctataattgggtccattaggagaaaaattagaatatttgggccgtgtgtatttttaaagatttttttgtccttttgggccaagcccgctttagcatagagctaacattgatccccttcaacttcctaacttcctatgagatcattaggtcaatgatacttaactgtatagtttcttcatgatatgtgcgtttgaaaaaccataattagatttgtgtgtaattagaggtagttacataatttgacatatttgtttgaccatgtaattacactgtaactacactgtaactatgtaattgaaagtaattaaagggttctaattacactctataattcttatgacccccatgagaattgaatgtaattacactgtgtaattactaaaaactttctatattaaatattagctactaaaaaatattattttctcatgtaattattaattattttgccaaacaatatattaggaattcatatgtaattactatctcatatccaaacatacattgcattttaaaatatagtataattattaaactgtgtaattaccaccttagtaattatcctatctagtaattatacagttacttaatctttttccttgcagatcacgtgactctgactgtcacaattctttaccattatacttaacactatattaatatatttttgtattatttaaaactttattagtttatcaactatgccgtattatattaaattaattgaaaatataaaatataattttatataatattatataatacaacacgacttaataaggtgtactaaataaactcgtataagccaataatatattttttttcttcacaatttcggggtctgagcgttgatgattttcatacatgatagtttcttataaaaattcatttttattttgatgatatttttcagtacatcaaaggagatatctgatcttgaggggcaacttctttcgatgagaaatctcttatcaactcaagcagcttttgttcatagtttagctgaaggagttggtcttgattcactatcaagtgatgaagaagattcatgtttagaagatcatacatctcagcaaaacatacacctttcaaagatggagaattggcttgtagagtttctcgacaccctcgaggttctcttagccaaaaaagagtagacgaagctttagccgccttagacgaaggagaaaaaatagtagaagaagccaaccaaagaaaatcccttaacacatcttcactcttgtcattccaaatcgcaataaccgaacaaagacagaaactagctgatcaactagccgaaaccatgagcctaagttcaattcgcggtgttgaattgcgctcagctgttttagccttaaaaaaactcggggatggtcctcgagctcacacattacttctcaattctcatcaacaaaggctccacacaagcattcagagctttcgctcctcaaatgcattgtgtggaagagcttacacaactactatttcgcagcttgtgttctcaactattgctcaagctgttaatgactctatgttggctttcggggaagaacccgcttactcgtctgagctagttacttggacagtaaaacaaaccgaaactctagctcttcatcttaagagacatgttttggtatcttcagcagcatcagggagtttaagagtggctgcagagtgtgttcaagtgtgtttaggctattgttctttgttggaagctcgcgggctgtcgctttcgtctgtgttgttaaggctatttagaccctttattgagcagacatttagtgatagtttgaagaagattgagcagagcagtgctgctgttgctgctgctgatgattggtgtctggtttaccctgttggaactcgccctgttagtggctcaaatgcttctcagcctaaactatcaagtagtgctcataaattcagttcaatggttcaggtgattgtttctttcttttgttatgataatgaaattcttagtgtgacagatttgtgaagtaaatgaaatattattttcaatgtttgtaaaataactaaaatatttttttgctactaaaaattgatgccaattgagaaaacagaattgaaagaagggttattgacagcgtaaccccctcaagttttgattttataaacaatttttttttattttttatgtggcaaaattcttaaatagtttatttttttttataaatttgaggtgttaattaaatattaccgttaaatactatttggatgattattgtattggtttcgatgttttactgttacatatacatataggtgtgcacaatgatcatctaattggtatttaacggtaatgattaactaacgccttaattttttttaaaaaaaataaacttaagggttttgcaaaaaaaaaaaaattaa

SEQ ID NO: 296637 - DNA, 4285 bp, Cannabis indica
gcatataggagaagagaggatagaaaacactgctaggcaataaggcacatccccttgttggaaattatgaactgagaaagaaatattacacagaccaatagaaaatcaaaaccaacattgacacaataatttgaaagtataactgggaaggaaaactagattcaaactcctaaacaaagatttacgtgagtgaaaaaaaaatgaaacttgttctaggagtccactgataaaactctagtcatcttatgatttttatctataaatcaagctccatcttatttcctgccttgactttgcaacagattttaattaaaagaacattaaaacttgtctgacattgacatctatatggagtatagagacatcagcatcgatgcaatgcacatttaaacccaaaccttcttttccagttgctgtcacaaaatgcaaattcttctcaaaaggaattcttatcaggtcatagagacgaacctaataccctcaaaagaaaaaaaaaatatatcattgttcatcaaattaatctctctttattttcttccttaaaaaggcaaagacaaaagtatgagttcttaccctgccacattcatcaccgacagataacttgagtgtagaagagcagaagtccaatgcagttactgatacaatttcattagtcatacctttcacctattatacacacaatacaaacttaatatcatatgaacagtacaattatgtgataacatagaaggaacaaaacacaacaaagacacaaacctcaggttgtatagaatgaataagttgcagagaaggatatgtggcatcccaaagtcgaacagatccatcttggtaccctgaaatatacactctctcaacctgataagtttgggcatcaaaaccttgactgggaagcccaccagtcaaaggccactctgtacttcctttacgtaaatgttccacacttagcttttcagctgatatctaaatgaataaggtcaaactagttagcatgtacaacaagtgccaagcatttaaaaagtaatttctttaagtactgcaagaactttggtagctcagccgtcttattgaactagaaaagtgatttccaataatgaaagatgatgttactgaaatgtgcttgataattagaactgataaaatgacaaagcagtaccctagagaaagcttgtgaaaactctccatctccatgcaccgcactgagctttgaaactgtcatatctggttcagtagtaggaacgactgtagtatactttactggtactggtctgacagatgtattctttagctgggacattgaggcaaacagggaagtcttatcataaacatgcaactgtccaggatttgtcaaggtaagtaacaaagtctcgttgctgttgctgtctattacaccagcagttcgtaacaagaccatatcagcaaaagaaccatgaagtgaaaggtctacgcggctaacacattttagactttctattccctgagaccattcaaggcttaaaatctgcaaatgggagaagataataattacattgctccagcaaataaagatacttacaattactcatatactaaacttaaagaattaagaatctctatcaaaggaaaatatgagctaagtcatcaattactctcaaaacaaggaaatataaaagatgtgagtaaaatgtatccatgaaacgtaacctttcaataatttccaattattcatcttgctatctttcacaagatctgcctaataaataattatgttgaaggctaaaggtttttttttgtcttcatgtaagaattgagttaacttcctcaagcaaaattatttaaactaatgacttggtattcatccggttgaattatgaaaaatcgtgccaattttagtgttgaaaacacaagtatgcacaactaagaacaaaacacaggcaatcaactttgagtcaagagtaagaatatactgtcagaacttcatcggatccaatttgatctccaccatagacaaaaagctgtcctgctcgatcattagatgatcttgttgcacaccaatgtagaacaatcacagggagtcttctgtttcctgatgccaattgcagctttacaacattatcgactgggtcttcagcctgccgatcttttgaggaaacataacttgatatgtcccacaacattatatctccatcaacatagccaacagcaagtactgacccattttcagatgcccaacaaagagagctgatctctttctcagtttcattatcattcaaattatcatgaagcatatgttttgttccttgtacacaatttagcactgttttatactttaaattgaggtttttagagcctctgacgaaaacaatttgatcttcagaagcatcccagagaatgatcaatccattctcatacgcaattagaattctggaaaaaagaatgaaaaaggaaaattacagttgttttatttatttagtttagttccttcttgctgttaaatgcatgacacaacttggcatggttatagcaccaattctaaagtcagagcattctaataaagtgatcaaaatgaacttatcatgcctgtttccaggagaacaaggttgatggagtaccccaaccactggaagttgatcaggcaatggcatgccatcttcatctacaatatcaatgaaatatttttctttttaaataaacatgaaaaatctcagaatcatttgagtggtcatgaaaatatatgtagggtaactatccatacatgcataatttattattcagccacaatgacaaagcaatttaaaattgtagcgtactttccataagaacttaattagtaagtacaacaacaaaattatcataaaaaagataccaaaaaaggcatatattaatatagttaccagataagacatttgccggaatataataaggaagctgaataatttttctgtcatcagctcgatactttagaacagttacatccccatgttcacttccaatatacctgaatacagtgagacatatttaagccatgtattactattaggcagtacattttaaggtaattggttaaagataatacgtgatccaacaattagttatacaaattactatcatacatgtaacttgtgccataaattacagagaaagcagttatattggattcccattgtaaagcagaagctagtcccctgttttccaagtcccaaacctgccaattatgtgaataacatattatattgatcacatattaatgaagggaaagtaggagaaacataaaaagagagcatttgaagataataataacatttaaatagagtctagaaagatatcagatacctgaatttcattctcgcttgaaatactggctagaaaaccttgattttgaaagaactgccaaaatttacaggaaagaaaatgcaagataaagacaatattcactatatatacacacaaataaataagtatgaacaaacaaattcattcaagacaatttccccgtggactaacacagcaggctgcttcctgaaatggtcaattttaatcaccaaaacaccacttttgaatcatcaagttccattttcagaggaggaaggaaaaccaagatacaaactagtaatctactgtttccaaataaatacaaacctcaagatttttaaagggcaatggcttcggagatacaagaagaccctcaatattatcactcccaatcacttttatcctaccatctctgcagcaataaacaaatacataataaatcagcactatagtgacacgtgaaaatccggtcactacaaaacaaactatttattaacgaaattcaaatcaaattttattatcctagttctcatctatgttaactcacaaggttccaacagctaacaggctttgattggaatcgaatgctagaatggatgctgtggacggaatcccatagtgtatagcaatacgcggattcaaatccgccattgttaaacttcccttacgtgcattctgctcagtgaaacacacataagcacatctataaatgtctctacgaataaatataaaatgtaattcgtaaaaattcaagagaaaattcattattgaagattttctgataagatattacaaaattcatacataggatacgatagctcaatcataaactgagatttccatacctcttgttgatcagtgggtttttggatgaattgcttgaacatttgcagaatcaagaaagagctagttggtttttcttcttgtggttctgcgttgattgaaattccgtattttaatattcccagtttgattatttaattaaatgattaattaa

SEQ ID NO: 296638 - DNA, 3497 bp, Cannabis indica
aaaaatgggctttatgtaattattccaatttatataatttatattagagattaccagtataagattgtactttgccttggtccaccaaccccacagtcccataacaagccttgtaaaatcttttgtggctggccctccatgttaatgttggaattggtttttaaaatcatttttgaggtttttaattttattcttttagttgaaacgacttcaggattttccatttcataattgtagtattatttatccacataatacctcagggttttcaaaaattgtttatcaagttgaaggcgtgattttctcttttagaagctagatatccttactacaagcaatgtggaatactaactctattttatggcagggaattatttacttttttcccttctttttggatatagtgtctctatgccttacagttgtgagcaagtcatagttagaggattaaataaagttgttttgttctgttttaaagctaacataactgttaagacttgtaatgcatatttttacaagttttgcaaggtcgccaggaatccattgcactcaatcatatacttaaaagtgatgtagtcattgctcgttctgtttatgttctatcttccctgtctgaaacaggtctattagtttggatttagactgaatatgaatgtatctttccatatctaaatctaatttgaacaaaaaaagttgtatttaagtcttgttcatctgttgtggctttctgtccaggttgatactgcaggttggttgcagaggtcaaaagatgagaaaggaccttcatccttgagcattgtgcaaacaagaaagagtctaatgagagctcatgtagttgctttggtgcttgacgccgaagaggtttgttatgaatcttctttacatttgcagaatatggtgaactgacggtatttaaaagaacatacactcatgcaatcaatcttgtgataattatttcctctaactatgcaaaatggtcttgttggatggagtgtcaacatacgggatatgataaaagggaaatgtaccttaatggggacaattttttcaagtacggtcaagtattttcttttattttacttatgtttttcgtaaaacttttcaaggtacattttcaggcatttctatgagtaattggagaaaaaaacaaattacgttttagactttcttatttcaagtgcaagagaaaaccattagtagtttcccaagaataactccgataaaattatgagcaaagaagttgactaccatttactaattaatgctctatcaatgttctttagaaaacttgttctattctgatattcacatttgtcattgctataattaacagattgttaaatctaagagaagcatgactcatactgaagttgttatagcaagacgtgcagtagaagaagggcgtggtttagttgtaattgtgaacaaaatggatttgttgagagggcacaaaaattccaccttatataagaaagttatggaagctgttcctgaagaaattcagactgtcgtacctcaggtatgtccatacaacactttcaatggactaaatgttcttctttttcacaagcattagtaaaatttctagtgttgggaaagtcagggtcctcgttgaccttttgaacgttattagcatggccaagaccactgatgctgtcactattgtattaattcttgattataagattgtaaagattgagaagcattaactctttacatagatcattatgtagtagcataaaacatcataagacagaatgtttatcgtacactttaccagaacatgtatatgttgttcccagttttttcttgcatggtggactttgctttgaaaattttaaagccatgaactagggaattggtcggcaaatattagtcatacgaggaaaatagactttggcagggctaataatatctgacataagcacaactataaggtagaatacatgagcaatcaagaatttatttgtgttaaatattttatgcatgcacaaagaatccaaaactttacttatagtatgctaggaatgataaaaatagaaagagaatgatttagggttaacattgttttggaacaggtgaccggaatacccgttgtatttatagctgcagtggagggtaagggcaggatggctgtcatgcaccaagtcatcgatacatatgataaatggtgtttaaggttgtctacagctctcctcaaccgctggttgcgaaaggtcagctagaaactttcattttatttaaatctaaaatggttaaatgggtaatcaactgtgtctccataacatccctatttggccaggtcatgagcaggcattcttggaaagatcaggctgcacagcccaaggtcaaatattttacacaagtaaagtcgcgaccgcccacttttgtggccttcgtgagtgggaaaacgcggctttcagatacagataccaggttcttaacaaagtctttgaaggaagactttgatttaggtggaattcccatcaggatcatgcagagaattgttgaaagaaaagcttcagggagcaataacaagcctaccaagtcttatggcaaaatggcagacagaacctggtctgacaagagaaatgcttctacttaactaacattgttaggttaaacaagggcttatttttgctttccctcctgtgaagttttgaatatttttgtatgggagggttacagttattgtagttctcgtgtatgctgctgtaaggtagctttgttcaacattagtacaaaaaatcaatgcaaatgatatagttcttgtattgaaaatgtgtacattccaaagtgcaaagtagttgggtagaaacaacccaacggaacaaaatttggagtcccataatgttttactgtttatgtgatatggtttttttcctctgcattgatgatttgagtttattcgtgtgggttttcaatggtgtcaactagttattctctacaagatatcagcttgaaggataaggaaaatggaggaattgtctatgtttcggttgcggagatggacggagtaaatggttttggttgccattaagtatggaagagtagtaaccttttgaattttgattattttgcggctattattggtcattcgagaaagttttgtgatagagaagcttttgggtgtttggatgagataacaacacaattaatagttgaggcatggtggtttgaatttgcggcggtcaaaatattcaaaatattttgttgtttgttttttaactatagtatattttatacttttttttaacaattagtatttttacctactgaattttcgctactactttaatcatgttccttaaaatatacagcttgttaaaaaatctcctatctccttaaaatataatagttacataattatacattttctaggtttcgtttattttaccgttaaaaattaatatttttacaatctgaactttgacaaaaacaaaatttctctccttttattaaaaaaataattttaaaaatttaatgttctattaatt

SEQ ID NO: 296639 - DNA, 989 bp, Cannabis indica
ggtaaaatatttccaacacttgtgtgaccaatttgaagctcgggtagattccatttgcctcttggtacatcaacaaataaatatattcgtcaatgcatggctatcaaattaattaatataccatacatacatactattactgtatacatatatatgtacatcctagattgtctgtcacataaaacaacgccacatgcaaaggaatatgttgacacacaagggtaatttttactactactactattaaaaagcttttctaattcctatatatatgtcgaatagggtatctcggggtatggttaggtgaccaccccaaccctaatctaatcacaataataaaaaaaaaagaagtttactcgggggtaaacaccccgacccctaaaaggggtgtctcaggggaaataccttgacccccaatggaggtatctcagggtacataccccgacccccaaaaggggtacaacccggggtgggagtctcggctattgaagccacgaggtatacacacccgaccccctaatggggtgtcttggggcatcaaggccaattggggattcaagctcggggtgatacccattcgcggggtgcacccccaaccctttatagggtgccacaggtagtggtcaacagggggggggggggggcgagctccataccctcctccaaacacaaagtgttttcatgccaatttttttttcaagtgtatcacattctacaaacacatttttaccaatttcataaaaatcaaaatctggaaaatagagggaaaataaaattttttatatgttcatagtattcttcaacattcaagaacaccaccaaccttaaagtttcaaatttccttattttttcatcaaattgcaccaaatcaaaaccaaaaacacattacccaccatctatactacaaaacccaagcatcaaatactcacattacatcaagaaatccaagaatcccaatcaaccatatcaatttcgaccatagcaagaaa

SEQ ID NO: 296640 - DNA, 4704 bp, Cannabis indica
taattctaaaaaaaataaaaaatttgaaatgaggacatttactaaaatagtcttatgatttaggaccatttgctatatttttttaaaatgagaacataaactaacatactcttatgatttggggtcatttactataatttcccctaaaacaaagcccaaatagatatgaagcccattggcccagaccaactggcttctaaagatttttctggtgagacaaattgaatgaatggtggtaaagggaagtgaaggaagttaatttcaatttggtgaatcaatggcctatcctctttgctcggcacctgtaactctaaactcttccaaaccaaaaccagtttcatataactgttttggaaatcatatccatacccatcaaacacttgttcacagctccaaccacctcctaacccttctaggaccaagatttcggtgcctcaaagtcaaagccaaggtttcttcttcttctttttcttcttcggttattattattatttgtttctttctttcgtaatgattataattaatatatattacaaagaaatgaatgctgaaaactcgtttgtaaaattattagaaaaatgagcaacaattaacaaactagtaactaattaaaactgtttcagtactcttgtaactaggtggtttgaggtaatgaaatagagtagttgaaaaagaaataatttttattctattttttgttaagttttatttaaagtattgaaatgtcattcttattgtatttatgtttttattccctccaactaaacgtcagctaataagatgtttgttacatgagtttaagttggagggaataatggtgaagagaatagacttagaaagaatataaaatagtattagaaaagattaacattaactctattttaatttaaaaagtaagatccacttgaaaacacaaatcttttagttattaaaatttaatttagtttcacattcttatttttcacaagtgtaaactatcataccaaatgccaactgtctaattgaaaacccaactaatcactctactatcctaacaatatcttgttaataagtaaaaataaagattgtccaattatatataaactatctagacgcataacaatccaatcctattataaaggtgatactttttttatcaaatattctctcccataagtcataaccgaatatttttacaattagataagaaattaaatgatgactattattagaatatttagcccataactaaatatctactctaatttataaatcaattacaataatatcaattgaatcaacctaatattattctaatactattataattaaacaagtcttgtgtacatgactaattaagtttttctcaacaggcagctaataaaagtaatcaaagcaagaaaccaaagagtgtgctctgtgatgattgtgatggaaatggtaaagttgaaactttaagaatgagaatagaaagaaagaggttattataactttatgttattataatttatttataaataagcatatataataacattgtttatataaataaatggtgatgataagggcaggtgcagtccagtgttcgcagtgcttggggaatggggtgaattcggttgatttcttcaatgggcaatttaaagcgggtgattcttgttggctttgcgggtaactaactaactaacccttttttgttctctttaatataattcatacatgggattaattttccagaaatatatatacatatattatatattgtttggttgttttgcagaggaaaaaaacacattttatgtggaaactgcaatggagctggcttcattggaggcttcatgagcacttttgatgagtagaacaagtgtctagctattgctacctcaacaatgaagctttgttactttagtttcccatgcatttagtgtttatttatataattaagtgtatatgtacagtatataaatttcaagactgatagccccaaaaaggctaagggtattctttgagtcaataccaaactcccaagctttacagcttcttcattcatcataaaaaaatcaattccagcaattacaattgtttatatttgtccacggattacacagcaaaaataacacaaccaaaataatagaattcagctgctactctctctccattagcggctctcagtcatcatgaagtcccttagccagcttggtctcttgcgttgcctctgcacatgctcccttccagccattgagttcttctctctttccatctcactctctcctttgttgatattggctttcggctggcttccctcattttcttgggttgttttcaccaattgggctgcctccctaacccagttatccacttgctcatagactccctccaagtccaacggtattgggctgtcatattgggcctgactatcacttcgctccccttcgaatcgaccttgtccgcaaggttggtaactttgtacagttgacaaaaatcttcatagttctcccatgttgcatcttctggttggctcaacgaccattgcactaatagttgtttgatgggctggttgttgatgttctttatgcgtgctgccaaaattgctatcggcaccataattggttggtttgcgactgtaatctctggtaaaggataactcttgattggttgtggtccatggaatggcttgaggagtgacacgtgaaatgttgggtgaatgcaactcccttccggaagctccaacgtgtaggcgactggaccatggctagctaatatttcgaagggaccaaaatatctgcgagacagcttggcgttaagtcttttagctacagtcgactgcctataaggttggagtttgaccaacactagttctcctatttgaaactccttgtccttttggttcttattagcttgctgacgcattctgttttgtgcttgttctagatttgtcttcagtttttgcaataaggagtctcttgtaagtaaatactgctcaactgctttgatggtagtggatccacgtgcataagctggaatggttggagggacacgaccatatacagcttggaacggggtcattccaatcgccgaatgttggctggtgttgtaatggaactcaacccaaataaggaacttatgccactgtttcgggttatctgctgtaaatgcccgaagatattgttctaagtagcgattagttacctctgtttggccgtccgtttgtgggtgatacgcagaactcatcttcaatttggtgcccatgaatttgaaaagttttctccaaaaagcacttgtaaaaatgggatctctgtcagatataatcgtacgcggcaacccatgcagtttaatcaccatattcgaaaataattcagcaacctttgaagatgagtagttagtgggtaaagctccaaaatgagcgtacttggtgaaacgatcaataacaaccaatatgttagtcattccttgagaactaggtagtcccacaatgaaatccatggctaagtctttccaaacacgctctggcagctccaatggctataacaatccataaggtgttgtaggtgaatatttaaccgtttggcagacaacacaagcttgcacatactgtttaatttcagatctcatgttttccaaaaaaaaattgcacttatccgtagaaaggtgcgttcgaaacccgcatgtccccctgttggtgagtcgtgaaactcgcccatcaatagttgcttcaggtttgaatacttgctcaccattaatctgttgcgaaaatacagtagaccatctcttactgagtagttttctagagctttcttactatctaatagctgtttatggagttgcctcaaatctgggctggtcagattctctcttctgagttcttctaaaaattcgaaacaccctgatgatatggctgcctgcagaatagatagtgacttctcgtgttgtctggataatgcgtctgctgctgagctatcacggccagctttgtactctatagtaaattgaaatcccaggagtttgtggaggaagtgttgctgttctggggtctgaattgcttgtgtaagtaattcttttaaactcttatggcccgttctgatgatgaagtgccttctgggtaagtaatgtctccatttcgaaattacttctgtgatcgcccttaactcccatatgtaagctgaggtgccagcaaattttggaccaaatttcttgctaaagaaagccacgggatgcccatcttgcattagtactcccccgatgcccacattggacgcatccatttccacgacaaatgtcttggaaaaatttggcagctgcaacactggtgtttcagtcatggccttcttgagtctttcaaaggcagatgccgctgttgatgaccaaccgaaattgtcttttttgagtaactctgtcaagggagctgctatcgctgcatattgagccacaaaatgccgataataccccgtgagtcctaagaaaccccttaattgttttatattcttcggaatgggcctgattagtggtcaaagtatcattttattgatgttaaagtttgaattaaattaagttttgattaatattttcatgaaattaatatgatatattatataattgaaaatattactttaaatttagtttatgttcattttgcaggaaatacaatgatttttggtattgccaaagaagagataaaaaaagaaagcaataaattactacaaaataagtaaagttgacaaagtgggtaag

SEQ ID NO: 296641 - DNA, 2764 bp, Cannabis indica
tatttcattaagaaacaaaagtaccttaatggattaaattcgaagataagatatgatcttatgattaccactgacgacaacgctacctatgtcgacatggtgggaaaagcactccgagctaagtgtgcaattgagtgcagtcaggagtctcgaggaactcaggtcgctggtggagcccctactcctcctacccctagttttggaaggggtggtagtggctcgaccactgatcagaaatggaaggcaccatttgcacccagttgctgaggttagaataagttgttctgggggaactacggtcgaagcaattgacagggtgcttctgaaactcgatacacttactcagaatgccccagttgtaaaaagcatcacttgggtgagtgtagagggcaagggtgtttccagtgatggttgccaagagactacccacagcttaagaaagaaggaaagaagaacagaagacaactgaaaatcccacttcagcaagggtgtttgctctaactcaggcagatgtagaggctagcccctctgttttcacaggtaagctctcggtcaacaactcttacttttctgtattgtttgactctagggccactcactcttatatggcagtaaggatttttagtaagttgcaaagatgaactggaggagtataatagtcccttgtttggattgcctttgagatacctcaggagatgatgaactgcttgtacgtgaggtgtgtgaggggcagccttgaattggctcaaataatttacagcgtaggtgatattaggtctcgagagtgtcaaatacagtagtcgaccaataagttgtcgataaggagaagagttttcaagtgattctcctttgtcattgtctaacttggtcttaagatccataggagtcttacttggtttgttgcccatatatcatttatcctctaagagttgaagggtatatttacattgagagatgaaaagatcatcatgagtgccaataatctcaaaattgaggaagtatttaagagtgccaagggccttgagcatgaattgttgatgcaaagaagtttgttattgatgtaaaatggagatgtttaggcctgtaattatgatatcatcaacataaacgagtaaggcaatgaaggtgtggtgccttttgtgaagagggtataatcagcttgagattgtgtgaatccttcatgcaaaagagcatccgagagcttcttgtaccactgtcgagaggactgctttaaaccatagaattatcagtgcaatttgcatactaagttgtgttctgcattaagagaggatggacgagttagtcctttatgtagtgtcatgtagaactcttcattaagatctccgtttaagaaggcattgttgatatcaatttgtaaggtatgccaattttcaatagaagttatagctaataacaattttaaggtaactattttagcaacaggagagaaagtataaagtaatcaaggccttcttgttacgtgtaaccttgagcaacaatatgggtcttgtaccatgctatggattcgtcattgttatactttattttgtatacctaacaacaaccaattctcgctttctgggtggcaaaggaacgattgtcaaagtcttgttggcaataagagctttaagtttgaattgcatggcattgagccaatggtcgaattgaatggcctgctggtatgtttggggttctttatgagaaggcactgcataaataaaattagctttatgactatcagataggttagaataattgataaatttatcaatgtagtgtggtgtggaagatttttcctgaattgtagaataacattcaaaatcacgacggtagcttggaggatgtgagtttttgtgagatctccttaaagcaattggaggagtgtcatttggtggggaatgtgtactttagcaataggagaagaatcagatgggctattgtctgtgtgagtttcaggggtaatatctggcacctgaggaacatggattagcagcgctgcattgtctaagggataattagaaacagttgtgttagaaacaaaatgactaggaataataatttgagaaaaagggtcagttgtggaaccatccatgtttaaggtgtaaaaaaaaatattttcatgaaataccacatttctagaaataaagaattgatggttattgatgtcgtaaggtttgtagccctttaccccttggggatatcttatgaagacacaagttcttgcacgagaagcatacttaagcctatgagaagtcaaagtaaaagcaaatgctaggcagccaaatgatttgagattatcatattggagtacctcctaaaataacaattcataagggattttattttataaaacgggtgtaggaaccctattaatcaaataagtggcagcaagaacacattaagacaagaatttaatcaaaatttttgcttgaaaaaatagagcccaaacaacatttaacagatgctgatgttttcgtttaactactacattttgttcgggtatttcaacacaataaaaatcattcataatcctatgtttagagaataaatccttaaaaactaattctggtgcattgttggatctgaaagttttgaaatgcattcgaattgagtttgaatataagcaagaaaacaacgaattatggtaaaagcctctaatttattattgttgcaacaaatgattcattattaggctcaacaacttctgtcgtcccaaataatacttttagtatcactacaaaaaatttagttttagtcacaataa

SEQ ID NO: 296642 - DNA, 5418 bp, Cannabis indica
agtatgggaatttatccaacatccactttatccagattggagagagtagtgaaacatgtaaaagagccaaaggattaaaggtagccgaagaaacaagcattctttatattattattattattatttttttagggaaattaatgtcagccagaaaaaaaaattaataatatatcttctggcatgagatattcctcaatcatacacaaataattacaaacaaaaaattatacattaatgtaaatataattttttttaagaaaaaaatatatataaattaggttacaagtctactttttcgattgcctattccccagcttaattaattattttgcgttggatattaacatatttttggaaaggaagaaaaatagaaaaagcttctcccctcttctattttattctacagaaatgttaaaatgcttaataatttttgatgtgttaatattattattagtctaagtattgaatcacatataatttaaagtaataatttttaagaagtatcacaagttaattgcaaatcaacatatctaaaaaaatattaggcaccactaatactcacttaggtggtgtttagttggaagaaataaaatttaaaatacataaaaaaaaaaaattaataaaaaaattattagaatggtttttccttcaattttaaaatagaattgtcattccaccaaaattgtaaaaaaatcattccataagaatgacatcctaacactttaatattcaaccaaacaaaaaaatgaaatagaaattatttcttttccatttcattacctccaaacacatttattctattctatcctacgccaaacattaaaataaaatagcaagttatattattagaccgacaactaagaaagaccattttggtaattccacagagaaagataaagatacaaatatcaagtatgaagtaactagcccaacaacatgacagttcagtccttaatacatctcagtgactaagttatataaatttaaataaacaaataaaaataaaaatcactatcagctctgaaattgtgagccacataactctatttatatgttataaaaaaatcaaaagcatcattacaaaaataaatatcaagccaacgtttttacaagccccaaaagaaatggaagtgatcaccaaaagagacgtttttgggcttcaatccttgtccatcttcttcttcttcttctgttttatagttttgcctctttcgtcaagatctgtagaagcttacaagaattacacagttggagactccttaggttggtatgacaaatcagaaaagcccactgttgattaccagaaatgggctgatagcaacaactttagcttgggagattttctcagtaagtactcatcatacatatatatcaatttcaattataattctaagtttgatattgttgaaagtcttgcttaatgttttcattcgatatagaaatttgttaattaattgcatcaattcaattgctcgatgactctgtttctggccaaattaattttcataaacaaattttgagcctgtggtctttagcaaattctttacattgttttatcctttatttttttattttttttttctttctctctctattgccgtttttactcttttgggtttgtttttaatttttcatgtttatctggaaatacatggaacatggtatgtttctattttccgtactttcaagtaacatggaatgcttttttccacgattgcctcaatctaagtggaaagaaattaatattaataataattaaaaaaaaaagtgtagagataagagaaatatgcactcataaaatgacacatgtacctttacgaaaggggaatggcacatgttagtgttacccataagaatttggaaatcccatgtagccccagctgtgtttcacgtggtaccttagccttatacattgaaaacttgtgtacgagtcatcacacaactaatgtactttatttccttatttttatctatacattctctcttagaatattactacttcttcttattatagtctcggtcggtcgataagacgataatagactttccttatcaaaaaccaacaagaaaacaaaatggtcggttctgtcattgctatatacttatctttcttggcattacttattaacattttttattgttctttactagacttaaaaaacaaatgttattctcgaaatatatatatagacaaacataataataaaagagttcattaatatcataattaggagaaaatccttattaataaaccattgagttggtatagttgcattggtggcgtttaatataaattaataaaacactatcttctaatataattagtaataactttaagctttgtgagtctgtaaactcattgttctgccttaagtagacagtaattaatattattcaaaagggtaattaggatatttttccttaaaatgatgttccttaaattttttttttgaccttttaaaatttttccaactattgagatgattaattatttattgtactaaactatttgatttctaaactatgctcacataaatcatgtcttctaaactttcagggacatttttaacgactaaaagttctcaaaattgagagataaaaattttaattaacctattcaaaaaaaattacgatattaatgcatgtagctaactagtttattattacttttaataatttggttgttttaactgaaaaatgcagttttcaacacaaacaccaaccacacagtggtccaaacctataacgaaacgacatacaaactctgcgattacgacgatgcttcagacaaagacaccacccagtggtccacggcggatccttcaaacaccgccaccagaccgatcacagtaccggtgccactcttaaaagaaggcaaaacgttcttcttctccggcgactacgacggtgatcagtgcttcgacggtcagagattccaaatctctgtagctcacggcaaaggccttcccaagagtctccaagaacccactgaaaattcccctggtcccgtcagtcctcagtccggagaagacgaaggcgattcggctccggataccaatgttcctgcaaatttcgatcatccgaaacaggtcgcttccgatgatacagaacgggactcggattcgtctgcatcggcgtcgttgttgtctaaattcttggtcgttggtttaggacttgtttggctcttttagtttgaattctgattttaaattatttatttatttttttaagatataatttacatatataatagagaagagaaggtgtgattggagattagatttttcttacgggaataattacgattaattttgtgctgccagtgtgtacaataaattctctagtatctaaaaaaaaagaaccatcactactcacagtatagatattgcgttgtggttgtgctatatgtacttgatacatacccatttttaacacctggaatgatgttatttatgattggagaaagaatgaatgatcatgagaatgtggtgatcgaagaggaggatgacagactggttttagaagatgatgatggtgatttatcggagattgacgatcgatggtgcttggtgggtcgttttcttactagacgcaatatagattgtcaagccatgcaacacaaaatggcttccctgtggcaacttaatcgaggtttgtacgttacagaacttgatccgaatcattttctatttcaattttatcatgagattgatattacaagagttattgatggtagtccgtggacatttgatcgtgtccctttgatttttgagcgagtgaaaccgggtgaaaatcccagacaaatgaaccttaatcggttggatgtctggatacagtgccatgagatgaagacaggttttatgtctgagagtacactgaggcatatggcgaattatattggaactttcgtgaaatcggatcctaataatttcacaggagtttggagagactatcttagagttcgtaccactatcaatgtggaaaagccactgaagaagaaaatgacactagaaaggaaaaatgggcaaacgtgcacagtccaattcaaatatgaggacttacccactttttgttttatttgtggtatattgggacattccgagcggttttgtgaacgattatttgatacccctgctgaattgattcatgaaatatttgatctatcgttgaaggcggcgccacggagaagacaacatactatcgattcgccatggctccaataaggtgcaagctacaaggcccccgtgactggcgggctggagcatcaaagagtaataatggtgaagagaagaattaggggctgattgccaatctgcctactattagaaaatctcagtagctcttacgtgggaatttacctcatttattggaagaagatcctaaggctaaggaaaagtcaactcaaggtgggaatgaggtggcatctgaggatagttttaatattaatgctttattggtgttagaaaataaaagaaggagaactgatgtggaagaagggttaggtgagaatgtaatggaccaaagtattgggccgaatacttctatatagtgattaaatggtaatggtatttttgaaatgttagaccaagatgttagtatgccaacagtagaaaatgagaatccaaaaaacatgaatggggcgggttctggtttccaggcccgccaagcattatgaatgtcttgagctggagttgttgggggcttgggaaccaacagatttttcaattcctaaaagagattatttctcataagaaacctaactttgttttttgtgtgaaacaaaatgtcaaaaagatagagttgattgggtaggacgtgcattgggttttgaaggaatttttgttgtggaagctcatgggcttagtggcggtttggcctttctttggaaaaataaagatgaggggtctttgttgggatttttccaaaaccatattgacatgaaaatagctacacttgatggaaattggtggagaatcacgggggtttatggggaaccaaaccgagcccaaagagatcaaacatggacccttttgaagactttggcaaggaactcgacccttccatggtgtgtaatcggggatctaaataatatactcagtcaggaggacaaaaaagggggacgcccgtaccctcaatggttgctacaggggtttcaaagttgtttggacgagtgcggcttgaaagatttggatcttttgggttatccgttcacttgggaaagaggtagaggtactggtgagtgggtcgaagtgcgtttagatcgagccatgatcactaattcttggcgtattctgcttcccgaagcaactttaaccaatttggaagcctcaacatcggatcactgcccactgtttttagagccgattatgaggacttcatttcgtactcctcgtcgttttcgttttgagaatgcttggc

SEQ ID NO: 296643 - DNA, 2044 bp, Cannabis indica
aaagagttttatttagggcataaaacccaacaccatcaacacatgaactatccattttattaccacgacatcgcttcagaacactacaaaaattctctggatctacttgtctcttaaaggacttgactgaatcaatattctcatcaggaacctcagaattcaacacagctttccatttgttcaaagctgcagtaatcgagacttcaaaggttctgataggtgggctttgagagatcgaattcaagggtaaatgaggtatattttcaggttgcaatggtggtggtttcgatggcatttcatgagggaaaatagtagggatataagatgggaaaggcagaggtaattaagggcattttcctttatcgatagttgctggtttttctggtgtagatgactcggctaaggttaaggattttggctgaagctgtgttccaatggccaagtttcgatgagtgtgaagagtgggaatggatgaagcaacggttattctagtgacacgagtaagaaaagggtaagcgtttgctttggaaaaatcacttcggtatcgatcgtatcctgaaattggaagtttatctccaatcatttgtgggccatagagctgttcaggatcaactccaacatctacaaactccatgaaagtgatgcatttgtcaaaggggtgccccagtttaccacaatgaaagcagaatacaggccaattctcatagtgaaactctaaccaatgttgatccttcacccgaggcagagtaaccattttaccccgcataagaggttgagtaacatcaattctaactctggtgcgcatgaaagaaccccagccttcatgaagagagtcttcatggacatcaatgaactctccaacctattccccaactttcttagccaaagctctcgacttgctgaagaaagggaggcgatgagtttagacccaaaactgggcatgacagaggtcttctctagttacattttgcaaagaaggagagtgcagtaatataagttgattaaaatagtgccatggctccccaacaagaattttttgtagatcccctgcacaagccaaagttaaaagaaagagatcagaatgcatttctgaaacaacgacttcaaaacgacatttgttacttcaaaattcgccgatctttatgataaaagtgttcgggttaattgaatttgcgagacacttagtcaccagcaaaaaaattgggggattggttgggatcatagagatcagcttcataaagagaatgcacaattctctctttctcagacaaacagagtgttgagttcatatcctttaggattgattccatacaagaataagaagaagagaaggagaacagaaatcttaggaacaaatggtagaggctgtgatgatatttataagccaggttagtatctaaaaaggagatcatggagttggtaggaacaagtagtttcatccaaaaaggatgaagatatggtcggttaaccatggacatggcattaagagagaagaagtggaagggaagatcagaaatcccaggaaacagaaaataaccgctacagagaaaataaccccactcgggcataataagaaatttctttttcagtacgtattgcaaaggggccacttaacatcttatgtacttaaaagataattgtatttgaacttaataaactagtgtttatcgagatttacggaaactaattaaataagagattcaggaaattaaatagtgattaagtaaataagatggagaatttttacgtggttcgagcgttaattatccctagtccacgagtcaatgtattggcattttaggctataaaatgtattacaagtagtgtttactatataaaaccctaactctgtttctctaagtttctcttaaagatgaagaaaacatagaggatagtttgtagaggatagttggggttctctaataattaaaaaaaaatttaaaatactaattacaattaattaatgataattgatttaaaataatttggatatatatatctattatttataacattatgcaatttttttattttcaaattattt

SEQ ID NO: 296644 - DNA, 10893 bp, Cannabis indica
accgtatatttgtaattttttttattgtttatatgtttttgtgaaataatctctataaaaaatgtctaattagattttttggcccaagatccttaattagtttgaaacgagattgttgaaacttttaattatcttcaattacataattataaagtgtaattatacgatcaaacaaatatgataaattatttaattacctctaattaaacataaatttaattacatggtaacttttcaaataacccttaattagttaatttacttatttttttggttgaatgaacttccatttccacgaggggtaacttcatataaatatggataaaatagaatgatgtgaaagagcacttatactctgcgtggtattccacagttcattccctgctctcgcaccgctaacaaaagaaaagagaagcgaagcgcgctgagtgagtagtagaaagaaaaaacgccatagccgagagcttcttagggcaaatttctctgtagccgtagaaggcaaacccatcggtggccacgaactcgcttacggtagaagactaagatgagcatctggaactatgtcgttacagcacacaagcctaccaatgttacccactcctgtgtcggcaatttcaccgctcccaacgagctaaacctcattattgcgtaaacctttttccccttctcttgcttttactcttatttttctatcttgttttctgtttggcttctcggattctcgttccaatacactatatttagccatttgtattaaccaatatttgatctagggaactttgtaatgaagctttggtatttgtatagagtgattgattgtatgtttgttctttggatttctaagacgagcacaaatttttatgttagttatcgtaaccatttttgtcgcttatgttaaaaaaatctctgacagcactggtaaatgtgtgttagaaatgaatttattggccttatcattgaactagttatgttagttctatgcaattctttttctttttttagcaagatttttcattgatagtcacaatgcattttgatttgttttcaggaaatgcactcgtattgaaattcatttacttactgcacagggcttgcaggtaatatcaattttgttcttttttgttatttgattattgtggtgatgtgcagctaaattttcttggaatgttaagggctcctagtgaagtaaatatgttttgtagtgtaaagaggaaagatacatttttttttttgcagattcgaaacttgtatttcatagttccataaccatagtcttcagttttaaaaatgagtttcgtgacctatggccttctgctgtttcttacatcgtactgcttgacctaacccttttggtagaaagaaagtagtttcggtttatagaattatccgcttaatgaaacttgttatagctcttttacagtcattatatattttgttagatactgtttttgttaccggaacgaggtttttaccataaattggaaacaaaagatgtattagtgaaagatgattgggtctgccctttaaactacaacctagaatgctagtatataagctagaagtgctgcaaattaaaccatcatataaggcaaagacaaacacacaatacataaatcaactgcaatattacagcctcaactgccaatcccacaaaggcaatgaaaagagaaatacctaaagtctctattcttgaatatttatgtagccactcaatgcttaaccttatcccaaatagctaccacatcctcttctacatcattaaagattatttttccccaaccaaactgcctaaagaacccacttggacagccacaatccatagtgttattattttcttcttcttcctttttttccccatggcttaccatttgttccttatgttgcattatgtaactagacttagagtttcttttgcactttaacatacattcgggaagtcaatataaatggtttttgtaagtataagttctcacaagcgttttacttattcagagccaccaactatccaaaacacctttacccttgttgaagctaaagatttttatatgaactgacattgattgaaactagtacgaccattcctacattatctcctcgaatatggatttacaagaaaatgcctcagagcttctagcgtccatatccttctatgggccactaaagtacaacacccataagaatctaacgtcgagatcagctttgtaacatgtatcatctccatcttgtttaagactggaatgaatttaagtccccatgaagatcttcctgatctctcttgcaaactggcattctataaagtagagggaacgtatcagccatagttgtttctttcttccaaccacatgtcctcccaaaatctaatgagaactgtagattttctatttgtcttttgttacttctgatgagaacattcaatctttgggaaaggattaagctttgggtggaaacttgggtttataagtcaaaaggtttcgaagggttatcatttttgttttaagtagaaattgggagaactttatggtttaattgtaaagattgtctttcatgtctatgttgtaaaagtttactgctgttttgtgattgtctttttgtacttttatttttgttttgtacttttagttttgtctaatttatatttgtactcgtgttagcgttgcaaccacagttttacacaagtgaggtctctcagtaaatttgggagtaggtcactcatggacatgtgacctttgtctctattccaaaaaaaaaaaaaatctgtttatgtctcaatagtttatatggtagcataattaatcaaggcatatataaactatgttatggttatcaacctgaaagcctgtttttctccaatctatttatctatattatactcatgtttcgattgatgatgtggaagcttatcaattgagtattttttaagtttttcaagcttttttcctttttttatcaatacaattcatagataattgtaatggcaacattaaacattagcaattaatgttcaatgttttattaatgtaatgtaaatttccttgatgattcttctttcttgtccaaaacttttagctcttgcttcctttttccatctgaacttaatttctaattgcatgatgtaaaatttattttctttctatcagcctatgctggatgtgccaatatatggaagaattgccacacttgagcttttccgccctcatgtgagtatatagtgtttatttttaagattcaaaggtttgatttaattttatgtgcttttggtttattcatccttttatttttgaacagggtgaaactcaagatcttctgtttattgcaactgaaagatacaaattctgtgttctccaatgggatgctgaagcatctgagcttgttacaaggtttaagtttgacattgaactagcattatattgctatctaacttagtggctattatctggggttatacttttcactgatgttttactttattaccatgtagagcaatgggggatgtttcagatcgtataggccgtcctacagacaatggtcaggtagtgtgtcttcttgctcataaactcttgtgctatttaaatgttgtttctttttcattttctcttcaagtataaagtggatatctgaaccattctctagttttacatgggaacttacattcgttcctatccctttctgtttttctgcagattggaattattgatccagattgcagattaattgggcttcatttgtatgatggattattcaaggcacgtgtcctgataaaattttataactatattatttacgaaaggattgctcgttcgagtttcttaatttccatcagatagttataaaattgagtggtttaatttcctgctgtacaggtcattccttttgacaataaggggcagctgaaagaggcatttaatattaggtattgttattacattctcttgttgttagtacataaaatagtgtctattaactattgttttctgtgaaggtggcttttacatgaatccaaaatgccgtaacattgatgtttcagatgcatgcctgtatataaaaacaccatttggtagcataaacttgtcagataattcatagctttgttctagttaacaacattttatctaatgaaaacaatttgggctcactcatttttccatatagtttttatgtaaattactcattgtcttatgttgcttgttcatttttgttttagaactgttttgagtcactaagttctttatcaaccatcaacaactctgaccattatcctttttaagtttgtgggaaataatttggttgggtagtatctaggttgctttattttgttattttgtatgaatatgctagactaagatgtgactacatgacatatgggctttgatgatgatcgacatgatagactatttgaggtcaatcgctatgtgttttgaaactgtttgattgtgtgcttagcttatgatacttattgcgaatgttgttatctcaatcttttgatcacttgtctcttgcatagtgtgattgagtgggtactgtagagacttggaaattgtgataacattgaaaaaactggaacttgcttgatttacttgctgaggcaaaatcctaaattggatatgactgaggcattttcttttaaatgtttgagtcaaaaagctaacctttcatacattatattaacctcttttgggcctaatattatcattttagtatttgccatttaacccatatttagccttgtattgtaagttctcatcttgattaacttttacattttaccctcttttgcactataaacataggttgagttgtattgaacgaaaatataaaagtgaagtaggattggggtttattatgaaagtgttatttttgaaggttttatgtgttaattctaatgaagaagatgagttactctccattcgctatgtgttgcaatgtttcttgtcacattgactaaaccttggcatacaatttgaatttggtgttttggtatatatctgtccaaattcatttatgcatttttctttatcaaattattttgttctgggattgtttttcgtaacatttttctttcttatgcataatgcataacatgttttcctctttgttttttatacttatattgtatttctttgctatcaaaaagtagtctagtttattttgacattcaccattctaactcatttacttttcaggcttgaggaacttcaagttttggatatcaaatttctttttgggtgttcaaagcccacaattgtagttctttaccaggtcctattcattctcctagcactttgtatgaattttatttgttgttgatatgggtttacactggctcataattatattcatttattgttaatattgctgctgctcatgtatcttatttctgaagatttgaatataatgtgcacaactgcaggataataaagatgctcgtcatgtcaaaacgtatgaagttgctttgaaagataaagattttgttgaggggccttggtctcagaacaatcttgacaatggagctgccatgctaattcctgtacctcctcctttctgtggtgttcttattatcggagaagaaacaatagtctattgcagtgctaatgcatttaaagcaatcccaatcaaacctgtaggtcacagatattctacttattatgctaaattttataattgttgaccatgtaatattgtggttaatttttatgaccgaatttttctgatcttatagtccatcacaagagcctatggaagagttgatcctgatggttctaggtatttgcttggtgattacaatgggctacttcatctcctcgtaattactcatgagaaagaaaagtgagtgtgacttggctaacgcacatcctttttattaatggaaagatcagccaagtcctttggctaaggcttgagtccttgcttgatgtactatattctcaggattttcttcattattgtagggtcactggactcaaaattgagcttttgggagacacttcaattgcatctactatatcatatcttgataatgcagttgtctttataggatcaagctatggagattcacaggtgcaatactgtagctcttgaactatgttacataaccatttgttttgtaaactcgtgcctttgtctaaattttattgtgagcttcattttctgaagttctgaattttttatgctgtggatatttatgagctaccaattttctaccatttatgatatgaaaaaacctaactgttatctgtaatgcatgatttggattctggtactctgcaacatgtttaattctatacagttctcttatcatccgtaatattgaatgttgacactttgtatttgatgcgaaaccagcttatcaagctacacatgcaacctgatgccaaaggttcatatgtcgaagttgtggaaagatatgtcaatttgggacccattgttgacttttgtgtggttgatcttgaaaggcaaggccaaggtcaggttgtaacatgctctggagcttacagggatggttctcttcgcgtagtccggaatggaattggaatcaatgaacaggtttggcttgtcttagagttgttttctctagcttgattagtgattcactttcctttgatctaagtcacaccttgacttgtatttttaggcatcagttgaactccaaggtataaaaggaatgtggtctctacgatcttccactgatgatccatttgacacatttctggttgtaagctttatcagtgagacacgaattttggcaatgaatcttgaagatgagttagaagaaactgagatagaaggtttctgttctcaagtgcagactttgttttgccatgatgctgttcacaatcaacttgttcaagtaagttattttttctggttttcctttttttttctctaaaaaaattatttatgctataattattcccttgatgggttcattttctttttctatgttgttgataactcatttttattatttttatatatttatatatgtacatatataaaaataatgacaggtcacttcaagctctgtgagactggtcagctctgaaaccagagtactaaagaatgaatggaatgctccatcaggattttccattaatgttgccactgctaatgccacccaggtattcttcatactttctgcttaataaattgttcttattttttcttttgtgtgggtgggggtatttggaaattacatggaggctctaaggagcttgggcatcatctagttctattgagaaagcttccaaagcagctgccccactattacttgcattaaacttttggatggtgtctgattgaaactttattattcatggcaggttttgttggcaactggtggggggaatttagtgtatttagaaatttgtgatggtttattgaaagaggtaagccatttacgattggattatgagatctcatgtctcgacataaatccaatcggtgaaaatccaaactacagcccgctagctgcagttggtatgtggacagatattagtgtcagtatgttttcactgcctgacctaaagcttattacaaaggagcctttaggaggagaaatcattccccgttctgttctcctttgctcctttgaaggggtaagcctgtgctcaagttttctagactaaattattttaatgctgctcatgttgtattcgatgctaatatttaaatgcgtcatatgtttaactactgatatgaccactccatagtgttaataatggtatgtgttaagcctgtctggttatatctagaaagcaccctcacgacaaactcttaatcattctttaactctttcggagattgtttcctttttcagatatcctatttgttgtgtgctctgggagatggacaccttttgaactttctgttgaacacaagtactggtgagctgacagacaggaagaagatctctctcgggactcagccaataacactacgcacgttctcgtctaaaagtattacgcatgtatttgctgcctcagatagaccgacagtcatttatagcagcaacaagaaactgctgtatagcaacgttaatctgaaagaagtgagccatatgtgccctttcaactctgctgcttttccggacaggtatctttctccagccatttaagatttatcgctctagcccagtgaaaagtgttaagcaaacagtgttagacccatctgcaattggccagtgttttatggttctgcaaaatgtgagactaattagtatctttttcccctctttctgtgtgcagccttgctattgcaaaagaaggtgaacttacgattggcaccatagatgatatccagaagcttcacattcgttccattctactaggggagcatgctcgtcgtatctgtcatcaggagcattcgaggacatttgcaatatgcagcgtaaaatataatcagtctgctgcggctgctgatgattctgaaatgcactttgttcgcctgttagatgatcaaacatttgactttatatcaacttatcccctagatacatttgagtacggctgctccgtacttagctgctctttctcagatgataatactgtatactactgtataggaactgcatatgttctcccagaggaaagcgaaccaaccaaggcaagatggccaagtttatactttaattcctctgattatcaattacattttttttcaaaattgaaaatttcaaatcttttattctgaagtggaagaaactgatgaattttatcttcgtgtagggccgtattctggtgttcgtagtggaagatggaaagttacagcttattacagagaaggaaaccaagggtgctgtttactctcttaacgcctttaatggtaaactacttgctgctattaatcaaaagatacagctgtacaagtggatgcttcgggatgacggttcacgagagttacagtctgaatgtggacatcatggccatatactcgccctctatgtacagacccgtggagatttcattgtcgttggtgatttgatgaaatcaatatccttgttaatctacaaggtaaggccaagtgtagtacaaaactttcttggctcttcaatcttgattatattttatatgctcattttctctgtgctcatttgtattcagcacgaggaaggggccatcgaggaacgggctcgagactataatgcaaattggatgtcagcagttgagattttagatgacgacgtataccttggagctgaaaacagctttaacatattcactgtgaggaagaacagtgaaggtgccaccgatgaggaacgtggccgacttgatgtactaggtgagtatcacactggggaattcatcaatcgtttccggcatggatcccttgtaatgcggttgccagattcagaagtgggtcagattcctaccgtcatttttggaaccgtcaatggtgtgattggggttattgcttcccttcctcaagaacagtacgtatttctggagaagcttcaaacaagtttgaggaaagtgataaaaggagtcggaggtttaagccacgagcaatggagatcgttcagcaatgagaagaaaacagtggaagccaagaatttcttagatggagatctaatcgaatcgttccttgatctcaaccgtagcaagatggaggacatctccaaacaaacgggtgtttcggtggaggagctgtgtaagagagtggaagaactgacgaggttgcattgaggtttctttcttgttatgtggggagttggttgttcatttgttaattctttgttcccttattttgtaacatttctataattgaaattcctaagaagagtgttgtctaagatatattttctgggtggaaccatagagatagagatcatgtgtattgtatatttatgttaagtgtgtgtacctggattctaatggctttactttactttgctttgtttttttcttttttctttttcttattatcacaattagggtgtttattagtcattgagaaaaattactaaccttttgtttttaatgtattgtttattaagagagaggaaatgagattgagaggcactaaccaacttttttacaagtcctctgattttgtcgctctctttagaggtacagtgcgggttgtaattttttttaaactaaattaatatgtaattttttaatttttcaaaccgtaattgtacagcgagattttagaaccacagaagtacggtgtagtgaggtgcagtttgagcggtttacactatcatcattattgaactataagttttatcaacacaaaaaaaaatcttaaaattttaatatcataatatatatactaatcatcaagtcattatattaaattctttaaaaaataatgcaatgtataaaaattatattacatatatttagtcttatattaaaaaatgaacaaaaattatattataaaaatttattactttgtaatatatagcgcggtacgttttgaactaattattaaattaaaaactgtaaattgcactacaccatgcggtttggaaaaaatgcaaaccgtaaccgcaacacaaatgattgcaaatcatattttttatacagtgtgatgcagtgcgagcagtttgtgcagtgtgagcggtttgatgaatatccttacctctctcatttattaggaaaatttgattttcttatacttaaaatggcatcatgaagagattatgtaatatagttttgttacagaggtagaaactggtttcttcatcaaaaaaatattttctggcgataatgccgattttgatgactttttcggcgttgacaacaactccgttgactttcctggcgccgactgctactccggtgacttttctggcgttggcagcaaactccgacaccttttccggcaccgttgataactccgacgatcactgtagttttcatttgttttatttttcttaaaaaaaatatgaaa

SEQ ID NO: 296645 - DNA, 2501 bp, Cannabis indica
tttagtgacacagagtagaaaacatatatttacatctctcacagtatagaaactagagtaagtaacatatacttgccatgagcattgagaaaaacttctgttcacataagatcattaatttggggaaagtgaaggggttacaaggtcctctcatttgtacagcagctaaaatgactgcttaaaaaatccaagtccttcactgaaatcttctgtcttctctgtctacatttcaatcaaatgagtaaacacaagattccacttaagctttcctaatagaaagtccttgcctcatactaccttacaaactacagatttacaatattattctcaccaaaataaaattctatgatagaaaaaggcagtcaggttaagcaatttagaccaaaatctataaaaactttaaacaacagagacagtctcaccttagtgtaatttttcttttctactccatatcccttgacatacagataacccattccgttgtaagcagaataaagctgctgctttgatgcaagtgcgagccattccacagctttggtgtagttcctttccaccccagctccccgagcatatatctctccaaggagctccattgccctcggttcacccttctccacagccttcaaaaaccaagacaatgctttcttatgatcacgccgcagaccccttaatccaaaatagtagaaaagaccaatcttatacatagcaccagcattgcctttctgcgcctggtattccaaaatttgaaaatcttcatcctcttctcctcgagatttcctcaaagcctccttattctcctctgccccattgtgaatcctcaccggttcaatcactggtgaatcctttgaaatcaaaaagctattcactgctacttcagctaattccgaataaagtttcaccgccttttcatacatctataacaaaccaatcaaacaaataaataaaatcctaacaaaccacacaattatgggagaaatttgccaaactaacaacttgaaattataaaatttgtaaaataaccacattgaatttgcactgtacaaccattatgatcgccgtttatgatcacagtgtaattattggttactcatcatttcgctataaacaccgtcaaatgaccattatggttgatttgtgactataaatttacactgtgcaaccagtaaatgactatttacatttactgcaaatttcaaatatataaaaatcaaatatatctatccaaataagttgtttaaacaaatttatatacatctataaccaaaccaatcaaacaaataaataaaatcctaacaaaccacacatttacttttgatatttgccaaactaacaacttgaaattgtaaaatttacaaaataaccacattgaatttacactatgagaacataaaatgcgaccattacagtgtaattatgagcgaccaaacgtgtttattttgctaataaatttttcaaaagagttattttactaataaatttttcataaagaccataaattttcactctacgaccagcaaattcaatgtgatttttttcctaaatttaacatttttatattgttagtttagcaaatttcccacaaaccacacatttactgcaaatttcaaatatataaaatcaaattcatagttgaattaagtgttcatacatcttgtttgaagtaagtatacgcaagagacatcttagactgcatattacccccctcagcagcgaaatgatgatacatgaaagccttccctttattcttctccttcatctgtcctgtaccgtaaagaaaccctagaacagattgagcatgagaatgaccagacgcagcagccgcctcgatctccgcggcaccttcttccatgaccaattcttcgccggaactcacagctctgaccatcttcaacacacctgagtagtacatcgcgtcggactcagaacctggctcggcggaggacaagtcaggctcaaagatcggtctccacgaaccaggatcgagttcttcgtcggacttgtggggatcggaatccccgaactcgtcccactcgggcgagtcattgtgagtggaatctgtagggttttcatcgggcggtgagtccttgagatcgtcttggagaacgaggagaacggatcgagcgtagagagagattgggaagagagagaaaatgaggagagagaagacaaagcctcgcattttttatttttatttttatttttatttatttagaaattaaaatgggaaaatgagaggttgaagaagatgatgaattggactgtggtgaggggtaaaattggaatatcatttacatttatatatgtttggattgccacgtcgagcgttgtcacttgtccaatcatattccgccacgtcagtaattttgttgaataactgtaatatcatataaaacaaagaaattgaagatatataattacaattttcatttatacatttataatttactttttatttatttatatttttatgattaattttttatttatttataaaaataaaa

SEQ ID NO: 296646 - DNA, 978 bp, Cannabis indica
aaaataaaataaaatgaaacttttcagatgtgatttccggccgccttcttttttttttcttcttcatttctctctccgtcggcaccagtcagtatttcgacgacgaactaactggtattttcttattcgctcgttttgaagtgtctgtgatttgttattgttattataagaaaataattgtctctgttagacaagaacgggctttaatttaatgtgtgcacaaaaagggtggggtttaagaagtcactgtggatagaggatgagatgatcgggttctgcatttttaaaatcttgagattgggagcgagctcatattttgcgcgtgtaaagtttggtcacttttctgtaaagggtatttttgccatgttttttctaggaaaagaaaattgagattttaaataatgtcaagaaaataggttttgggtcatttttgtttggttctaatttggcagctgaaatgccaagttgggatcatcattagagaagaaacccagaacgtgtgatgagctgcttgtcgcagttttcttcgcacattgaagcaatcttcagaatcagtcatttcagagctcggacttgttggtgcggagcttatgcttcttcttcttcttcatggagtaatagaagagtccagtatagttaccgcattactcctccacacgtcaatctcaactcttcactgaccagttttggtgctcggttttactcctcaaagaaagcaaccaaaagcgactctagtagtagtagtagtggaactgaaaccacgccaaggtagtaacagaactcattattagtttatttaatcaactcgagagttagcttgatgaatctattaattcgaatttggagatgtttttgattttgaaaatgatgattttctttcttgttttgttaggagaaggaaattgaagcccgaaccagcaatggaccaggagaaagatgctttctatgtcgtgcgcaagggggatgtcattggtgttt

SEQ ID NO: 296647 - DNA, 7272 bp, Cannabis indica
attctacaagtttcaattgatagcagttacgaataaatatttttcttagatattttaacattacatttatatgtacattttaactagataaattttgttaaagaaggggaatcccattcttttttttacttggttaggttaatgagggtgttgttgggctttgggttgggctgagtggacttttaagggaagatggtgatgatggatggagtccacccattgacccaaatagttgattggtttagtcggtattgtaatgttatggaaagacaacttgtgtgtaataataataataataaatgctaacaacttctccaactccctcctttcccatttaattttctaaatgccttaactcatacgatctttaacaaaagcttcactatgtatatgtgtgtatactttctcaatctttttctttaaatttataacgaaagttacagacacaaacaaaaaaaaaagttgaatagagaatcccaacgatcatattttagaattctatttgaatgtagaccgaaagtaaattttcatgatgattttcttgtatatttttttatttaattttatttctatagtatagatatataaatgataataccaatcatttttgaatgtgccaaaatatttggagtttttttgtaggtaggaaaaggacaacccaaagaattgattattgaacaatttacagcaaagacttggagtgaggaaaccatgaattgtttaatatcataaaacaatgaattataatataatgaatcatactttaaataaaaagtataattggttgaattttttttcactacagtcaaggattttagtccttgctacggatagggatttcgtactagtgattattgattttcgatattggaatgaaagaattatttagaaattttaaaataacacatatcttttctgttgccatggccagaagggattgaatcctacgccttacattatatataatgtgtttttttttttaattattattatttaatatttgatatgtcgttttctgttgctatgatacaatgtttgggttaatgctctggactttataagtatcgctaaatgttttgacaatatacatgtagctaaagacaatcaaaacaagctatataagggaattccaacttgtaaatgatgtcaaaattcaagcaaaattagttatcataactaactgagtcaaatttaaccaaaacatgtgcaaaaacaatgtataacaattcacgtgtcatgtggatgatactcactgaagaagtaagcagtaatccttcaaagactcccaggacttgtcaatgtcatcaaccgtcttctccgcttcctcttttttgatccataatgggttcacatccagttcagcattgatcaatgcttgtcttgatgcagttgcttttccagccaaatcttcaagagtgatatgaagttgtgccttctcttccttcctttcggctagttgtctctccatatctgctatttcccgatcgacttcctcaactcgattcctagtaggtatgaacttggaagacaactgtttcagagtggttttcagctccattattgagctcactttctgttcagctactcttgtgtcctgctctgctcccacatatcgttcacaagtttggttgaattcatctagaaactttgttatctcatccactttgttatcaggaaaagaattgacagtaagcataatagaaactgaattcttaaattcgcgagttcttcctgacgagatgaagcttccaagcttcatatcgaggcattgtttgacgattttatttgcatttgagatctcatcaatgctaagcatagagcgctgtaggcggcttgaactaccggcctcaacagcctttacttctaaaaggctttgaatgtcagcaaacaaggcatcaaatgaagcaagagaagaagagtaactagctgcttcaaccacatttcgctcctgaaacaaaatttgcaaaaagaaatgagagctctgccaacaagcataaaacaagcaccaagttaagtcaagtctgtcaacctgatgaggatggacttgttgtggatcaactataacgggggtagatgggattgacgtcattttaacttctactgcattctgttcattcagttgtgaggatttagtcaataagtaacatgagtgactgcctgagtacaaatgtctacttgagttgattcctcttgagtgatgatactttgtgatggagagagctcagttacaagagcatctgtattgatagtatgcgaactaggcttaacatagcctccctgcacaagttaggacaatagttggtaaattataccaggactaacataaatgttcagctgagagtaacatttaaaatatgtttctttaaaagcatttgtgataaaccatatattgttgtaagtttctttgaattttgatcacttatctcaagaaaaatatagacttaagtaaagcatttcttccattttgtcctcacatagtttgcaagtaaatcttggccttggtagggcaatcataatttgaaagatgaaattaaagtaaatctttaatataacaaaagactaaacacaaaaattcaggccaattactttgaaacctcccattatcattgaatcggaggaaaagtgaaatgtgaatttgccaaactgctgttacacaacctaattctatcccaatgcaacatgagtagacgacttttaaattcctatcatttgtctccaaccaaaccacccacatttacatgacagccaacactctacaattcctctgtatcttttacatgctccaataaatacttgaaaatataatcatagattcataacatcactttcgagaaatccactccagactaaattcctctcaattggccaaatcataataaaggacacagagatcttacatgtccagatgttttgacaaataatgaaccgaacaaggcaattaacaacattgttttagcacaaaagtattagctatgaacaaataccttgtgttcgaggagatactcaaagaatgatggaacatctggacagtggcattgctcaattccttgcaatttctgaaagcagatgatgtccccatctttaagctgtagaaaaggttaaaaagtgcacgggaggaagatcaagagaaaaataaaattatacattctataaacaatctgcaataggaattagcttctaataatatatgcataatcaatgtgtaaatggaaaataaataccatacctatgcaacccctaagtacccaaatgaaaaaatgttagcaaaaagtagtttatggtaggaaattagcctcaaaaaaatatacctcactgcaaaggaatgtgacctggatgtcgatgggaatacacatgatgcaaggttcaaactttatctcctgcacatttaaagaagctacactcaaggttgctattgataaaactaggaaaatttattcagagtgaaatcccaagttacctcaaaaagtttaatttcctcattagaattgaaaccagccatttttcttaattttctcaatattccatcaggactccttcctagttttacaaaaagccttcctacatacctgaattcccaaaaaataaaattaaagataagactagtagagaggaagagaaagagaaggaggaggagagcgagagtaccgcagctcttctttccacgggtcatatagtttaaagaataaaaggatatcctcttcagtcttttgtggaggagcaataggccgcaaatcctgagtgattgtgaaaacagaaaaaggaaaatgtaggagtaggattcatgttttcagttataaaaaaaaatcatatatgatttaactaaaaaattagctggtaaagtttgattgagtggttaagaaaacactaccaaatcaagttctacttccagaaaaagccttagcactagtctattgctcgtcctgtctgaatgctctctcaattttacaacctgcaatagtcagtcttgtaacaaacacaaaagagtgcatgcttctccaccagttaagacaactataaagtaactcatgaatttgtatcttaattataagaatgaatgatcagattaattagtaattctctttaaaagttaaaagatgctcgaggaacgaataactagttgaggtagtatgatgagtacaagtggtaaattctatttaaacattaataatgcttgagaaaacatctaatagatagatcaaatgaatttagtgccatcaatgtttaatgtcacttaaaaaagaagacaaataatatcagtttcagcaagcaataaagatgtcattgcaggagttgaatgtatttttaacaagaaaacaaatatttaatagcagcaacaagaaaccatccgccacaaataattgtgaaaggcaagtatcatgcaaatttgttagcttttagtgtgtcaacacactttcgaagaacaagtacatttatatttaatcctgttactacaaaacgtgggtagtataagtttatgtgatttgctggaagattgtagagggtttggaagggagttagttcaaagatgttttaatgtaatcagaaattaatactctcagaaatgtttgtggggttggaacacttcagtaggcttcttctctatggataatcatagaacttcctaaagtcaaatgtttcaatatggcaggccatgtgggataaggtgaatgttcgtgaggtaatgcagagaaatattgttttcatttcaatgcagatatggttcaggattttgaaggattttttggtgcattccagctcactatttcaaattaaaggaagacaagagaaaacaagctttggggagctgcagtagctgctgtcttttggattttatggttggaaagaaataatagaacttttgaagacgaggaaagtgaggtggagagactgtgggataatataaggctaaaagttgctctgtggctgcataatgatagaaattttaaagatgttcatttctcgttttggttgtgagattggagtttgtcattgtaacttctttgttcttgatcagagctttaatagacaggtttctaagacgaggtttaagcaccaaatcgataattaccacaatagccacaatgaaacttgtaatctaaacatatatatcatataaacaatacaatgggtagcatttttaaatgatcttacaggtgtactttcttccaacaatgtcaaatgcctagcaggtctgtaggtttgatttatgcggttttcccacaaccagaatcgttgaaattgcactggtatgcttaactctttggctaccctttcctgagtaaaggctcaattgttataatgctgatagtagtgatcaaaacatttaaattttatagaaaataaagaaaaaagattacttgaagtttcatgacaaacaagtataaatttcatcttaggtaagcaatgggtaatctacattagtgtatgcagagctcacataaaaggatgtgtatacaaatacctaaattaacaaatgcttgtgtgtgttggtttgtatgcatatcaacactctgctcgtgtatgtatgagatttgtgtgtacatgtacacacatgcttgtgttataaacataatacctgttttgtataaaaggaaatatataggtgtatatattctatgccattagaattcagaatacacagacagcaataccagaagtcaaattacatgtttttttctttcttcagtcttctagacctcatgtgttgctgctagatcatgtggcatacatcaataaagaaatgacactagcagaaaaatcctcaaatagtaatcctattttgtccaccccacccttgtctatagtttacactttacagtaactggttggacaaatcagcagaacaatttggacagtaaattgatttttgtaacttcttccaactcatttaaaacttaaaaataggaatctcgataaactacgtagataagtaaaagtacaggcaatttccatgaaaacagttaacattgagacaaaatagtaattacatactgaatgagcaacaaaattcaaaatggaaggaatgtgaattgcttaaacaaagatcagtaccttaaattggtagaagagcatttgttttggaacatgaaaattaagaactttgtcaaaattcacaagatcaaaatatatatcccttcctatctgttcaatcatatcgttgtgccaagcaacctagaaacccaaaagatacatctgggttaaacagagatggtgtacaacaaacatagcataacatgaataatttattggcaaagaaaaccattgctttaggagatttatgactccttaactcattatccaaggaccttaaacaagccatttgcttacatcttggtcaaacttgggaatattgtcttgagatgaatttggaaaataccccttaagcaattatgaagcaacaaatggagcaaagaaatagcaattctattcaaaggccttaaatctatgaatcagcacaagttgaaccaagtccatattttcaaaggccttagtaatagtttcatgaacacttcaatcagtgaaactctaccctttgagaaaaccaaccccataaaattagtcaatttttactatcttcaaaaaaaaaaatctattgaatctagcctttcaccatgtgtgtctgtagtgtatgttaattggaaaactgtgcccattaaatttcaagtatcaagaagagtaatataatagtgttttaccttgatgtccatgtccgtggtactttcctttcttcctttcttcgtagatcctgtttgtctttatgtcctttttcgtgatcgatcaacttcagtgtttactataaaaaatctcaacccaaacccagaacatgattttatcatttcaaataattagttaaagggtgtcatcacaagaacaaccactatatttgctttcattttgaacacattttctcaaagaacaaacagtttaaagacgccacatgccaatcatttctggctgtattagtgatcaacatataaaatttgggtaattagaagaaaaaaagcaacagagtagtcagttaccttacctggagtagagtgaagttgaagaacagtaatggtagtgttgaagagtcatcaatggatggcgctccaagctcaagcaggaaaagcaaaagccttttctcttttcttcttgagaaactttttatatgaaaatcctcaaacttggtcaagaagaaaattcattaagacataacttttttttaggacatttgaaagccaacatagggaatttgtaaaggctaattatgatttttgtcctctaaatttt

SEQ ID NO: 296648 - DNA, 1550 bp, Cannabis indica
gtgagatgaggtgagagcgctgttttgaagtaacccagattctcattctaaatcccacttccataaccagagagagcgagagattgatccacctctgagaatggcggcggcatcggatttacctgaagggactgtgcagaacattctggagcaggagagtctcaagtgggtcttcgttggaggtaaaggcggcgttggcaagaccacttgtagctccattatctccattcttctctcccaagttcgatcttccgttttgatcatctccaccgaccctgctcacaatctcagcgatgcatttcagcaacgctttaccaagactcctactttggttaatggattcaccaatctctacgctatggtaacaaacatattctttccttgctgtgtttttgcttctgctcaattttgattttttattttgttttctgtttattttttcggcggtgataattatgcatgtcattatagatatgggttctgttatttagtgaatttggcactcacttcctgttttttgttactgcatatatttgtgtagattagaattacagatactgattttctccagcttcatttgtggtagattttgttcttgttttgcttgaatctagtgtagttatggaaattcggaacacccaattcttgaaactctctgctttgcagagaacaataggtactgtgtgatcatttgagattttgaaaacagttttgtgatggattttgtttagtgtcttcatggttgtatagctaatagctatgtatgctttttaccgaacttttttttttctcctgaggtttttatgtagtcgtttttgattttggtatctacaggaagtggatccaaccgttgagcatgaagatgtggttggtgcggaaggaatggatagtctattttcagagctagcaaacgcaattcctggcattgatgaggccatgagttttgcagagatgctgaagtaagaaatgagcacaattcctctctttctttttctttttgttttctccaacaactacaaaagttgtttttggatccaaataagtaatggctgtcctaacgcttaatttttatgataatgagaaattatgcttgactaacttcaacttcaaggtgtttgaggtttcatttaattgttaaatataagttggattatgatgaaaacccatgcaattatctgggaacaacattttcgtggcttagcaaatattgacatgtgtgcttctctggcacagaaactatatattgttaaattaactgatacattcttataaattatgttctgaagattggtgcaaacaatggattactcggtcatagtatttgacactgctccaactggtcacacacttcggttattgcaatttccatctaccttggagaagggtcttgcaaaagttatgtctttgaaaagtaaatttggtggtatgataaaccaggtatgttctgactttaacaaaatgtataatccataattcttatatttggttgctactaataaattgtttttcttctagcaaaatctaagatcacattggattgctttaatgtt

SEQ ID NO: 296649 - DNA, 2740 bp, Cannabis indica
atattcctatgatttggatcatttactatcatttccctatttaaaaatcaaattatgtgaaatatatttatccataaaatttataaacatatattaaatttaaattttaaaatttgatatgatttatatatagaaagacaaagtttgaaattttatacacaagcacagaaagcgctaaaaacaaagattttttttttcttatatatagaaaagactataaataataagaacatatacttatgtagttatataatttgtagttatttattataatttctcatctataatttgtagcaacgtgaatatttcattatattgaaaaaaaaaatattaaataaaagaaattttgctacaatctatgagagcagaccaatacaagaattttctacagtcatacatactattaacatgactatcatctaataggagccccttgatcccctgacctgttcaagatcattgatcatttaaattcttcttcccactgttagatcaaatccatcattccactccaacttcaccaaacaacaatgtatgtatgttccgcgtgcccattctattgacaagcccacaaatttggacttcttcctgagcaaactattctctcatgagagagattttctgggccacattacaacaatatgctgaaatttctacaatttttgtgttactaatgaaataattttgggcccaaatgaaggttacccaatttttcttttttctttttaattttttttttcttttatgcaaggctagaggatgattaatagggtttctgcatgaagttgaatgagaacatgtcttgcaagggggagagccggtccattgggtttgagtattggatttgaagctgagacccaaaaggatcatctgagaatccatccatgtaattgaagtcaaaatcaaaggcattcgacaacacgtcatcactgacagtattccatttgggttcactttggacctctctatcgcacgtgaactcgggcgaaagcacgtgctccgacccgctggagtccgtatggagcttcggtacggagtccgacgtgtccatataaaagtggtcattgtgcaaaacagagggaataatatggggttttgtgtcctcaatttcagggaattcctccgtcttcatcacctgattcgttgccggatagttcttctctatgctaccctttttattgtagattcgacacaacacccaatcatctaactgaaaattaataatttaaagtctcgttagtttggcagtcaaatattcagatgcaatgtaattggtaaaaacaaaaaataaaaaaaaaggaaaaaggtaggcaaggcaaggcaagtacccgagagttgtttttcttgccagcggagcgatccacgttagcgaggcgatattcgtgcatgatccagttggtcttgatacctttaggggctttgcccgcgtagaaaactagggccttttttattccaagtggtttgggctttccaatgggcttatcagccccagtcgccttccaataacctgttccagcagctcggttcggcctcgaaccgtttggatattttcggtcccttggggaaaagaaataccactccttctcaccgtaaagagccatttctgcacaatattatcatttaacatcagaaacaaaaaaagttattatattatattatgcaaaaggaactgaatcaataaatgcattcaatttttttttttcaataaaatatataattttttgaatattgaatgctttaccgatcttaaaaaaataaataaatcagttggtaaggaaggtaagctcaaaatcgagaaacttagatctaattagataatcggagaaagaataagaccgataatcataccaggaagctgccacgggtcgaatttgtataaatcgatctctttgattatgggaactgcgatgggaagcgaagaacattttctacacaaataatggtttactaattcctcgtcagtggggtgaaatctgaaaccggggggcaaaatcaattcaccagtgctcgtcattcacgcttgatcgtctgtgtttgttggttgttcccttctctttactttctttcagattagcttatccgtcttcttttgtatctctactataatactgcttcttcttcttcttcttcttcttctaattggttctgtgacttgaaacgtcttaaggagccctagaaaggggtttatataaactccctaattttgtgcggacaaatttagacacgtgcgggaagcaagatagagagattggagggaggcgagtaagttgttaccttagcgcagccaggtgtgtctggtgacacgtgttgaaacacgtatggttttccccttagctagttttgtcattgctttcgtcacagcatttggacacttatataggtcggcctcatccacttgtgtaatatttagaggatcgttgacagtcaagggcttggacttttataattgcccattttcgttattaagccgatgctctgtcaccaatctatattattttgcgttttttggtacagttaaattttttcttcttttgttttatttgtatttaattcattaagtttaaatattaacagtaaatttttttaaattaatgacctaatagaaaatttaaggtgctatttgttaattgttacaatgaggtatttatacgtacactcttgtatacattatacaacgtgtatattagtataactaatattattatttaaaaatcatttttaaaattcattttaaaattaa

SEQ ID NO: 296650 - DNA, 1418 bp, Cannabis indica
ggggcgactgcccccctcgctacaatatgggtccgcccctgatggtcgatatgtttatttaatcagttatatatagtcttcacttagcctagccgcttttcaaaaatcatgatccatccatccactattcatcaaatatatataacactaaataccgcacttaaaaatttttatttataaaattcatatatataaataaaatgattttttcaagaaacataattactaaatgttcctaaaatctaatcctatgctagatttgttacctaccaggtttatcttgaaatttaatgagtcataagaaaaaaaaatagaatattatgttattttttaaaattagtgaaagacaattaatatataaatttaaaagagaaattttttttgacttcgaactaagtgaatcctaagcacagaacgagcttgcttattcttaagatcggaccgaacctgttgagtatttgttgtctaatatatatatatatgtatatatatatacacgagtgattcatttatatatatggattcaagtctcattattaattaagcaagaatgttgtgttaagtaatatgctattggccacttagtttttgtatttgactttggatcgaagctcgatctctacacatgtacaactggctttatttgtgtgtatttatttattaattaattaattaattagctatagctagacctataattaagaatattacgtacctatttcttaattattaattgatacatatggatcgatgcatactatatattactcctcaatggaatttgaggtttgacctgtaaaactgagaaagatagaaaagcaaagagaaaacaagtaaacaatcttcgatcgatcaaagaaaagtcagccctaataatgaagctaattaatatttatactaagtcgactatgtaataacaagacaattttaactgaaacataaaataccaattacaacaatctaacatattgctggacaagaatgaaacatatatatatataatctctgctccaatatattagcaggccaaaaacaaaaaccaagaaaaattgagagagtcataataatgtctcattatcttaaacatcaaaatcatccccatcgattgaaacaaattgatgatataggaaataggtacgaaagagctcaactctactgcagcctatgtgggcttatgattcatcgcaacattatatgctatgttttgctcaacatggtgtgtctattccctccataaatcatgtgctgagtttccgcaacaccttcatcatgtgttgcatcccgaccatggtcgtctaatgctttataaaagatcattagacgacacaacttcaattacgtgttattattgtgacacttcttttcaaacgcaacaaactcttgcttacaaatgcactcaatgctctctccacatgcat

SEQ ID NO: 296651 - DNA, 4587 bp, Cannabis indica
tttatttagggcacataacccaacattaaccccctctactgggcataatcgggcctatggcatgaccactactcacaatatggtgctgtaccgtggataaacaaccaaaaatgagccgaatccatttgtcataaaaccccatccgagttaacatagcacacaaaaaatgccaatcgagcctattgtaagctttgcttaagtccaatttcaaagccatgtacccatccttgccaactttcttcctttaaagatagtgtaaaatctcgaaagaaactataacattatcagtaattaaatgtccttgaatgaacgcactttgattaactgaaataattttcaatgatagccctttcatcctaatagcaagaaatttagtaataattttagcaataacattacaaagggagataggtctcaactcactcatttgattaagtttcgtctttttatggatcaacactaaatttgttgaatttaaatcaacaagaatctcctcacttatataaaaaaattcttgacagtatgtatcacatcagctccaaaaaatagactaatatttttggaaaaattttagttcataccatcagagtctggcgatttgtcggggtgcatctaaaacattgcatctttaacttcttgatcagtaattggtctaagcagctcctcattgtgttcttcacagaccatattgagatatacaatccagaactactgaacaatctgttgattcagctcaaaaaatattgttgaagtaatcaagcataacaactcctaacctgttatcctagttcttcaaatttcccatggaatccttcaaactcaagatttgactattaccgctgatgctttagaatggaagaacttactatttttatccctaatatggagccataattgttgtgatctctgcctccaaaacacttctcaccgattcaagactgcaaaaggttctttcaaattacaaccttacttatcttaggagacatagttactaaactctaaaaattatactcactatccataaaaataaatatgatgatttttttatacaattaatatctcaatagatttcgaacactatttttaaaccgagtataacacatacaaacctgagcttaagctccaccaatttccacccactgacgagtttcaaactatcatgggtatttacctgtaatttggtttcattttatgtgttcttgtaagttctaccactcttgcctattctctgtaccatgttcttgctctgtcaaactaataattgtctttatttgaaatatgttgttctttattttgaaggttatttgaatgacccttttctttttatggattaggctctgctttttttcctactataaatcgctcactattttgtctgtttcactattcctcctccacttatagatggtgggaacattatgcaggtattttccttactgttcttcctcttgatttcaatttgataaccttagctatttcttaatctgctctaacccgtattttcttcattcttttagcagcttgaattcgtttagactcttggcatgatggttttcatcttcgagctatttttgaaaattcaaagaataagaatagttttttgtatgcatatgctgtatctagaaattcgttcaacacaactattcaaagattgatggacttcgatgttcagatttgagacttggacatgcctttcacaaaataagtccttttagatgcaatttcctgtaagacattatttttttaaaattcaagagatcataacttcatccatgtagtttttttttatatttaatttttctgacagttcaacactaatttcttggcatgcaaattaattttggataatcttttgaacaattattaattaagtcctgttatccaactctgttcttgctgtcgtttcttgatgttactctaaattaagctctggatattgcccctcgtacaattttttttgtcttttttgaatgataatatgtcttcatcatctattgaagagcttttatccttgatgaccactgttttaatcttgtatttgctgtgccaaacttgttgaccttaaacttcacattttgacatcctgttctttaagaacttatcatgcacatttttgtcacaaacaaatcttataaaaaaatttgaactttaagtccttactcttcaaatagaaattattagtacttttaaaattaatctcaactttgtaaataaatttttatcttgactttgtaaaaaaaaaaatccttaaatatttttgcccttaggctacttggcgttgctggttcttctgctcattatcctttctaagctagctcataacattcttaaacaactcttcgaacaattctgctcattacctggccttgatctttgtcacattgttattaattatattcaaataaaggttaagaaaattttatgcatatgaagacgatcaaattaaatctattttattgatatttattattaaatctattttattgagattacaacaggcgctttgagttttgtagtatcatctgagctttttgagctttgttagatcttggaagaaaaatatgttcacgattataagactttacaaatattcttctggtagtgcaaattaaaatgaacgcaaaaaaatgctcaaaatatactttttgagtgcccataaagacagcgaaaaatttagaatactagattcataaaataaaatcaatacaggagaatacatgtatagaattcaaacaatgagtggaggaaataaaggaaaaaaattctaagtaacatgaaaaattgaatagaggaattttatagtttttatgtatgccttgaatccattctcttttttggattctatacatgtattctttcgcttaaaacaaatcttataaatgtgagagtttggctcttacccaaatatattcttaagcttatgattttgcttatgaatagagtttggctcttgtccaaatcaaaagtttgttgtatagtgcagatggataaaacttggatccatcacaacatgttagcaagtagaaatatacaatttaggatttgagtttgacttcaagtctcaagacttaattactgtaatatgttctaacaattgtaaaactacaaaggagtatgaggaaggaactataaattttgtgaagactgcaataataaatgctagttttccaaaaaagatcctttgtccatgcaacaaatgccaaaatctaagacatcaagtttcaaattaagttgttggacacttagtattgtatggcatggacaaaacttacagaatatggttccatcatggagaagatctacatcaaaatagcacgatcaatgttgggacttcatatgacgcatttcaaattgacgaagtatattcagctaatgttgacgaagtatattcatctaatgccgatgatttagatgaagatttcattaggcaattggcagatgtagaatcaccattgtatgaaagttactcaaaatacactaaactctcttcgattgttggcctgtataatctgaaaacaaagcacgaattctcagatgttggcttcataaagatgttggagatcttcaaagatatgttgccagaagataatcaacttctgacatctgagtatgcagttaataagcttttaaagaggttcaatcttaactataagcatgtccatgcttgtgttaatgattgttgtttgtttatcaaagaaaatgttgatgcccaagaatgtggcaagtgtaattctccaagatggaaacaaaatgagcacacatgatattttaccgggtcaacctgcaaaattattgagatattttccaattatcccaaggcttcaaaggatgtttagatccaaggagacatccttagatctatagtggcattttactaataagcacgaatggaaaaatgtgccacccagttgattcagaggcttgggatgcaatcaatgagagatggctagatttttcactcgaatctaacaacctttgattaggacttgctactgatagcattaacccttacaaaagtatgagttcttcatatagttgttggctagtaatgcttgttgtatacaatttatcaccttcattatgcatgcaggatgagtttacctttctatcgattgtgattcctagaccaaaacaatcttgaaatgatatagatgtttatttggagccattaatagatgaattaattgaactatggaatggtgtttgtacatatgatacttctacgaagaaatttttcaatttaagagcaagtaataagcataatatatttaactaaaatctataatgactctactataaagtatgatcgatgacataatatatggaatagaaggtcatgtgtggagtccattttcaaggactaactgttcattaataataattcatatatgataagtaaaaaataaaactgaagaatctttatgtccctattaatctaaactaaacttaatcactaaacaattggaaccaagccctcacaattacaacataacatctatttaggccaaatagttttgatcatttttgctctcaaacaagcttttgaaactattaaatctgttggaattattttatcaggatcttaga

SEQ ID NO: 296652 - DNA, 6891 bp, Cannabis indica
attgaattaatgtctaatttaaactgaaattaagatttatataaaaaaaaaattatctaattttgttgatacttttaaataattatctattttaataaataaattaaattaaaatagttaaaaatatgttttcaatcttaaaaaaaaaaaggataattaatcgattgatttagcgatcttggttttaaccgttaactttaacagaaaaaaaaataaaactttaaacgaacaatttttatttgttatccatgtttccggaaggtagacccgtggtacaaccaaaaggtaatcaccatctaaaactgggcctaatcttatggaagtccaagccaaacttggaatgggcccaagcccaataaagactaagggcttcgcctccgagacttaacgatcttccaaggcccaaaacgtgcctagtattctaagtcactgaaggaacaaagacctcaaaacgaaggtaagggcatacatggacgcaagtcgtataggactaaagctagaagcctaccacagattaggagctggatatctaccacggggttagtaccgaatgtctaccatgatatggaaagcatatgtctcccatataatgtcatgcctatctctctaacacatgacagaatattgtcctgtatatcagatcatggtagtgcaagcacaacatatacaccttttgtccaacgactttttgacacctttgtctgccacacttattctctatgcaacacgtgccctacactaaatagtctccttgttagtacgaaaaaacctccccacgagctgaatatctcgagtgggccttatagtcatgtgtttgtgtattttattccaataatgggcttgctattacatataaaacttgaatgggtcactggtatgcttgaacccaaactctagcctatataaaccttatccctttatgcaaaaagggacaaaattttagctaaaattctgctagttttattctaagctttctttttatacaagagaaacctaaaaaaaccaccttatagcaagggttagagtttcttattataaaactcatttgtaatacatttcaaagcctaaaagggcaatacactgacttgtagactatggataattaatgcatgaacctcgtaaaattcctccatctcttttacttatctatgtttaatctcttcaagctcttaaatattcagttttcaaaaatattagtaaaattttggtgctttcattaagagctgcagaaagaatccaatctacctatcatcttcaacgatggtggatataaggaaaactgttgttgagaaacctcatccttctaaccaggatgtcatcatggacgacattaatccaacccctccaaaatatgctcagccaagccatatgagggacgaagaagtgtctaaaactgacggacagatgcttgaaacgaaccaacaatgagagttgttcgttgagaaaaccccagaagaagagaaagacaaagaagaagacgatgaagaagattataatggagaaattgaagatgggtactataaggatagatattattacgagtaggatcaagatctactctgagtgtccaatgagtttcttgtaacttaactaaagctagcacagcaagaaaggttctctcaaaagatataacaaatgatcgctcgcctccgatccaatcttgacaacctagatgaagactttgaagaaaatgctttagaaggacatgatgatcgggaaaacaaagcaaaccccaccaacgttggaaccttagctctaggaaaagacaaggggaaggcaaaggtgggcgagccttagaccaaatctgcctcgttgccttctataaaaaatatgaacacgaccaaccaacccttatggacgcagatggccaccaacgcctctgggctgggatgccatttttctccataaggcatggttgcgccacacaaaaggcctagtattaaagtaccaaagcctaaggtaaggaaaaaccatcctagtgattctgttaaccaagtgggtggagggaattttctttgaagatagttggtccacagttgaccttcaaaggcatcttaatgccaaatatgagaatgccaaaggagaaaaggcgagaccccgaggaaacaacctgaggaactatttaaatgataaggtttgcgaacgtgaccttctcaatagtgacactaaaagattggaagaaaaaatgactaatcttaccaagttttttttttctgatgaaccagctgaatttcattactccaaaaaaaccttttacaaacttatacaaactagagagacttcataaatagtctcaaactatattctttacaatgagaaactaatggaaattccccatttttacaaagcctcaaaccatattgcttcttctctatatccgtttttgtgcccaaggcaagtaactctatctttgactattcctcttactctatatacaagttgatccgccaaatgctcctttgccaaccacaccttttcattccttgctgtccaaattgtgtatacgaggcaagctaaggctgctgatagcaccttcttcctgattctacctacttttgctttttcaatctaccgcaagagactttgcaatgagtttatacaaatattccattgcagccacttctttacctggttcaagtaatctagagtaaagtcacactcaaaaattagatgctgaactgattcttcctgtaagccacacaaacacaagtggggctatctacaatgtgaaaccgatataatctctctctggtttttaacctgttaagagcagcaatccacataataaaagaatgcttaggcacattatatcggcaccatattactttgcaccatctcacattttcttgaggagcctgtagcagcttatacccttcagtaatttggtatttctttgccatgaattgtactgaattcatgactagcatcactttgttcttgacctccactactttcctccagtaccagctgctttgaaagtttgtgttgtgttgccaccagtcatcttcttgtatatatacatgatttacccattttagccatagactatctttcttggtagctatagcccaaacatatttcatcatcgctgctatattccatgttgagatgtctctggatccaacccccccccccccagtggatttggtttgacatagtgtgttccaggccactgctcctggcccagcggcagccgcctggtctttccataggaaagcacgacagatgctctcaatttctgcaatagtcttcttcggcaatatcataatttgacagtatgtattgccatcaaaatcgagttgattaaaataactcgtcctacaaatgataaattccttgtactccatgctctaattcggacagtcatcttctcaacaagagttttgcattccacttctgatattatctttacacagattgggattccaagatacttgaagggcatctcattccatcccactgaaatgcacaactgacttatttttatttggttgaagcccggaggtgtctgagaatagtttaaggccttgcagcatgtagtaaatgctcttgaaatcacctttacagaacaacagaacatcatctgcaaagcttaagtggtttagtcttagagcttcacacctgtcacggaaaccaaagtcttgtttaagaccaatcttctgcaaaatcctggtgagatattccatcccaagtacaaagatcagaggagacatgggatcaccttgtctcaatcctcttttagcttcaaagaacccatgcatagaaccattgaacatgagcgagaatctgggagtttgtatgcaagtcatgattagctggataaattttattggaaagttgaaagcatgcagcatttcttctatgaatccccattctatggtgtcatacgccttgtgaagatccaatttgatcatacagtttagctttgctgatttcctgccataatatctaacaagatcttgacatatcataatattatgagtaatgaaccgactttttataaaacctccttgattctgggctactaaatcaggtaatatgttcttcagtcaagtacaaatgagtttggtattcactttataaatcacattacaacacgcaatgggtcgaaagtcacttacattgatcttaccaagttagtccagtagtagagtggggccctctcaaacacggatcatcgaagccccactacccgacaacttcaaaataccacagatagagttgtatgatggacagacagaccccatgacccacttgttaaaatacaatcggatgatgcaactggaaatagtaagtgacgacaccaaatgcctttgtttttcactaacactgaccaagtccacagaagactggtggagattttgtctcctaaatcgattaatggctggaaggagttgcagtctgccttccacaaatagttttatagttgccagagactatgacgtggaggtcggatcgctgaatagcctcaaacaatagcctagtgaaagcttgaagaacttcatctaatggaggatggaagcagctgcaaagacaaaggttagtggtgatatgaaattggtagctctctagtcttaattaataataggctcctttcttgtggagtgaaatgcaatgaaaaagagctgagacgctgtccaagttcatgtccaaagctcaaggaaatattagcttggaagacttatcaacaagcttttggaatacctttggcacctactccactagtagcaatgctaagttttaccccactagtcccaattctggcagatatacttcggggaattcagtatacatcgactgtctacgggaccactgcttctgagcaagcacccacgaaaacccatttctctaggtatagagcaatccagactgaatgtagtatcgctcctagacaatcaaagcaataaacacaagttttggaagcaagtgtaagccattccaagagcaagcgaggcggaagaagtcagaaccaaagtgattctccaaataaaccaaggaaagagtatgagcctaaaatttctgagcacataagtttggtctatactcgagaaaatgtatacaagaaaacctacaacatggtccattattggaagcctccatggatgccccaaggaggaaaacacaaaagggaccagagtaagagatttgaatataatggagacatgaggcacactaccaactagtgttactacctgaaagacaaaattaaatttttggtcagagttgggcacctgggccaatggatctagatcccgagtatatatcccaaacagggagcagctcacagacaatcgtttattcgcgtcagtagggaacggtaatccttcacaaggggtaagtctctctcaagctcttggaacataacttccaactttccctgctctatcggtgcatgttgtagtaactgtcttagcttcaagacccaggaacccataccactaggtctagctctgccacctgttgatgctcacgtttccacaattttgaggggggcacatattgcggggaacaccctcaactcccagaagaggtacttaaaggaattagagcatgaagaggaaatatgtgctttagtccagtcaccagcttaacatccgaggatgataaatctacccaccacctttacaaagaaggacgctaggcatgtgtattttcccacaatgaccccttagtcattgaagctcacattagcaacaaaagagttctgtaaatattggtagaaaatggaagctctattaacactctgttaaagtttgatgttcaagcaatctgattgattaaaggctggtcacctttccccatacaactctaatgattcaatgttaacttactgattccaatggggaaaatccaccttccagtcacattgaagggagaacataacttttgtgccttcaagcactacacatttgtagttgtggactgccctacaacctataatgatatattatgatgaccagtcctagtcaattttggcgtgatcacatccattaggtccttgtgcaaaaatttctcttgagacaacgagagtattggagtgattaaagatgaccaaaaatgatccagaagtgatgacaacatctttgttttatccgtgtttatggtcagagaagatgttgaaagtgctcccagagcaattgtccaggtagaagttgaagttgttcgggaggagatagaggacaaattggatcccagagttaggacagagagaatgaaagaaccactggaggatgttgaagaattcaacattagtgagatggatcccacaaaatttatcaaggtggggagaaacttacctccagtaatacgtaaaaggattgtgtccacgttcaaaaagaatcaggacgtattggcgtggaatcattcagacatgatagggatcaatccaaataccatttgccattccctaaatattgatgagaatgagacacttgttttccacaaaagaagactgttggaccccataagggcacatgcaataaaggcagaggtcaaaaaattaactgccaataagttcctctaagaagctttatatctggtgtggttggccaacctggttctagtctcgaagcccaacaacacttggagaatgtgtatagatttcatgtacctcaataaagcttgtccaaaaaactgttttcactttctccaaattgactcaattatggatgctacgtcagggtatgaactgttaagttttatggacgcatactctggctacaatcaaatcaagatgcatgtcacatgttgacactaaaaaacgaccaacatcaactcgctacattggcaagataaataataattttaagtaaaaaatttcgagacacacacacaatttatagtggttcactgggatttttacactagatgtcaaatttgacatctttttta

SEQ ID NO: 296653 - DNA, 2313 bp, Cannabis indica
ccatgtattatattgtactttattaaactttggtattaatcaaatcatgttgatttttatggtaccaaattaaaataaaaaagcaaaagtaattttataaaattattttagaaaatcacaatctaaactttaagtcccacgatctcaacatatttacataaattacactacatgataaagaatgatttatctcttgtagcatattaagatatccttgattcttttcgaatacacaaacaaacatcaaatccaaatcttttgatttgggaagaactcacagcaaagtgttccaaagtttacgaattgagtttttgtaaacttttctcgctttgtataggattatgtaccagaaatctggagagtgttactgagtttggggcacccccatccccataattctagctatggcaaagtcggcccaagcattgggcagcttggaccataaaacaaggccccttatttttgaaggcctgttttttttttaaaaaaaaatttttaaaaaaaaaaaaatagaagtgtttactgagattttcagaaactgaatcaataatagattaagctaaggaaaaatggttaagaaataggattctacgtggttgggcattaatgagctttaatccataagtcaatattattgagctctttggctatggagtgttttacacaagaatgttcttgccaaatttctacagagtgtctagccaaaatttgtaaccctttggatgaagggataaagccctatttatagctgaagttgagttctcaaataaacctagacccattagggtttgcatgtgtaaataagctcactggcggggtaaaatatattataatattgactttgggtcgggtaggtgaggcctaaatttaagggattttctttgtccggtatagctttatggtgacatgtgtccatgcatcgccaataatgtacaataaatgtcaaagtagtgaacgttgggcaaaaggtatgttactttttcgtgttgtgcgcctttctcaggtctgacacaagcgacacccctaattctgtgggatttggtgtcaaaaaggtgccacgtaggattacacccggacgcctcctcgactactctttttggatttggttgcgtctcttcgatctttgtctctctggacgagagtcatccttccaagaccaagaaggcgtggcttagttaaggcagggtcatagatgaacctggactcgtgatccggcttcgcttatgggctgacccatttctctgtctaggcctgacaaatgggcccgtgagttgatttttggccttggaagtttacatgtcatgcatccataaatacgaataacatttacccccaagcctttagggcttgagatttgtggaggattgcaactaccatctgcacttgttgtgctacgtggggccaaagcagttcatgccctttgaaattttaaggcaaaaaattatggacgtatgtggacctttcaaattttgtgagtggaatacacacgtcattgattccttggtccatgaacatcacgcgacttgagggagcgtataaggtctcgggtagtgaaatgacaattagtcatgttagtaaagtttccaaggaaaatgtcatgccccagggctatactgtccaatcgatccatagagcaaagtcaaccaggagaataggcaccgtgctcaggtattggagcctaatgtttggggaaggaaaaattgccctagtatttcagttaacctatgcatcaaagtggaaggctaagatcccgaagacaacatgtcaacaacggacctctaagactgtttgaatgcaatgagggaaaaagcaaagtaagaaaaatccaagcctcactaaggagatctcatgaataatataaatgaccaaatttgagggtgtgacatcccatatgacaacaccagaaggctggaggattaaatcgatgccttaaccaagatcatggattgtttggtctgcaagcaaagtggtaagtgtctgagtcagaagacgaagacctggagccatgggtcaaaagaattttagaaacatcattgccagcatgcttctgcatgccctaaatggacttgtacgaaggcaagatggagcccatggttcacctattccggtataataagttgatgcaagtggcgtgagttagtggatggaaaatgtttatgtttctccttcactctgtcaaactccactgaggattggtgaaagaggttgccctttgaattagcctagaactggcgcggcctacaagccattttcaagaaacactttatagccaccaaagattttgacatagaggtttgttggaaattattttac

SEQ ID NO: 296654 - DNA, 3914 bp, Cannabis indica
aatagtattaaatagtaccctaaattcgttttttatcaaaataaaacttaataataacctaatataaatatgttataataaaattggttctattttatacatttgttcatgcagaaaattattttaagttagtcataatttaaaaaaaaaaaatcaaaaattaaactcaaagtcctatttgtaatattttaaaaaattcaaaatctttcttattacttaacaaaacagaaaatttaatcagtaacttttagaaaatacaatatccaaaatagtattaacccaaataaatatccaaaattgtagttgatcttcagtcactattattgatctctatatcttggaacaccattacactaatatacaagcttgaatttccaaaattacaggaagatgaagatggaactgtatacatatatagttatggtagcaacaacacaaagatattcagaaccccaataggtaagttctatggcctctatattcacataacaaaacttcccatagttgagaaataatgcaaaacaaccaaccaaccaccacctaataggccctgaataaacaactttcaacaagaacttaaaaaaacaggatctttaaaaggaaaattttgaagcttttggacgcaatcgtcgaccttttgaccttgcttcaagaagttttgcctttaaagtgttgtcctttaatcccacaggcattttcgaggaagattctgggatgtcaagctccggggatgtgagttttgacatccattgtcgtactggactagcttgattcctccatcctaagttactgcaagaagcctcgccgttgttgttgttattattattctcgagatgtaggtttcctccatctgacatcaaatattgatttcttataagattatcgacagtttggttcgaattaagcagctgtatttcgtcgtgtttctttgttttctcattgcttgcctcttcagtcagttcatgatgttcgggcatttgggatatactgatttcattcggtttctcttcttcatttactaaatgggatatcttgtttccatcacatgacacagccttagccattttttcttcaaacttaacttgcaagcttgatggagtacgtcccttaatcctttcactggactcgatttttttctttgtgttttcagcttcattcccattcgatttgaaagctgtgttgctcggtttttgaagctcaaaacagtgagaaccactgcctaacgaatcatcatcatcgtcgtcatcatccacatcttgaggtgcactcacagcttcattcaaatgaacagactcgagtgaattcctacgctctctagacaacaatttttcagctttcgtagcttgcatatgtttagcttgaagaaaggtttctatctcaaaccttaatttgtccactattgaactcttgtcagaaacaccacaccgagattcttctacttgcatctgcatccgttcatcaagccatgattcagatacatgaagaatcaatcgatcatggtcggcccttccattccaatcaccatcagctttttgtttcaaacctcgtacttcttgttcgtattctgttatgcccttagcaaactcatcacacaaatcttccaacattttcctcgactttttctctctttcccgctctttcagagcaccagagagtgtagattttacctcagaaagctccctagctaactttctgtgtagactctcagatcgctttcttagcttcctctcgtcttctaactcatctctcacagactgaattgcagcatgaatacgatcctgttctttacttttccttacaagtttatcttcggtgatttgcttcaccaaatcatctacttcatgtcgatctgcttgtcgttccctaagcaactcttttatcttcaaacgcgcatgatccagctctgttttcaatgccttaattaacgacatattcgaggcatgctgttcttccaaactccatatcctattcaatacttttaacagttcggtcgatgttttaagattataatgtgattcaccaattcttcccttgaaatcgaaagaacttgtaggagtaattgcaggattataaggtgctacctgaaacataaatttactcaatgagaaaggagcataggtcaaaaaatgagaataataataacaattcttacctccaaagaactaccataacttgctggagatacaggttgcaaggcgtgatgattgttcctttcgattgttcgatgatgttgcatcaatgatgccgcgacatgcctcctcaaactgcttgcactagctggctggcatggtatttaatcaaagggaaaaatcagaggtcaaggagataatctccaactgggaaactttaagaaattaccattatttacacaaagccaatgctgaaacacatttgtgttaaacatgttgttagaactttagagttaccaagttaacaaaaagtgacacaaatgacaagagattaggcttcaaacttttagcatggcattaaattgttttgttttgttttgtatagttttctgaaaacaatggctcttgaatgataccagtctacatttatatctaaacattaatttagacaaaaggtttaaagagttgggtaatgataaaataataaaacacaaccaacaataacataattaggaccaaacacagtctcactagcaaggaatttcaaaaagtactaagctttaaagctcttgaaatcaaaattctttacaagtaaggaattaaagcattcatttcattaaattgtccaacctaagatgaaaccaaaccaaacccttcaaaacccaacttcccaaatcaatcaaaattcacaaaaaaattgataaaaatggaaaccccacataagaaaaaagagtcactttttaacatataacagataccaacctgttcaggagagctgggagaattatcacccagaaaattagaaatgtcaagagcagccttttcacctctatgaaggtgatgatgagggtgtaggtggtgcctcagcctaggaggaccaccaccaccaccaccattactgtgcacaccccggttcattttagcaagaggcaagtaatggtgaagctcccaaagagcagctccaagctttccaacagagacagaagaagcaaaagtagtagaaattggaggttgagaagtaataaaagaagagtctttaatgatggtttggtggccagaaagtgaaaaaagtctccatgaggacactactggagtagtaataccatggaccctctctttccctaccaaataacttcttcctaactttctcccaaaatttcctccttttctgctaccccttccccacttcctcctccacctcctcttacccttttcatttctctctcttaaagactcgaactttctctctcctagctacctacactcaccttctctccccctagtacagtgattattccctactttcttcctcatcaattctgtattttgcttcaattcctagttcatagcaagctaaggtatctcttgtgtaaccctttctttagtttttgaaattttatgaagtagaacttttgcatgcttgatgagtttggttttatagctgctgtatatgtttgttattgttttcttgggcttgattatgtttagatgaatggtttagagctggttgtggtgatccttagttgtgtttattcaaagtttggaattttggctcaaaaattatggttttcaaagtaaattgaggaactagttgctgcagtggttgtttgtgcgtgggtttgatttctcgggttatattatgattaattatggttaattaaagcaagtttgatgcatgtttgttagatttaatcaagtttgagttttgaactcaaagcttggagctttaatggtggattttgattttatgcatgaagctaagttttgatgctttagaaatgttcc

SEQ ID NO: 296655 - DNA, 6632 bp, Cannabis indica
tttttaaaaaaaatatttttagtacggttctaaaaatattttaaagaattttgaaagagtaaacaaaagggtcaacatcatttgttaatgtatttttgctggagtctaacgaacgtgacattaaaaaactccagctatataagctgccggccccccaacaaaaaatggcttattcttttattatagcggcaaatccaaaaaatctccattgttagaatcagccaactggccttaacaagttcacacaaagtattgggatttttctccttgtccataatctcaaccattccaatactataccctttatttacttcaccaacttttcccacataaaaaaaaattaacccataatggcatcatcaacaaagaacagaattcctatctgggtggtgatcatcttcttttctctgtttctccttcttcataccacaacttctgttgaagatgaggttaagaaatcactgcttaactttctttcaaagctatccaacaatggcactactcaactcggttcgctttcgagttggaacactacatctgatccttgcaatgaccactggtctggtgtagtttgtgggacaaagaatagtgtcataaaaaagttgtacctcaacagctcaaaactagaaggagagcttgatattggcattctttgtggagtggcaccaattgcagcctcacttggtgttgttcatcttgagtacaacaacattcatggggtaatttctacacagatttcgtcctgcaaacaactcactcacttccatgtaactcggaacaagctttcaggaagccttccagcttctcttgtcatgttaaataacttgatacaatttgacatatccaacaacagattttctggtagtttgccagatttttctagtatttcaggtcttcaagtattccttgctgaaaataaccagcttggtggggagataccgcgattcgatttctcaaacctgaagctattcaatgtctcaaacaataacttcactggtagtataccagatgttcatggccatttcacagcaaatagctttattggtaatccttatctatgtggggatccattgccaaatgagtgtccaccttcacaatcaaataccctttcagagaagtcaaaagattcttataaaagttcagttactatgtttgtaggatatattgttttgggattgattggtattgctctaatcattttcatgctttgcaaaagaaacaaaagaaagaaagacaaggttaataatgcattgccaaagaaagtagttgcagttgataatgatggagatgacagcatgtacaagtctagttttggtggtttaactaaatcagaaacttcagctgatgatcaaagtggttttgtttcatcctcagtgctggtggtgctcactagtccagaggtaaatggacttaaatttgaggacttgctaagggctccagctgagatgattggaagaggcaagagtggtagtctctataaggtccttcttggtaataaccaaattgtagctgtcaaaaggattaaagattgggacatttctagtcatgagtttaagcaaagaatgcagaggttagataaagtgaaacatcctaatgtgcttccaactcttgctttctattcttccaaacaagagaagcttttggtttatgaatttcagcaaaatggaaatctattcaagtttcttcatggtaataaattcttgtcatgatgacccttaactagttttgttaattcaattttttttttctctaaacttcttaactcaaactcttttcaggaaccaatatggattatgcatttgattgggccactagacttgaaatagcagccaacatagcagaagcattagccttcatgcaccaagaactcaaagatgacaagattgcccatggtaacttgaaatcatcaaacatattgctcaacaagaacatggagccatgtataagtgagtatggtctcatgagggttgaaaacagtagcccttccaaatcatcgaacgccttctttaaagacgatgtttatggtttcggtgtcatcctgcttgagcttctcactgggaatctggtgcagcacaatggcattgacttaacagattgggttcagtctgttgtgagggaagaatggacagttgaagtcttcgacaaggcgttgctctcggaatgcgctagcatagaaaggctagtgagtttgctccaagtagccatacaatgtgttagccgttctcctgaggctagaccctccatgaaccaagttgcagccatgatcaacgcgattagagaagaagatgagaaatctgctgtatcttttgaaccatcacaattggattaaaaaatttaatacatgcatagaacataactacttgttagttagtataaattataggaaatttatatattacacctctaaataagtgttctggtagatctcttatttgtttcggtatttaaaaaagaattagtttgatttttttttctcataattacgtaggttgtacttgtaactattattaagactacctgtaaactcttagaaaattctatatagtttacaatgtcgaaaataaaattcaaacaattatttattatgcgtataagaaaatatattcgtgtgtgcaataaaatatttaaattttatattcgacattgtaaattattcggaattttctaaaaaaatacaagtaattctaaataattattacgtcgaaacagatagaagatgtacctaaacactcatttaagaaggtgttttatggatcatattggtatccatcagctaataattaatgaagttacacatgctttgcatccatatatatgccttgaaaaatcattaataactattaactactaataactgtacttttgtttcctctgttttgccattttgaaatatagcaccacaacttcgagaaaagtttttcgagttagttaagttcgttatatggccttaaccaacttaacagtcacttctcacaaccatctaacataaaacagtgaacactgagattacagaaagagatctattgttttaggattaggagtcaagagagagagtgagtgagagagatagactgacatgttcatcttctttgtacatgcttttcattcttgattgagagaatgattcagtgaaggttgttgaacttgggccaatttaggccaaacttagagaaaaagcttgtgtttgtttttgtgtttattaaaatattcaactgttttgtagtttgtgttaatggttaattattagtttgttcattttgtgatgatgcactacattagatagatacctttttattaatatttgaaaaaccgtgttttattacaacaaatttctttaataacaattaaaaaaatattaatgtaaagatttgttataataaattggaaatttgttactgcagaacacaaatttgttgtaatagaacatgttggaactttgataaatctttaataaaatatagaagtgttctagtgtgtgaaatgaatagagttccacatataggatatgaacccttatttataagggtatatatagtgcaactttggcatttagatttgggccctaaggggtacccaattttgtgcgaatgggtgaggactcacacacttgacctaccacatgcgcgcgtccgtccgagctaggttggtgtagtgtgacactttagaaagaagtaagcactcacacatcaagacgaagggagttcgctgtttggtggtattcagaaatcagttgacaaagtaaattacaaaggattgcagcaaagttttagagtgagtctaaacttgtttaagttaattgtattttgtaattgtttgagactttactaattgatttcattctctcggtgtgaccccgtggactagtagtgtttgaaagaacactgagtacaattttcttgtgtcaagttttctgcacaatttatttctatttttgcacaatttatttctatttctgttttctacacaattaccgaatgaaaaaaatttaggttgagtcgtggaccaggtcactctctttaagacgttcgcggcactgccaaggagtgtgcaagcaattggaatttttcagtcaactgcccaatcatactgtatcggaaccccactgcactgtagagtaccatcgaatacacccaaagatttttgatattgcagatggaattttaatttttaagaaaattgtattttcgatatgaaaaagatgtattcttcccatcatttcaattgcattatatagacgaatggattgaaaaatcataacggcgagaagaacgttttctgaatcgtatagtgagttgcttaaaggtgtcccattaactgatacgactaagtaatcaattctaattaaacatgtttcttatttaaattaaaataaaaaataattattttattaaataatttttctgtaaaaataatagagtgtcacccacaccaacccaactcaaacgaacgtgcgcatatggtgggtcaagtgtgtgagccctcacccataaaaacatctattaattaaagtttcccaaaaaaaaaaaagcaaccatacataccaaaataatacaagcaaaacatatttatttctcaataaacatttacattaaattaaaaactattttggaaactaatttaccaaaaaaaaaaaattaataaaataaaaaaacttaacaatattttagtcacaggaagccataacattccatccctaccgacacttctttgtctttttagattgatgaagctcagaggttgctgacttgagatcaaatatgatatttaataatatttatttaccatgtgtttacattaaaaagaaattggaattttttttaattaaggttatccttactttcgaagtgtgtatgtttttgctacctagaaaattataatctaaattattttataaaatggtatatgtagtgataagaatcactctctcaagaacaagatcaaatgaacataacagcaatcaaagacttatagaacaacaaacaaacagtttgtaatctaaactgtgatgacaacaaatcaaaatcaacctgttttatatgctcctaaaataaattattttggattatttgatactataaattatttataattttacaaaaattagtgtgatatatatgtaaaataattacaaagtgttaaataaagagtaattaacggtgaaactctcttatattttaatttttatacatttactctctttggttttttttttttggttaaaactttctataagtttacttttttatacgaatttgaagtgtcagttaaatatcactgttaaatattaattggataatcattatatacacttatgtatacgtgaaagtaaaattttgagttggtattaaacggtaatattcagctaatacctcaaatttgcaaaaataaaaattaaatataagagagttttgccaaaaaaaataaataagaaagttaaatgtaaaaaaattaaacataaaagggttttccacaaataaccctcaaataaaaaataaataaattataatttattcaaataccaaatgagaatccttgctaccctctaaggcaaaggacacacccgagtacccaaccatataaatgcccaaagattttagttagactgagggtgaggagctatggtgtttctcaagtgagtgcaggtagatgctatcatacaaggatttttcttttttttttccccaaaagacattagtaagtagtgcactagaaacaacaagttcatccattttaaccttgtgagtgaaaaaaaaatatgcatatagtcaaaaccaaaattatgaacactaatggtagaacatgctttatttatgtgtaaagtaaaatgtccactcaaagtgataagtattagtcaacggctttaaaatgccataaaattttaagagcaattgagtactatattggaagaagtcatcaaagctaagctaatctactactctaataatcatgtactttaatctttaaagagaagaaaataaaccaaacaattaactaacattccattttctcagacctacccttgtaatgatctcacatggagatattaactaagccaaaaaaaaattgtgactgatcaagtgggtgggtataaaattgtgaatgcattatctaaatataatcatcaaactaagggcagttatgtgagctggttctaatgcttacctaacaacaaacctcacctctcttttcatattaattaacctttcttaattttccagctaatcactattaatagatacttaacacctccctttaccaaaaaaaattaaatgaaaactttacctaatttgcctttaggcttaagtcaaataagagagctcacttcacatggtttaggttattattccaagagtacaaatccaaaataacccacaaatttaagcaatatcttaagtcatttggcttaagaaaaaccccacattttagctcaatctccaaagccaaggaaagattattaaacaaaaacaacccctttttgtatttttatttgactttgattaatatatataaaatcaaaatctaatacattttgtggtacagtagaacctctatcaaagaatacacttgggaccaagtaaattatattctaaattgggaggttataactaaatagagttacattagaaaaaaaa

SEQ ID NO: 296656 - DNA, 4209 bp, Cannabis indica
agggcataaaacccaacatgtccgagtggagcaatgctctggccaaaaagtcatacaccagttgcatgtaaggaaccatgtctttgagccaaagccccatcttctcgtatgttgtcttgaaaagaatatttggagaggctccattgtcaatcatagttcgagccaccattttattgataatgtgtacttccacaactagaggatcattgtgtgggtaaataacatggtcggaatcttcttaaggatataattggttcttccttgcgctattgtttaggctttctttcttccacgactagtgctttatctttctgttcatgttgtagagtctgggtatacctctctctagccttgttcaggtctctagcagtgtgagggcctccaataatcacttgtaagtgcccacccacaggtggaggcatcaactgattctaattattttctggtcgggtggccctcttatcctggtcgatcttaacatacttctgaaagtgcaggctacttttcttgatgaggaatttgatttctcttttcaaattattgcactcattagtatcatgaccatagtccgtatggaagtaaaaatatttggtggtatccctcttattgatatcttccttcatgggaggagatctcttgtacgacactatagattgggttatcgtgaagatagtttctatatcttcagtaaggatagtaaaggtagtaaactgtgaagcattctctcgaggatgttgctcaaagttattgttgaacttgcctttctttccatcaccttgtttgtttccattatttgaaattttaccactttaactcgaaatgttgtggttttgagacctttgattttgctggacagatgtattggcagaaatggtgtgtgactggctctttttctgccgaactctcccattgaccttacggtgagtcttttaatgtctttcgacaattctcctagaggtgcaatacctcctaaaatggcgactaatttccccaatacctcctagaatggcggccaatttcccctcttcggttaaccctttcacttttgtggtctcagtcataaatctactgatgtaggatctaaatggttctcctagtacttgcttcacttcgaccatttctaataggtgagatgggagtttcctagaagaggagaattgtgcatgaaactccacaatgaaggaattctatgagttgaattttcttggagctaacttgaagtacctttgttgggcagcctctgccaaggtagctagaaagattctacaccgtacatcacattttactgcctgcaagttcatttgcatttcaaagtacttaatgtgggatagaagatcttccttgcctgtatacatttttcatatagatattttgaacttgggcggaagatcaagggtattaatttttggtgaaaagggtgatcccctagtccgttcaagttctaggtctatgagttttgggtcggtcaggctttgtataaggctcttaagttgatctatttgggcttgcatcactggatcaacttgacttgcatgttgactgcatgtgtcacttgtgggcctcttagaatattgtcaagcacatagttatatgcattaatcaaatgaacattgggagggatgttctatccatcttatccctttctttgatttagatcatttctcaagtcgtgtacggtgcccaatcggttaaagaatgattcacctgaaggtctccttgtctagctattatcaataattggtctatttggtatatccatctgaggacggatgttatactgaccattcccccaaggtaatgggttgacaaaacttgctcatctaccgtgtggcccacagtttgactctatgaccttggattggacgactcgtttccttgggtttgctgagtgttttcagtcagacgttcttctggcccatactgtggttcaatggggatatagacatctgtcattttgtttggatcccatataaccaaagtatctgctactgattatttgataggcttgcctaatcaacacagtggcctgccaagaacgattatcgattactgcctgggggctcttataatctccatttgttgatccatccactcctaaaattagagcttttgctgtttgaatgaaaaattaatagttggtcgggtatcttgttgatcatgatgaagagtgttggtatgctcttgcacctaccctagtgcagcttgtgaattttgcagttcagtgtcatcagcaatcatccttcgaggatttccaacagatggattttcagtaccaggggcagtctgctcagcttgggtactggtggttctagtttcttgcacgcttagagtgaacctggccagtggggttgtccctcctggtcctattgattgaggacgtatcaaaggctaaggaatagtagggtcgggatctgtccttactagatctcttagatttgcaagagtttgtacattaggatccgtaaccatcaaatcaattttctcgtagggattacccctccttgtagtcacagccatctttgcatgtcttaaaaagattcgaaacaacgattatgctctttttctctcaatgaagacaccaaaatattatcatttcttttagccaacaaaaatggttaatcagagcaattagaaacgattaataataatgattaaacaaatagaacacaaagattgctatagaagtttagccccgtgatggtggtgataacctactccattttttctcgtattgacttatgagaaaagaagcaagaagttcttgatcttccttgaaagctcttacaataggtttcagtagcttaagtgctatatggaatgaatgattttggatccctcaatagtgaaataaatggctcaactatttataggaaataactacatcaatttggtttcccaaaataaataagaaataagtaaggaaacttaattactctcctaaatcaaaagaataaaaacaaaaactaggtaggtttcctcttctctcatattggcatgaatctatcccacaaaatcagggatgtgatcgtgactcacatgcttgaacatttagggaaagtatttctaaagatgttccaaccacttgtactctagccagtgcatgcaagctgactgtaaagtagatgttggtcggacagtgtaacataccctgtccaaacgttccttcttcttcttcaaattagttttttataagtaataaatcactctgggtggtacaccatggagtatactgcccgtccaagttatgagatcttctccacacgtcactcgaatgaatgccatgtcactatgtgcaaaaattgggttaacaccattagtcaagcattaaatgacatatttgtaatcgaaaaaattggcatgattatattcctctcgagactcacaccgaagtaaatagccgccaatttaatgattttgcaccaagtgcctccttagcaaacatttgttccatgaaccactgaagttatgccactatcacctaagctcagaaaatggaaagttttcttccatccacgaaaagtatttagaaactgtacaggtttcacgtttagcctctacctgtccatccatactgtctgaagtaaacctccacaactcatagctttctagaagtttgggggtaaatgttatccgtatttttgagaagagacacgtagaatctaaataatgaatacaacccaaatatatattcaagacctaatagtggacccaaacaatgtcattgggctggatccataaaattattattccttctgggtaaataattgtcaactcgtccagacaatattccattcagcatggtcaatatccagaagacatgtaaccacgtagccagaagaagctcgtagcatatatatccggaaacccaatataactacctgctctctacgaaattgcacaagattaggaattaccttcctatattctcagataaatatcatatcttattaaataaggaaaaagagtaattgacaatcaagtaattaatatgccattaagtacacacgaagataggatatggttttgataactagcattgtagtatatacaaggggcctcgtgggccgggcttcaccagttaagctcaaagtcaatgtatttgtaaagggccaagatgcaaaatggccctaaatctaacaattaagttaataaatgtccctttttaaaaaaaaaaaattacaaaatgtccattcagttaaaaatttgatg

SEQ ID NO: 296657 - DNA, 2052 bp, Cannabis indica
tttttgttgagaaaatgataatatgaattgatcgtaatagtttacccatgtcgacaagacatgaatattcttgattatggtcaagcaaagtataaaaccttcacacaaagttatataatatttcatgagagtaatataaagtaatcaaaagtgctaaagaaacatctctaacaatattggcttgctatttttgaaaaatgaacatatgctttgctgtggatgctaagaaatcttaaagggtttaaaagagaataagataaagtttgaaaagcttcattgtcacattatgtaaagttctcgtacaacctctgcctacataaacccaactcagctcgttgtttttctcatccagagcttccaattctccaagaccaataatattattacagctttgtctcaggatttgttgaaatcagtttctggccccgtacagtacaatttgagcttcaatggctaaataccaaggcagagcatttcagctttggggtcttgctatttgtctttcattgtctttgatccccaagagttttgccaccaattttacaattgggagcgcagcaggttggagtgtttccaatgcacaaagctacaatcaatgggcagaaacgaacagatttcagattggagactcgataggtacgtttatcatataatttacttctgtctttttttctgtggttataaatatgtcgatctttatttaattacacctgtgaaagctcaagaaaaaactgcctgtgatcacatgatttgcctattttactttttaagaaaaagagaagacaaaatctttctcatgactaataaattctatcattataaccatgtcataacaaacagaaacatatctttcagctatcagctatcactcatacatatacatgatagacattgatcttttgttttgaatatatggcgtacacagttttcaactacccttctggccaagactcagtgcttctagtgagccaggacgattacaacaactgcaacacagatcaccccatccagaaaatggacgatggccacacagtgttcaccttcaccaaatccggctcccactactttattagtggcaacaaagactactgtctcaaaaacgagaaggtggttgtgacagtgatggctgacagaagctccaacaaaaccagtgcttctccaccgccttccggctcggcagataccaatccatctcctgccccagaagcccaacagtcaccctcgccaccagctccatccgagattaatccgactccagcccctgccagtgaccacactccaccacctccaaattctgcttcttctttggcacacatcacctttcttggttactttggagcatttgctgcttcatcacttatccttgcctaactccatggtttataatttttcaagttgaatttctttcctccattattgacaaacaagtctacatttccttgagctcagtagattcaactgtgctttttaaggatttggcttggagtttgatatgatttattttgtgctatacagtccaataagctgacaaaagtgtgtaaaatatgtgtcatgtatcgggtgtcttttttaaaaaaatattatgtgaaaagcaacttatattttctatgtttcgtatttctaaatatatttaatgttacaggaagacattattctgttttccagcttatattatttatgttattaactaaactaggaaacaaactccacttaccatgaaggaagttgcattttgtttgataataattaagtcaatgaaaaaaaaaactgtcgaagaaatttgaaaacaaatgtttttttttttaattttttagatactataaaaggtaaataattttttttaaaaaaaaatgtattactttattaaatttaatttataagcctaattatttaataaatgtaccgagaactccaaagaaatctagacaagaaaatcattatacaatttttatctaaaaaaatcattcaaaagagtatcattaaatattatagtaataaaaaagagagatttttacataaatattgaattttgggcaaaagtttataatttta

SEQ ID NO: 296658 - DNA, 2082 bp, Cannabis indica
tatttatatatattgattgatttggattctttcctttaaaacaaaatagatgtattaatcatattattaactagaataagtgataattttcttgtattaagtctataatttatttccttagtaatagaattaatattctacagtccttgatgccctataataataatactcaccaagatattataaaattagaatctcaacttacctctcttttgtatttgataatttttatcccaaaaattacctcgatgacgtggtacagaacaaggtgacacatggtagtcaataaagggatgcataccggataaatatccaaccaacaacctacctcatgcagataatgtctagatttcattttaactgtacaatccctaaaataaaaggtacaattaggatacctcaaagagtgggatttcaagaatcaggaaaattaagcatatcatggggttgattcaatcaaatctttaattacttatttctgtaattaaatgtaaattttacacaccttgatccctataattagtggcacaacttcattatttagggaaaattttttaatcttctcaatagagtcattgtggtgccaaagtcctatttttaatccttatagaagatatatcaagaaacacacttgacaatgttcttgtgatcttggtatttctcagataaatacaacgaaatgggaattaggatattactaaatctagagccgaatctctataaacctctgtgtcatttattgttcttcattgttattatcatccaaatactttaattgtagttttattgactctgcccgttggccagaaatgaggccaatatttttgtgctttcattataagagcttaatacttcatttctctttacacaatattcttgttttgtcgatttttgatccatcttcaaccaataaaaatggttcaaacaagaaggctagggttgcatccacttagccacgttaccctatggccactgatcgatacgtcaagacacctactgaagtctgaaccgataacaccaatgctcgtcttccacctaaaaataacacatctgtaggaaccagagctggagacctaatttttagtggagtcaagagtacaataggcgtcgctactgagatccctagagtcactcttagggtacaagaatcaaaaaacactagcaggtgatacactagagagactggagcaggaactgtccagccatcccgaggagaacctcatgtcgacttgggacacaactccaagataaaagaatctcaaagaagttttggggcaagtttaaaatcacactaacaccctctgcaacaaacattatcaggaaactcttgcaatagtgaaccaatcgttcaactggaaaagctacgactttaaagagtggatggaccacaagagtaacacccaactagcttagccagcaagcgatacactggagagactggagctagaacaggccaaccatttcaaggagaacttcaccaccacatgggagacatctttgagatagaaaatctccgagaagttttcggccaagttcaaaatcacactaacaccctccaccacaaataggaggaaattcgtgcaatggtgaaccaagggttcggccagcaatgaagcaaatttaaagagtggagggaccaccacagtataacaatactagcataggaaataggcaatacactggagagattggagttggaactagccaactatttaaaggagaacctcgcgttcacctaggagacaactctgagatagaaaatctcagagaagttttggggaaactccaaaacattaccaacaccctccaccacaaataggagaaaactcatgtaacagttaacaaagcattcgaccaacaaaggcgcaaattttaagagtggatggactgcactgtaatgccctactagcttaggtaaagactggagcaagaactgccagccatctaaaggagaagctcacatcgaccgtagacacaactcttagatagaaattctcaaacaagttttggtgaagtccaaaaccacaccaacaccatctaccacaaacaggaggaaactcgtgcaatggtgaaccaatcatt

SEQ ID NO: 296659 - DNA, 3314 bp, Cannabis indica
attcaaggtgcaagtaaactacattgtagattatcatatcagttaaaccctatgtactgataaatctaggagtacatttaatcaaaatcttgtttactttccactgtattgacagcacaataaacaagaatatgaatgtgataagggtttggatgaatttattaatcaaataagtaaatagatgatcacatgaaccaaataacacattaaacaagtaatgaaattgaattcgtttctttattgatatgaatagaaaagattacactgaaatagagttttatttagggcacaaagccctacagatagtcattattgaaattgtctatgatgattcttcgtacccatgctctagggcaacccatgactgcaccttgaatggaggaaatctctctcagaaaaatgaattccatggtcaagatcaggttttcatggaaaatggtacatgtttgactattgaaaacattggataggcacacttcctttttgctaataaataaatcaaagattcttaccctcaataatcttctacacgttcctcaaattacccaaaacttgattagtgtccctcaatttacctttgacaataatgttttctttaaatttcaccctaactttgtcttgttaaggatcaggggactcacaaggtgctgctgtagggtactcttagagctggcctttatgtatttccaacattctaagtcccctctcaaccacctagtcaatctccataaagcttttctctatccaaaaaattgcctaatatttcttgtaatactgctcaaacaaatattgttaataattctttgttttagttgtggcactctcgtcttcgacaccctgctgtcaagactgtcacacatgtagtgaactattgtaatgttcctaatagcaataaaagtgaacctaattttggttcatcatgttgtcttggaaaaatccacaaatttccttttcctatatctgagacagaatatactcaaccattgcaacttattcattccgatctttggggaccttccccaatgatctcttttaatggttactattattatgtccattttacatatgcatattctaaattcacttgggtctatctcctcaaacatccttaactttattgtcccatgcctcccttctcttaaaattttggaatgaggtagtaagagcatatgcttttctaataaatcctctcccttcatctattcttaaaggactaacacctctcacaaaactcttcaaaatacagattgattacacccaactttgtgtgtttggctgatcattctaccctaatattaggtcttatagtagacatgaattacccttgaggtcagaagagtgcaccttccttggatatagcctaaaacataaaggatataagtgcttatctactagtggtagaatctttatttttaaagttgtcatcttcaatgagctcagttttccctatgacaaacacctcacactagctccctcagaacctttaccagccactgacactgaggcaaaccctacaataccagttcccactacattgccctgctttcaacctttctctgctctagaaaacacaatcacatcttccatacttgctttagattttgtgtcctctccagctcacccttcatcaccttcctactccactaaacaccctgttgcagcactaacacctgtaccaccaaccaatatccatccaatgactacaagagccaaagcaggtgtctataaatcaaaggtttacatcatctcataaaccccactaatacttgttgatgcccttgttgatcctaagtggaatgcagggattataactctaataagaaatggtacatatactttaatgtgacatcctcctaaaagaaaagaaataggttgtagatgggtttataaaatcaaagagaaccctgatgtttccaagtacaaagctcgactagttcctaaggggtttcatcagtagcatggatttgacttcacataaacccttagtcctgttgtgaaatcccctaccatcagaatcattctcactattgccttatccaggaattgaccaatcgagaaacttgatgtcaataatgccttcttaaattgagatttggttagggaggtcttcatgcaacaaccacctggctttgaacaacaagatccaactctagtatgcaagcttcacaaggccttctatggtctcaaacaggcccttagagcttggtttgataaacttaaacagtctctgttgcaacttggttttctagagctaacaattctctttttgtgaggaatcttagtgttcacaccaccttcatccttgtgtatgtcgatgatattataatcacaagtagaaattcttagaattttccaagccttatctctcaactgaacaacatgtttgcaccaaaagactttggtgacataagctattttctcgccatttaagtgacacatacaaaaataggcgtccacctttctcaaactaaatacattacaaatgtgctctacaaagccaaactccaatttgccaatagtttacctactcaaatgacatgggaaaaactgtctgccattggtagtgaccgtgtgaaagaccctcaccattacagaagtctagtgggagttctccaatatgcaactgtcacaaggcctgagatcttatatgaagtgagtaaagtgtgtcaattcatgcattctccactgtaagcacactggagaacaatgaaacacattctcaagtacttaaaagggactttagactatggagcacatcagtgatgcatattgggcatcctatattgatgataggcatttaaccattggtttctgtgtctactttagctcaaacttagtcacatggacattaaagaaataacaaactgtctcaagatccaatattgaggctaagaataggagccttgccagtataacagctgaacttgcctaattcaaggccttttatcagaacttaaggtgccaattccaagactcccaactatatggtgtgacaacctctgtatagttttattgatctctattttgtgaaggaaaacgttttgaaaaaatctcttactacacaccagccaatgaccaaactacagacatactcaccaaagcactctccaatactaggttcatattgcttagaaccaaacttaaatatgacaatcaatagtctcgtgatctgtaaggggttagttgtgcattcccacaaggttcaaattgaaagatacgattgtctatgctcaatcttattgcttagactactgctcgagaaaatatttttaaaaattttaagtgggaaattgttgaaactttgtgaaatttta

SEQ ID NO: 296660 - DNA, 5615 bp, Cannabis indica
atacttgttagtaaatctacatcttggtaaaatattcccaacaatataaacccctaaattgatttgcaccatttgatggttccctctaaaaatttggctagaaaaattattgaattgcacaggtaaagaggagtttcaccagtgcaaatttgtacctgcaaaaacgttacttgattaaattggggcatggaagccccctctttggtcgaaaaattttatcgatgcattaacacaaatgcatcggtaaatgtgacatttcttttagtgtgtgccaaagcacagacttcttcatcatgatctagagcttggacatatcttctaattactcattgcgggattttcccctaggtgggctcctccagagattaatggtattctctcgtcgcccttggagaataattgagatttccaagggtgttgttgactattgccctagagccactcctggctagattgaaactccaaggttgcttcgtatgtggagcatgcattgtaggagatgttggccttagaggtacccaaatccattggtgtaaataacctaatttaaaaagactcttgatctcaacttgtatagcaatttacactcaccagcaatgtccccaatatctttatggtattcttactctcctagccttatctttgaacaaaggaggagatttcttgtaatggacttatgtgtgggtggtagggaatacattctcatgaattttaatgagctccatatattatgtgtattgaggatcatatcctctttccttttttgtttccagctttggtgctaccctacctagaacatttttccttcaatagttgctcacttattggatcatgctggcactagacattgttgattaagttggatactggttgtggcctctaagagatacactgaaaccagttggcattcctccatagtccatatctggacaacgtttgtggcataccagactatgagactccataaaccctaagtgtagaagcgtaggagacaaatatttgtaaatatactccctgaaatccttatggttggagtatttgagagggtgttagatactgactcacgaggtatggcatctcatagaaccttgtgtcaaaagataattatgaggggccatgtaattgtaccctcaataagtaacattttgagcctcttccatatttataaaatttagggcctcttttggatttcatctaggtttttggaatcattatcgttaatgacccattttgtattagtgtccaaattattatttaacagatttagggtttaaaattatatttagtcttagatggtgtacatttagctacaagtagaggcgcaatctagtacatttcgtgaaaagaaaaaaatgtatacttcattaattccttgattatatgtgtacaaattatatatttatatatattgaggaatgctactgaagttaatttgaattgcattctatttcagaatcttcatcaaatacatgacatgttatattaggctcattatttttggtaggtatgcttttatttgtaatgcttagaaaagtgatagcttaattttgtttttatgacaatgcacattgtacctaaatagacatttagtttacttgtcttttaaaaagtttaaaataatttatagtgttgaatctgggttcaaacattcagttgaaattatgcaaaaaaaaaaaagaagttaaattgctctgtttcctctgtttcctgctctctcagctctcgagctggcgccatggaaaaaatgaggtccaagaatcatgggaagcagccatctgcatcaaagattaccaagccttcaaagaaacgttgaccgtcttcgtctggagatgtcaagaaaactaaatcgatggatgcaattctaggaattgagcccatcaatttcacagatgaggaagataacctacccgaaccagatactaaagccttccaagctctttcacctcgatcatatcttcgcaagctgcagcagcaagacgatgttcgaactgattttgctcacttcctagaagctaataaacattgcagtagggatatctctcaaggtaatacccttgttcctcccatacttcgatcaggcttagtagtttgaagtttaaatttttcattccagaatgttgaaaaagctgatactgagaagtaagtgtgaagattacaatggatgatattgaggaagaggtttcttcctagaatgctgctatatagtatgctatgttttgggtgccaatccaccactggaggttctcgaagggtttgctaggcgaatctggaaggagaaggttgataggattggattcatatcgtacgacatattcttgattaggttttcttctattgaagatagggataatgtccttaatagaggtacaccttcttcaacaagagacctgtgattatgaaggcatgggatccggatactaatttcaagaaaggggatatttgtaaggttcctatctggattcaaattgaaagtttggaactgaaatattggggccaaaacaccttgtttaagattttagggcagattggagaccctataatggtagatgaagtcaccaaacaaaggcagaaacttaatttccccaaaatactcattgaagtctctatgaaacaagacctgccagtgaaaatctaatttgaagatgagcacggttacattgtatcagtaggagttgagtatgaatgaaaacccaccatttgcaaaaattgtaatggtttgggtcataacactgatgaatgcaggaaaaaatcgagtactcagaatcaacaatgggttgtgaaagataagaaagaagaattggaaaaagaagctgttgtgaattcagatgggtttcaaccagttaccaaaggttggaaagcaaaggggaaaattcagcaaggaagtactagcaccgagaatacttttgagatattgcaagaacaaatagaacaagagtagaatgtggaaagaaaatcagatgcacaaggggcagatcgagctatataagacaggatgagggggagtgcctcctcttcaaaatggatagattactattatggaatgtctgaggagccaacaaccaccgtaaacaaagtttgatcaagcaattgattcactctccaaatgttggtcttgttaggcttcttgagacaagagtcaaggcttcaaaacttggaaccttgtactctaatgtttttaatgggtggtgttttactagtaacattgttgggcataaaggaggaagaatggtagtagcttggaatcctgataccttctgcatcaacataatcaagtgaacaaatcaattaattgatcttcaagttgccactttggatggtaagaattttcttgttacatttgtttatgcctttgatgatgaggaaggtagaaaggaattatggaaagatttgaactctattacaacacaagatgcttaggtagtattgggagactttaatgacattttaaagcaagaataaagggttggaagtagggtaaaaaatcacagttctcatgcttttagggactgtatttcttgctgttagttggaggatatcaaaagaagtggtaagttttttacatggtgtaacaatcagcaagggggaaatgtatttactctaaattggacagggttatggctaatgcaaagtgggtggaatccttcccaggtgctgaagctatattcttaaatgaaggagcattcgatcactttcttgctctagtgaattttcattagttagctcacaatgggaaaaagccttttcgctacttcaatatgtggatctcacacccagaatatgcaagcagattacgacaaatttgggagaaccattataattgtgcaatgatgtaccaaattgttaccaaactcaaagccttaaaggctgtctttaagaagattaatcaagagggctttactgatttacaatcagcagtaattcaagcaaaaagtattctagacagatgcgagaataagttgctccggaaccctttaaccagctcctgcaactcgaagaacttgaagccaggaacactttcacacaagcacataagaactatcaattatttcttcatcaaaaagcaaaaactagttggataagagatggcgatgataacaccgcggtattacatgcaaatctcaaagctagaaacagccaaaatagaatcctatccattgtggatacttaaggaaccagagtagatgacccgaccaagatcactgaagtatttcttgcctattataagcagttgcttggtacaagaatgacaaatagaaggaaggtaatagatcaagtacttaataatgggcccactgttacaatgcaacaaagtgtatctcttttggctcctatttcagatgaagagatcaaaaaagccatgtttgctattcctaaaactaaagcatctggtctagatggctactccagttttttctttcaagacaactgggaaatacttggcggtgacatttgtgaagcagtgagatcttttcttcactctgagaagattcctaaggagatcaattccacgactcttactatcattcctaaagtgagatgtccaaacacaccaattgactttagaccaattgcatgctgcaatgtgatctataaagtagccactaaagtgattcactctagactcaaggatatccttccaaatattgtggctcaaaaccagggtagatttgttaaaggaaggttcattgcccataacataatgatctaccaagtcttggtcagacattatgggaggaggtcaccaaagggtaattgcatgatcaaacttgatttgtaaaaagcctatgatacagttgagtgggatttcattgaagaggttgtaagggggctactatttcctgaaaagttcattactcttgtaatgaattgtgtcagaactccaaaattctctctttttttttcaatggatcccttcatggtttctttgaatccaagagaggattaagacaaggtgatcccctatcaccactattatttgtcattggcatggaatacttgacccgaattatgaaaaaagtaggaaacaaaagtgattttgcttttcacgagagatgtgaagccttgaaactcaatcatcttagctttccagatgatgtactacttttttgcagaggtgaatacaaaagaatcattcttttactccaaggattgaagcttttttgagccacatcaggattgcaacccaataaaacaaagtctgcaatttattgcagcaacatggctaattctgatgttactggagtgctggaggcatcatgttttttaagcaacaaacaccattcagataccttggtatccccacatgcaccaagaagatatcgagacaggagtgcactgttttgatagaaaaaatgaaagtaagaattcggtcttggagcactaggaacatttcttttggttgaagggttgttctcattaactcagttttaacagcaatacactcttactggtgccagattcttaagcttccaaagaaggtaattcatgagattgaagctatttgtcgagctttccttttgaaaggtcaatatatgatatagggagctggattattggcatgggaaaatgtatgccaaccaaagatagcagggggctcgtgttgggttttgtgccct
